United States Patent Application Publication US 2011/0183924 A1 - sequence listing, part 214

SEQ ID NO: 533376 - DNA, 1869 bp, Homo sapiens
tctctgaagttccagaatcgatggaagtggacggcacgccgcggcggggtgggtgcaagatgccgctgccggttcaggtgtttaacttgcagggggccgtggagcccatgcagatcgacgtggacccccaggaagacccgcagaatgcacctgacgtcaactacgtggtggagaaccccagcctggatctggaacagtacgcggccagctacagcggcctgatgcgcatcgaacggctgcagttcattgctgatcactgccccacgctgcgggtggaggccctgaagatggccctctccttcgtgcagagaacctttaacgtggacatgtacgaggagatccaccgcaagctctcagaggccaccaccagggagctgcagaacgcacccgacgccatccctgagagcggcgtggagcccccagccctggacacggcctgggtggaggccacgcggaagaaggcgctgctgaagctggagaagctggacacagacctgaagaactacaagggcaactccatcaaagagagcatccggcgcggccacgacgacctgggcgaccactacctggactgtggggacctcagcaacgccctcaagtgctattcccgggcccgggactactgcaccagcgccaaacacgtcatcaacatgtgcctcaatgtcatcaaggtcagcgtctacttgcagaattggtctcatgtgctcagctacgtcagcaaggctgagtccaccccagagattgccgagcagcgaggagagcgtgacagccagacccaggccatcctcaccaagctcaagtgtgccgcaggcttggcagagctggccgccaggaagtacaagcaggctgccaagtgcctcctgctggcttcctttgatcactgtgacttccctgagctgctgtcccccagcaacgtggccatctacggtggcctgtgcgccttggctacctttgaccggcaggagctgcagcgcaatgtcatctccagcagctccttcaagttgttcttggagctggagccacaggtccgagacatcatcttcaaattctacgagtccaagtacgcctcatgtctcaagatgctggacgagatgaaggacaacctgctcctggacatgtatctggccccccatgtcaggaccctgtacacccagattcgcaaccgtgccctcatccagtatttcagcccctacgtgtcagccgacatgcataggatggcggcagccttcaataccacggtggccgccctggaggacgagctgacgcagctaatcctggaggggctgatcagtgcccgtgtggactcacacagcaagatcctatacgcccgggacgtggatcagcgcagcaccacctttgagaagtctctgttgatgggcaaggagttccagcgccgcgccaaggccatgatgctgcgggcagctgtgctccgcaaccagatccatgtcaagtccccgcccagagaagggagccagggggagctgactccagccaacagccagtcccggatgagcaccaacatgtgaggggtgaaccttggcctccaggacatctgcaccccctccccacctccacggacctcggacctccaggcggctcagtgctgcctgcggcccagctaaggggcctggccactgggtgccacccagcctgtgtgccctccctggggctgaggaggcaggcggctgctagttgtggcccttcctggaaggagaggcctgcagggctcgaccctgtgggtttctgtccccagggagcagactgtgcggcacccaggcccagtggcaccatttcccagacccctcctgttcccgcctcagtcaggtgcagacaagtgggcggtgtccattaaagagcagactcagcgtt

SEQ ID NO: 533377 - DNA, 702 bp, Homo sapiens
  misc_feature (454)..(454): n is a, c, g, or t
aggagacagttgatcagtaagtgaatgtgaaatgtattaaataacatggtgagtcccaactgccagtaacgtgattagggagatgacacacaaaaagttaagtaatagtgatagaatgcccaatgagtacctttaacttgtatgtaggagggagatgggtatgttgtagtgctcattgtttcagaaataaggtagggttttataggggaggagttattccaacagagaaaagcagcatgtattattagtcacttataccatgtcgtacaggttatatttgtagatgaggccaagggatatgtttgggatttttagaagctggctttatttaagaactattcttttgcataggtagtagctagtaatttgggaaatggcctcaataaaaacttgcaacagcatgtgtgctgttttattgtattcttaccagtgtacaatttggaggtaatatatntatatagaattaaaggaattttaaagttctaaatgattaaagaaaggctaggtaagttttcactctttcattaatttccctttttcgtttggtttgtggttctgcttttccgtttgtgcagatgtttcattgggactgtttaccagattgctttcttaaatagccagcttggggttactttaaaacaagcttatttgtagtcagagcatacaaatcattgcttataacgcattggtattataaggcga

SEQ ID NO: 533378 - DNA, 1954 bp, Homo sapiens
tctctgaagttccagaatcgatggaagtggacggcacgccgcggcggggtgggtgcaagatgccgctgccggttcaggtgtttaacttgcagcagtaggtcagacctcgtcctgcccggcacggccggggacttcagcctgagcgccagcctgtcggcctgtacgctgctctacgagggggccgtggagcccatgcagatcgacgtggacccccaggaagacccgcagaatgcacctgacgtcaactacgtggtggagaaccccagcctggatctggaacagtacgcggccagctacagcggcctgatgcgcatcgaacggctgcagttcattgctgatcactgccccacgctgcgggtggaggccctgaagatggccctctccttcgtgcagagaacctttaacgtggacatgtacgaggagatccaccgcaagctctcagaggccaccaccagggagctgcagaacgcacccgacgccatccctgagagcggcgtggagcccccagccctggacacggcctgggtggaggccacgcggaagaaggcgctgctgaagctggagaagctggacacagacctgaagaactacaagggcaactccatcaaagagagcatccggcgcggccacgacgacctgggcgaccactacctggactgtggggacctcagcaacgccctcaagtgctattcccgggcccgggactactgcaccagcgccaaacacgtcatcaacatgtgcctcaatgtcatcaaggtcagcgtctacttgcagaattggtctcatgtgctcagctacgtcagcaaggctgagtccaccccagagattgccgagcagcgaggagagcgtgacagccagacccaggccatcctcaccaagctcaagtgtgccgcaggcttggcagagctggccgccaggaagtacaagcaggctgccaagtgcctcctgctggcttcctttgatcactgtgacttccctgagctgctgtcccccagcaacgtggccatctacggtggcctgtgcgccttggctacctttgaccggcaggagctgcagcgcaatgtcatctccagcagctccttcaagttgttcttggagctggagccacaggtccgagacatcatcttcaaattctacgagtccaagtacgcctcatgtctcaagatgctggacgagatgaaggacaacctgctcctggacatgtatctggccccccatgtcaggaccctgtacacccagattcgcaaccgtgccctcatccagtatttcagcccctacgtgtcagccgacatgcataggatggcggcagccttcaataccacggtggccgccctggaggacgagctgacgcagctaatcctggaggggctgatcagtgcccgtgtggactcacacagcaagatcctatacgcccgggacgtggatcagcgcagcaccacctttgagaagtctctgttgatgggcaaggagttccagcgccgcgccaaggccatgatgctgcgggcagctgtgctccgcaaccagatccatgtcaagtccccgcccagagaagggagccagggggagctgactccagccaacagccagtcccggatgagcaccaacatgtgaggggtgaaccttggcctccaggacatctgcaccccctccccacctccacggacctcggacctccaggcggctcagtgctgcctgcggcccagctaaggggcctggccactgggtgccacccagcctgtgtgccctccctggggctgaggaggcaggcggctgctagttgtggcccttcctggaaggagaggcctgcagggctcgaccctgtgggtttctgtccccagggagcagactgtgcggcacccaggcccagtggcaccatttcccagacccctcctgttcccgcctcagtcaggtgcagacaagtgggcggtgtccattaaagagcagactcagcgtt

SEQ ID NO: 533379 - DNA, 399 bp, Homo sapiens
aatctacaggatcccccagttctgcttcttgaaaatcctatagcccaggctatgcttcagtctttcgggattgtacagagtactggagctgagggttgcaggccggatagggatcagacaaaataagccacctaggctgagggatacccctcactccttcactccatatcaccaagtgaggaaagggctagtctctttccccagtgccccttcccctgccaagggtgagcagctgcatactagaaccaggccgactgttttgggcagccgccctcgtcgccgcctttcaagacgctcctagtctagccgcagagtcagaaggggatgcttgggctccgtccctcctgcctgctcctcctcttctgggtcttctaggccgtgtgatctggcctgccccct

SEQ ID NO: 533380 - DNA, 246 bp, Homo sapiens
tgaagcactgggcacagagtgagatcccatttcaaaaaaaaaaaaatggtgtagactacaaatttacaattcttctcatttcagtgtcacgataatactggttaatatttggaatacagatttctccttaaattctaattttggtacattggtccctttttaaagttcaagttttactgaagttttaattttacattgtagttaaaattttactctttattattttttattgagtgtggcagggtt

SEQ ID NO: 533381 - DNA, 294 bp, Homo sapiens
aaacaaatggaaaaacattccatgctcacagatagaaagatcaatattgtgaaaatggccatactgcccaaagtagtttatagattcaatgctattcccatcaagcttttatttgaataaatataaaccgctattgactttcttcacagaatagaaagcacacctttaaatttcatatggcccaaagagagcccatatagccaagacaatcctaagcaaaaggacaagctgggggcatcattacctcctcaactatactcaggcatcagatccaaacagcatgtactagtacca

SEQ ID NO: 533382 - DNA, 320 bp, Homo sapiens
cgcggggcccgaagcgtttactttgaaaaaattagagtgttcaaagctcaagtgctgcctgcggcccagctaaggggcctggccactgggtgccacccagcctgtgtgccctccctggggctgaggaggcaggcggctgctagttgtggcccttcctggaaggagaggcctgcagggctcgaccctgtgggtttctgtccccagggagcagactgtgcggcacccaggcccagtggcaccatttcccagacccctcctgttcccgcctcagtcaggtgcagacaagtgggcggtgtccattaaagagcagactcagcgtt

SEQ ID NO: 533383 - DNA, 376 bp, Homo sapiens
ggtctctgctcctcagctgactccagccaacagccagtcccggatgagcaccaacatgtgaggggtgaaccttggcctccaggggcaggcagaggacagagttctgaggggtctgcctcaccagctccttcaagttgttcttggagctggagccacaggtccgagacatcatcttcaaattctacgagtccaagtacgcctcatgtctcaagatgctggacgagatgaaggtgggccccgcctggggtaggggtgaggtggggccctgcctggcctcctgtcctggtcctgaccagccccttccccaggctcctgttcccgcctcagtcaggtgcagacaagtgggcggtgtccattaaagagcagactcagcgtt

SEQ ID NO: 533384 - DNA, 1947 bp, Homo sapiens
tctctgaagttccagaatcgatggaagtggacggcacgccgcggcggggtgggtgcaagatgccgctgccggttcaggtgtttaacttgcagggggccgtggagcccatgcagatcgacgtggacccccaggaagacccgcagaatgcacctgacgtcaactacgtggtggagaaccccagcctggatctggaacagtacgcggccagctacagcggcctgatgcgcatcgaacggctgcagttcattgctgatcactgccccacgctgcgggtggaggccctgaagatggccctctccttcgtgcagagaacctttaacgtggacatgtacgaggagatccaccgcaagctctcagaggccaccaccagggagctgcagaacgcacccgacgccatccctgagagcggcgtggagcccccagccctggacacggcctgggtggaggccacgcggaagaaggcgctgctgaagctggagaagctggacacagacctgaagaactacaagggcaactccatcaaagagagcatccggcgcggccacgacgacctgggcgaccactacctggactgtggggacctcagcaacgccctcaagtgctattcccgggcccgggactactgcaccagcgccaaacacgtcatcaacatgtgcctcaatgtcatcaaggtcagcgtctacttgcagaattggtctcatgtgctcagctacgtcagcaaggctgagtccaccccagagattgccgagcagcgaggagagcgtgacagccagacccaggccatcctcaccaagctcaagtgtgccgcaggcttggcagagctggccgccaggaagtacaagcaggctgccaagtgcctcctgctggcttcctttgatcactgtgacttccctgagctgctgtcccccagcaacgtggccatctacggtggcctgtgcgccttggctacctttgaccggcaggagctgcagcgcaatgtcatctccagcagctccttcaagttgttcttggagctggagccacaggtccgagacatcatcttcaaattctacgagtccaagtacgcctcatgtctcaagatgctggacgagatgaaggtgggccccgcctggggtaggggtgaggtggggccctgcctggcctcctgtcctggtcctgaccagccccttccccaggacaacctgctcctggacatgtatctggccccccatgtcaggaccctgtacacccagattcgcaaccgtgccctcatccagtatttcagcccctacgtgtcagccgacatgcataggatggcggcagccttcaataccacggtggccgccctggaggacgagctgacgcagctaatcctggaggggctgatcagtgcccgtgtggactcacacagcaagatcctatacgcccgggacgtggatcagcgcagcaccacctttgagaagtctctgttgatgggcaaggagttccagcgccgcgccaaggccatgatgctgcgggcagctgtgctccgcaaccagatccatgtcaagtccccgcccagagaagggagccagggggagctgactccagccaacagccagtcccggatgagcaccaacatgtgaggggtgaaccttggcctccaggacatctgcaccccctccccacctccacggacctcggacctccaggcggctcagtgctgcctgcggcccagctaaggggcctggccactgggtgccacccagcctgtgtgccctccctggggctgaggaggcaggcggctgctagttgtggcccttcctggaaggagaggcctgcagggctcgaccctgtgggtttctgtccccagggagcagactgtgcggcacccaggcccagtggcaccatttcccagacccctcctgttcccgcctcagtcaggtgcagacaagtgggcggtgtccattaaagagcagactcagcgtt

SEQ ID NO: 533385 - DNA, 396 bp, Homo sapiens
  misc_feature (8)..(8): n is a, c, g, or t
  misc_feature (158)..(158): n is a, c, g, or t
cagactgnacatggagccacagtaagtgagaagtgaaccccatctgtaaccagagcgcagtagtttcattacagatgggagcaaaccttggatacttgatgcttaaaaatccaccataaggaaagatggaaacgttcccatgtggctcagatcacatntctgttcattcattttaggcgctgtggagaattccatggagtgcatccttgtgaagcatggtgtttctcattctcagatctcacccaggagggtagggaatgcttggttggctagtcaggtgcacaatgtgaaaatagctgtgacaactttaggacagagagagtctgacaggagctgagaactgctgctccctggtactctgtccatctctttcgtgtcaggtacaggtctctgtgg

SEQ ID NO: 533386 - DNA, 2037 bp, Homo sapiens
tctctgaagttccagaatcgatggaagtggacggcacgccgcggcggggtgggtgcaagatgccgctgccggttcaggtgtttaacttgcagggggccgtggagcccatgcagatcgacgtggacccccaggaagacccgcagaatgcacctgacgtcaactacgtggtggagaaccccagcctggatctggaacagtacgcggccagctacagcggcctgatgcgcatcgaacggctgcagttcattgctgatcactgccccacgctgcgggtggaggccctgaagatggccctctccttcgtgcagagaacctttaacgtggacatgtacgaggagatccaccgcaagctctcagaggccaccaccagggagctgcagaacgcacccgacgccatccctgagagcggcgtggagcccccagccctggacacggcctgggtggaggccacgcggaagaaggcgctgctgaagctggagaagctggacacagacctgaagaactacaagggcaactccatcaaagagagcatccggcgcggccacgacgacctgggcgaccactacctggactgtggggacctcagcaacgccctcaagtgctattcccgggcccgggactactgcaccagcgccaaacacgtcatcaacatgtgcctcaatgtcatcaaggtcagcgtctacttgcagaattggtctcatgtgctcagctacgtcagcaaggctgagtccaccccagagattgccgagcagcgaggagagcgtgacagccagacccaggccatcctcaccaagctcaagtgtgccgcaggcttggcagagctggccgccaggaagtacaagcaggctgccaagtgcctcctgctggcttcctttgatcactgtgacttccctgagctgctgtcccccagcaacgtggccatctacggtggcctgtgcgccttggctacctttgaccggcaggagctgcagcgcaatgtcatctccagcagctccttcaagttgttcttggagctggagccacaggtccgagacatcatcttcaaattctacgagtccaagtacgcctcatgtctcaagatgctggacgagatgaaggacaacctgctcctggacatgtatctggccccccatgtcaggaccctgtacacccagattcgcaaccgtgccctcatccagtatttcagcccctacgtgtcagccgacatgcataggatggcggcagccttcaataccacggtggccgccctggaggacgagctgacgcagctaatcctggaggggctgatcagtgcccgtgtggactcacacagcaagatcctatacgcccgggacgtggatcagcgcagcaccacctttgagaagtctctgttgatgggcaaggagttccagcgccgcgccaaggccatgatgctgcgggcagctgtgctccgcaaccagatccatgtcaagtccccgcccagagaagggagccagggggagctgactccagccaacagccagtcccggatgagcaccaacatgtgaggggtgaaccttggcctccaggacatctgcaccccctccccacctccacggacctcggacctccaggcggctcagtgctgcctgcggcccagctaaggggcctggccactgggtgccacccagcctgtgtgccctccctggggctgaggaggcaggcggctgctagttgtggcccttcctggaaggagaggcctgcagggctcgaccctgtgggtttctgtccccagggagcagactgtgcggcacccaggcccagtggcaccatttcccagacccctcctgttcccgcctcagtcaggtgcagacaagtgggcggtgtccattaaagagcagactcagcgttgctcttggctgttctttcctgccgtgcaggctctggtcacccctgggtggccttgggttcctgagggctgtctccctgggactaggcttggaggcagggcctggtgagagaaatgagaagcctggccctcagattcaacagcccccagcagcagccactgtggcctcg

SEQ ID NO: 533387 - DNA, 149 bp, Homo sapiens
tttctctaactggtccaattcttcctatagaatacactatagcacgtcatttaagagttgtctctcccggctgggcacggtggctcatgccagtaatcccagcattctgggatgctgaggcgggcagatcacaagctcaagaagataag

SEQ ID NO: 533388 - DNA, 2235 bp, Homo sapiens
tctctgaagttccagaatcgatggaagtggacggcacgccgcggcggggtgggtgcaagatgccgctgccggttcaggtgtttaacttgcagggggccgtggagcccatgcagatcgacgtggacccccaggaagacccgcagaatgcacctgacgtcaactacgtggtggagaaccccagcctggatctggaacagtacgcggccagctacagcggcctgatgcgcatcgaacggctgcagttcattgctgatcactgccccacgctgcgggtggaggccctgaagatggccctctccttcgtgcagagaacctttaacgtggacatgtacgaggagatccaccgcaagctctcagaggccaccaccagggagctgcagaacgcacccgacgccatccctgagagcggcgtggagcccccagccctggacacggcctgggtggaggccacgcggaagaaggcgctgctgaagctggagaagctggacacagacctgaagaactacaagggcaactccatcaaagagagcatccggcgcggccacgacgacctgggcgaccactacctggactgtggggacctcagcaacgccctcaagtgctattcccgggcccgggactactgcaccagcgccaaacacgtcatcaacatgtgcctcaatgtcatcaaggtcagcgtctacttgcagaattggtctcatgtgctcagctacgtcagcaaggctgagtccaccccagagattgccgagcagcgaggagagcgtgacagccagacccaggccatcctcaccaagctcaagtgtgccgcaggcttggcagagctggccgccaggaagtacaagcaggctgccaagtgcctcctgctggcttcctttgatcactgtgacttccctgagctgctgtcccccagcaacgtggccatctacggtggcctgtgcgccttggctacctttgaccggcaggagctgcagcgcaatgtcatctccagcagctccttcaagttgttcttggagctggagccacaggtccgagacatcatcttcaaattctacgagtccaagtacgcctcatgtctcaagatgctggacgagatgaaggacaacctgctcctggacatgtatctggccccccatgtcaggaccctgtacacccagattcgcaaccgtgccctcatccagtatttcagcccctacgtgtcagccgacatgcataggatggcggcagccttcaataccacggtggccgccctggaggacgagctgacgcagctaatcctggaggggctgatcagtgcccgtgtggactcacacagcaagatcctatacgcccgggacgtggatcagcgcagcaccacctttgagaagtctctgttgatgggcaaggagttccagcgccgcgccaaggccatgatgctgcgggcagctgtgctccgcaaccagatccatgtcaagtccccgcccagagaagggagccagggggagctgactccagccaacagccagtcccggatgagcaccaacatgtgaggggtgaaccttggcctccaggacatctgcaccccctccccacctccacggacctcggacctccaggcggctcagtgctgcctgcggcccagctaaggggcctggccactgggtgccacccagcctgtgtgccctccctggggctgaggaggcaggcggctgctagttgtggcccttcctggaaggagaggcctgcagggctcgaccctgtgggtttctgtccccagggagcagactgtgcggcacccaggcccagtggcaccatttcccagacccctcctgttcccgcctcagtcaggtgcagacaagtgggcggtgtccattaaagagcagactcagcgttaaaaaaaaaaaaaaaaaaaaaaaaaaaaaaaaaaaaaaaaaaaaaaaaaaaaaaaaaaaaaaaaaaaaaaaaaaaaaaaaaaaaaaaaaaaaaaaaaaaaaaaaggggggggggccaaaaacccccgagggaggggcgcgcaagaaggcagcagcccacccgactcgcatgtattggaagaaaaggcgcggcgccaacaaggagggcgcccctctaatgaacaagcgagcgaccggggcggggggcgctacaaacaacctgcggcggaggagagacagaatgtgggcgcagcggcgacatatggggagaaggacaccccacctagctggcgaggggagagaaacgcgggggacgaaacgtgacgag

SEQ ID NO: 533389 - DNA, 281 bp, Homo sapiens
gagtatcccgacttgggactgtcaggtacagagctactagtataacgcagcatgaaggagtaggtggcagcgtgagaacgactcaacagagcatgagaaagactaagccctaaaggtgatcaacaacaagtactgaaggaggaagtggtcagctgtggctggggcaaaacacgcccagtcagttacattggcctgtgtttggtcatccagggacaaagtgacctttttagtgcctgtcggcccagtcccaagtcggagaaaacagtcccaagcggcgaaga

SEQ ID NO: 533390 - DNA, 2225 bp, Homo sapiens
tctctgaagttccagaatcgatggaagtggacggcacgccgcggcggggtgggtgcaagatgccgctgccggttcaggtgtttaacttgcagggggccgtggagcccatgcagatcgacgtggacccccaggaagacccgcagaatgcacctgacgtcaactacgtggtggagaaccccagcctggatctggaacagtacgcggccagctacagcggcctgatgcgcatcgaacggctgcagttcattgctgatcactgccccacgctgcgggtggaggccctgaagatggccctctccttcgtgcagagaacctttaacgtggacatgtacgaggagatccaccgcaagctctcagaggccaccaccagggagctgcagaacgcacccgacgccatccctgagagcggcgtggagcccccagccctggacacggcctgggtggaggccacgcggaagaaggcgctgctgaagctggagaagctggacacagacctgaagaactacaagggcaactccatcaaagagagcatccggcgcggccacgacgacctgggcgaccactacctggactgtggggacctcagcaacgccctcaagtgctattcccgggcccgggactactgcaccagcgccaaacacgtcatcaacatgtgcctcaatgtcatcaaggtcagcgtctacttgcagaattggtctcatgtgctcagctacgtcagcaaggctgagtccaccccagagattgccgagcagcgaggagagcgtgacagccagacccaggccatcctcaccaagctcaagtgtgccgcaggcttggcagagctggccgccaggaagtacaagcaggctgccaagtgcctcctgctggcttcctttgatcactgtgacttccctgagctgctgtcccccagcaacgtggccatctacggtggcctgtgcgccttggctacctttgaccggcaggagctgcagcgcaatgtcatctccagcagctccttcaagttgttcttggagctggagccacaggtccgagacatcatcttcaaattctacgagtccaagtacgcctcatgtctcaagatgctggacgagatgaaggacaacctgctcctggacatgtatctggccccccatgtcaggaccctgtacacccagattcgcaaccgtgccctcatccagtatttcagcccctacgtgtcagccgacatgcataggatggcggcagccttcaataccacggtggccgccctggaggacgagctgacgcagctaatcctggaggggctgatcagtgcccgtgtggactcacacagcaagatcctatacgcccgggacgtggatcagcgcagcaccacctttgagaagtctctgttgatgggcaaggagttccagcgccgcgccaaggccatgatgctgcgggcagctgtgctccgcaaccagatccatgtcaagtccccgcccagagaagggagccagggggagctgactccagccaacagccagtcccggatgagcaccaacatgtgaggggtgaaccttggcctccaggacatctgcaccccctccccacctccacggacctcggacctccaggcggctcagtgctgcctgcggcccagctaaggggcctggccactgggtgccacccagcctgtgtgccctccctggggctgaggaggcaggcggctgctagttgtggcccttcctggaaggagaggcctgcagggctcgaccctgtgggtttctgtccccagggagcagactgtgcggcacccaggcccagtggcaccatttcccagacccctcctgttcccgcctcagtcaggtgcagacaagtgggcggtgtccattaaagagcagactcagcgttaaaaaaaaaaaaaaaaaaaaaaaaaaaaaaaaaaaaaaaaaaaaaaaaagggggggaaaaaaaaaaaaaaaacacaagagagaggggaaaaaaaaaaaaagaaacaacggacaggagtggggcgagcaacacaaagtgaccccccacacaaggagcgaccaaaaaaacagcacaccccggtgacgtcgggactaaaaagcggcggccccacaaagggagaaaacaacataataacacgcggagaaacactgcggcgcgaaggcggaaaaacaacaacagcagaaggacggaaaacaacagtggcacccagagaccccacgggaagaagggagacgccccaagggggaggggagaac

SEQ ID NO: 533391 - DNA, 188 bp, Homo sapiens
aggctgattctagagtatcccgacggctgggggatctgccgagtccgagccctgggctccttcttctaagctggactcccttacctccggccctcttctctttcccagatcccccctcccctttgaaagtgctttgaaacccccattaagtaacagtgtgtgcatcagactgaggcattaggggcaat

SEQ ID NO: 533392 - DNA, 350 bp, Homo sapiens
gtcgacctgacccaaaaataagtataaagtagaactagttaaggccaggcacggcgtctcacacctgtaatcctggcactttcggaggccgaggcaggcagatcatgagtcaggaaattgagaccatcctcgccaacatggtgaaacccgtctctactaaaaatataaaaattagccgggcatggtggcgcgtgcctgtagtcccagctacacaggaggctgaggcaggagaatggcgtgaacccgggaggcggacgttgcagtgagtcgagatcgcgccactgcactccagcctgggcgacagagcgaaactccgtctcaaaaaaaaaataggagaaaaaaagtcgacg

SEQ ID NO: 533393 - DNA, 2365 bp, Homo sapiens
  misc_feature (350)..(350): n is a, c, g, or t
tctctgaagttccagaatcgatggaagtggacggcacgccgcggcggggtgggtgcaagatgccgctgccggttcaggtgtttaacttgcaggtaacgagccgaggccgccccgggcctccgcgcccccgcgccccccgccactggggccgggctgaggtcgagcaggggcgcggggcctgcgccaggagtcggtcgggcacgctccgtgccgggcctccgcgggcagcgcgcgtcgggggctgcagggccgagggcgcgtctccgccgtggctgcgcgctgcgatcgggggccgccgggccgcgcccgccccgcctcccctcccagcagctcacgggagaggttcccgnccgccccgacgctaacgctctttctcccttcagcagccagccagctctgtgtcagggtcggggggtgcagaaagtcaggacagaatgagggatagctcggcccccagctcggcctcctcgtcagtgacagatctgtactgcacccctcacaggcagtaggtcagacctcgtcctgcccggcacggccggggacttcagcctgagcgccagcctgtcggcctgtacgctgctctacgagggggccgtggagcccatgcagatcgacgtggacccccaggaagacccgcagaatgcacctgacgtcaactacgtggtggagaaccccagcctggatctggaacagtacgcggccagctacagcggcctgatgcgcatcgaacggctgcagttcattgctgatcactgccccacgctgcgggtggaggccctgaagatggccctctccttcgtgcagagaacctttaacgtggacatgtacgaggagatccaccgcaagctctcagaggccaccaccagggagctgcagaacgcacccgacgccatccctgagagcggcgtggagcccccagccctggacacggcctgggtggaggccacgcggaagaaggcgctgctgaagctggagaagctggacacagacctgaagaactacaagggcaactccatcaaagagagcatccggcgcggccacgacgacctgggcgaccactacctggactgtggggacctcagcaacgccctcaagtgctattcccgggcccgggactactgcaccagcgccaaacacgtcatcaacatgtgcctcaatgtcatcaaggtcagcgtctacttgcagaattggtctcatgtgctcagctacgtcagcaaggctgagtccaccccagagattgccgagcagcgaggagagcgtgacagccagacccaggccatcctcaccaagctcaagtgtgccgcaggcttggcagagctggccgccaggaagtacaagcaggctgccaagtgcctcctgctggcttcctttgatcactgtgacttccctgagctgctgtcccccagcaacgtggccatctacggtggcctgtgcgccttggctacctttgaccggcaggagctgcagcgcaatgtcatctccagcagctccttcaagttgttcttggagctggagccacaggtccgagacatcatcttcaaattctacgagtccaagtacgcctcatgtctcaagatgctggacgagatgaaggacaacctgctcctggacatgtatctggccccccatgtcaggaccctgtacacccagattcgcaaccgtgccctcatccagtatttcagcccctacgtgtcagccgacatgcataggatggcggcagccttcaataccacggtggccgccctggaggacgagctgacgcagctaatcctggaggggctgatcagtgcccgtgtggactcacacagcaagatcctatacgcccgggacgtggatcagcgcagcaccacctttgagaagtctctgttgatgggcaaggagttccagcgccgcgccaaggccatgatgctgcgggcagctgtgctccgcaaccagatccatgtcaagtccccgcccagagaagggagccagggggagctgactccagccaacagccagtcccggatgagcaccaacatgtgaggggtgaaccttggcctccaggacatctgcaccccctccccacctccacggacctcggacctccaggcggctcagtgctgcctgcggcccagctaaggggcctggccactgggtgccacccagcctgtgtgccctccctggggctgaggaggcaggcggctgctagttgtggcccttcctggaaggagaggcctgcagggctcgaccctgtgggtttctgtccccagggagcagactgtgcggcacccaggcccagtggcaccatttcccagacccctcctgttcccgcctcagtcaggtgcagacaagtgggcggtgtccattaaagagcagactcagcgtt

SEQ ID NO: 533394 - DNA, 148 bp, Homo sapiens
cgcattagctactgctgtcacatggaaccttctcacttcggctcaaagtctcgttgatattgtactacacagatctgactgggtggtccaccgggccgcgcctaggcttaaggctcacgcagcggcctcctactcgtcgcggcgtgga

SEQ ID NO: 533395 - DNA, 2198 bp, Homo sapiens
  misc_feature (124)..(124): n is a, c, g, or t
  misc_feature (132)..(132): n is a, c, g, or t
  misc_feature (141)..(141): n is a, c, g, or t
  misc_feature (151)..(151): n is a, c, g, or t
  misc_feature (168)..(168): n is a, c, g, or t
ggggctggtcctcctgcctcctggggttgaggtggcgtcccgttcttctccgtggcttggaggaaactacatcaggatggtggctgggaacgtgtaggggccctcagaggcccctgtgtagttngttgtccnctgtctgcnttctggcttncagagatgagcggctanaatcaggcgaggggtttctgcttctgagccttagagtcttgtgaggagacccctccctgatgtggtggcacaggagcctgggtgggggcgggggtgactgggagggcacacctgggggacagcagcggcgggagtgtggtccgactggcctggaagatcttgggcagagctgacctcagagaacagtgcgggtctctcgccctcctggggcagtccccaggacgaggtgccaggtgcctggcccatgttgcagggggccgtggagcccatgcagatcgacgtggacccccaggaagacccgcagaatgcacctgacgtcaactacgtggtggagaaccccagcctggatctggaacagtacgcggccagctacagcggcctgatgcgcatcgaacggctgcagttcattgctgatcactgccccacgctgcgggtggaggccctgaagatggccctctccttcgtgcagagaacctttaacgtggacatgtacgaggagatccaccgcaagctctcagaggccaccaccagggagctgcagaacgcacccgacgccatccctgagagcggcgtggagcccccagccctggacacggcctgggtggaggccacgcggaagaaggcgctgctgaagctggagaagctggacacagacctgaagaactacaagggcaactccatcaaagagagcatccggcgcggccacgacgacctgggcgaccactacctggactgtggggacctcagcaacgccctcaagtgctattcccgggcccgggactactgcaccagcgccaaacacgtcatcaacatgtgcctcaatgtcatcaaggtcagcgtctacttgcagaattggtctcatgtgctcagctacgtcagcaaggctgagtccaccccagagattgccgagcagcgaggagagcgtgacagccagacccaggccatcctcaccaagctcaagtgtgccgcaggcttggcagagctggccgccaggaagtacaagcaggctgccaagtgcctcctgctggcttcctttgatcactgtgacttccctgagctgctgtcccccagcaacgtggccatctacggtggcctgtgcgccttggctacctttgaccggcaggagctgcagcgcaatgtcatctccagcagctccttcaagttgttcttggagctggagccacaggtccgagacatcatcttcaaattctacgagtccaagtacgcctcatgtctcaagatgctggacgagatgaaggacaacctgctcctggacatgtatctggccccccatgtcaggaccctgtacacccagattcgcaaccgtgccctcatccagtatttcagcccctacgtgtcagccgacatgcataggatggcggcagccttcaataccacggtggccgccctggaggacgagctgacgcagctaatcctggaggggctgatcagtgcccgtgtggactcacacagcaagatcctatacgcccgggacgtggatcagcgcagcaccacctttgagaagtctctgttgatgggcaaggagttccagcgccgcgccaaggccatgatgctgcgggcagctgtgctccgcaaccagatccatgtcaagtccccgcccagagaagggagccagggggagctgactccagccaacagccagtcccggatgagcaccaacatgtgaggggtgaaccttggcctccaggacatctgcaccccctccccacctccacggacctcggacctccaggcggctcagtgctgcctgcggcccagctaaggggcctggccactgggtgccacccagcctgtgtgccctccctggggctgaggaggcaggcggctgctagttgtggcccttcctggaaggagaggcctgcagggctcgaccctgtgggtttctgtccccagggagcagactgtgcggcacccaggcccagtggcaccatttcccagacccctcctgttcccgcctcagtcaggtgcagacaagtgggcggtgtccattaaagagcagactcagcgtt

SEQ ID NO: 533396 - DNA, 195 bp, Homo sapiens
atgtaaagatcatgtgtcccggcagacattgtttgaggattccttccacaagattatggcattaagaccctatgacttgaggaggcgcttatatgtaatattagagggaagaaggacttgattatggtgcctagcagaaaatggttttctgcttcaaatagtttgacccatgtatgcttattgagtattcggcag

SEQ ID NO: 533397 - DNA, 461 bp, Homo sapiens
accggcccgcactaggcgcacttctggaataagactccagcactgggccaggcgccgtggctcacgcctgtaatcccagcactttgggaggccgagacgggcggatcacgaggtcaggagatcgagaccatcctggctaacatggtgaagccccgactctactaaaaatacaaaaaaattagccaggcgtggtggcgggcatctgtagtcccagctactcgggaggctgaggcaggagaatggcgtgaacccgggagacggagattgcagtgagctgagatcgcgccactgcactccaggctggtcgacagagcgagactccatctcaaaaaaaaaaaaagttaaaacaatgaggcggggtgcgggggctaacactggtaatcccagtatgtggagaggcagaggcagaggcgggcggatcacctgacatcaggagttcgacagaagccggggaaaggggg

SEQ ID NO: 533398 - DNA, 112 bp, Homo sapiens
agacgatgtcgaggtgatgttcgaccccgtggccaccgaccaccgttggcagcgacagggatacctcaccgtggaatcccagcaccccgtcggctagcgtgcataccggatg

SEQ ID NO: 533399 - DNA, 650 bp, Homo sapiens
  misc_feature (279)..(279): n is a, c, g, or t
  misc_feature (411)..(411): n is a, c, g, or t
  misc_feature (443)..(443): n is a, c, g, or t
  misc_feature (498)..(499): n is a, c, g, or t
  misc_feature (510)..(510): n is a, c, g, or t
  misc_feature (522)..(523): n is a, c, g, or t
  misc_feature (586)..(586): n is a, c, g, or t
  misc_feature (606)..(606): n is a, c, g, or t
  misc_feature (613)..(613): n is a, c, g, or t
  misc_feature (630)..(630): n is a, c, g, or t
gagatattgaagggatatatgcacttcccttgataggccccttgcaattgagtaggggcaaatattaatacattctgagtgctcactgtgtgcctggctgagagccaaatgcattccttgcatcttcttatcatctcatagcaaccctatattgaagatgatgttcttattcctgtcttttaatgaggttactggatgataaatatattaattgaccacttagcagatggaaactattgaaagcctaacccaaactgccagggttaaaatcctggctgnttctcttatgagttgggtaaccttaggcaagatgcccttcttctctttggtgcttctattttctcctctgtaaaatggagacattgctatgaaggtgaaataagttaatagatagaaaatgctcagaactgnattttacagtatcccagcagtccagttcattnttttaatttattttattatttatttatttatttattttgagagtgtctcgctctnncacccatgctngagtacagtggnncaatcttcgcttactgtaacctcttgcttccgggttcaagcgattctcgcgtttaactacttnggaggctgaggcaggagaantgcttgnacccagaagtggaggtncaatgagcttagattgtgcc

SEQ ID NO: 533400 - DNA, 595 bp, Homo sapiens
  misc_feature (279)..(279): n is a, c, g, or t
  misc_feature (411)..(411): n is a, c, g, or t
  misc_feature (443)..(443): n is a, c, g, or t
  misc_feature (498)..(499): n is a, c, g, or t
  misc_feature (510)..(510): n is a, c, g, or t
  misc_feature (531)..(531): n is a, c, g, or t
  misc_feature (551)..(551): n is a, c, g, or t
  misc_feature (558)..(558): n is a, c, g, or t
  misc_feature (575)..(575): n is a, c, g, or t
gagatattgaagggatatatgcacttcccttgataggccccttgcaattgagtaggggcaaatattaatacattctgagtgctcactgtgtgcctggctgagagccaaatgcattccttgcatcttcttatcatctcatagcaaccctatattgaagatgatgttcttattcctgtcttttaatgaggttactggatgataaatatattaattgaccacttagcagatggaaactattgaaagcctaacccaaactgccagggttaaaatcctggctgnttctcttatgagttgggtaaccttaggcaagatgcccttcttctctttggtgcttctattttctcctctgtaaaatggagacattgctatgaaggtgaaataagttaatagatagaaaatgctcagaactgnattttacagtatcccagcagtccagttcattnttttaatttattttattatttatttatttatttattttgagagtgtctcgctctnncacccatgctngagctcgcgtttaactacttnggaggctgaggcaggagaantgcttgnacccagaagtggaggtncaatgagcttagattgtgcc

SEQ ID NO: 533401 - DNA, 186 bp, Homo sapiens
  misc_feature (1)..(1): n is a, c, g, or t
ntctgtgggccacacttttaatagcatggactacaacacaagagggatcacccggcttactgggtcatgagagggctgctttagagtatctgcctctccagcacattcccaggcaaaggtttcgatgcactgcataaggtggcagctagctacaagactgcgttaatatattttctgagagcaccg

SEQ ID NO: 533402 - DNA, 192 bp, Homo sapiens
cccatgggttatacaatcttcccatgcacaatcatgattaataagatcttagcagaatcttgaaaaggcccagagatccaaagagcccttcgagcaccacgcaagaatgatccatcgcagagtcctaaatgaagaacccactgcaaaaacttgatgaatcttgtttgggagcttgtgggatcctcatagagt

SEQ ID NO: 533403 - DNA, 426 bp, Homo sapiens
  misc_feature (4)..(4): n is a, c, g, or t
  misc_feature (35)..(35): n is a, c, g, or t
  misc_feature (49)..(49): n is a, c, g, or t
  misc_feature (99)..(99): n is a, c, g, or t
  misc_feature (109)..(109): n is a, c, g, or t
  misc_feature (112)..(112): n is a, c, g, or t
  misc_feature (174)..(174): n is a, c, g, or t
  misc_feature (224)..(224): n is a, c, g, or t
  misc_feature (236)..(237): n is a, c, g, or t
  misc_feature (347)..(347): n is a, c, g, or t
  misc_feature (412)..(412): n is a, c, g, or t
ccantggctccctgggcggagcgagcactccggcntgaacccgctgcancggtgtggctcacgctgaccgccgccttcctgctgaccctactgctgcantcctgcagcncgnctgctcccgggctgcgcgatcttcaggacctgatccgctatgggaaaaccaagtgtggggancgtcgcgccccgccgcctgccgagcctttgatgtcccaagagatattttnccacttttatannatctcagtgctgtggaatggcttcctgcctttggtgccttactcaatctctgttcctgggaacaccttttccaagctggcttcatggtttgctcagaattctcggggcgnacagttcagggaaggggagctggcactgtctgcattcttagtgctagtatttctgtggctgacanttacgaagactctt

SEQ ID NO: 533404 - DNA, 1510 bp, Homo sapiens
tatgattcctggcacttagcatagcacgtgcgtcggtgtgtgtatatggcgcgcgacttgcgctgcgtaaattagtgtgtagccctgcatctgaaaggattgctagagtctcgtgattgattacgatgctgggactactccgagtagtgctcggcctgagatttccacaggcctggtagatcattcatgtgccctacagcgatcaggacatgacgacttacgtactaggacattgtgaagacatcattgggaggcttagcatgagaagttccatctgtaggctagacttcaatcaagagagaactctgtgtagcatagagccagaggcctaagctggggtggataggccgcgtagctccttgaatagaagagtctccggtacaacgctctatgccggtcaaaagtggcacatagctagagcgcgaaatgggacgtactactacgtatgccctacagcgtcatacatcttacgtccggactagggggaacgaaacagcgtttcgtgtacacccgtgcctataaccgtgaggaatggttcctctttaaaaatgggccccaaaggtcaattgagtaggggcatagtcgcattgcgacaacgcgaatcatggacttggaccacttgtcacaagggagcgcttactttaccgttgtgacccattaccagaaatccaatggtacgaatttcgccccggcacttattcccccagttggtaagcccttactcaccttgagattggccatagccggaggtcctaatttacggaggcattttctcgtgtcgtgggggagcacaccctgggggagccaggaaaagaaactgagggcgctcaaaaatatccctacgacaagtggtatgtgcgagtggcggccccaggtaggcaaagttcagggcactatctcccatattggcttgtggcagagtacatcgtccatttggattcacaaagggacaggcggcaagcattctcgttgaggcatttgcacgttaaggcctgaacaagcccagggcatagttacattttcataacatttacgagttgggccgacaataggcctcgatgggccctcctgagcacactttcgtgggccgggacacgggacctaataagggccatatcaagtgctggcacgtcgcgaaatgcacgtacctgtcccactgggttcatgtccacatgatactcgttaccccaaaatggttcaattagagaatcgaagtgtcaacccacggattcccacgcatagaaacaggggttgcgcaccaacaggcaccaagaattgtttcaagcaggaggtttattccctacaattctggttcccatatggcactaatccagttaaattaaatccgtaactggacctttgcgacacacccgctgggctacacttgggccccctaggccactagcgttgacactcccataggtgtaacgccggcatacttcttgcatggagacccctggtcgaccaaggaacagaacctgtcaattcccccgcggtatactcggaacct

SEQ ID NO: 533405 - DNA, 205 bp, Homo sapiens
aaatttttttaatcttccccctaaaacttttttattttgttttattttgaaagaggagccttggtgccccccccagtcctaattttttttgcctgcccccccttggggaatgcccccccccccccggtcctgccctgggcaataaggattgtcccccccgaagttttgttggaggtaaaaaaagtaaaagccgcttctgtcttta

SEQ ID NO: 533406 - DNA, 379 bp, Homo sapiens
  misc_feature (126)..(126): n is a, c, g, or t
  misc_feature (143)..(143): n is a, c, g, or t
aaaatgtgagcttgttttcctgcccggcatgtgtccccataaaggctttgtccctcccttgggcctgaaagttccttctcagcctaaaagggggcccttcggactcaggcattactcagcccgggntaatgcctttcaagtgntaaatcaggatttggggccggcttttttgggtccttccccttttcccaggtactcccttacaaaactgtggccaggaagtggccggtataaaggatgcccaaggtctttgtacgggtataggagttagcgggtttgatattgttaaaataaaaaaaattattttttaaaggcccgcttttgtatgtatgttgaacaggatccaggtttttaaagcttgatataaaacagaattcca

SEQ ID NO: 533407 - DNA, 1015 bp, Homo sapiens
ggcgagaatgaatactattgcctcagcaatcagactgtcggacattccagaaatatgtcgaacattatctctgaagggacggcacagttatcgtgaacgggccccagaggaaccctgcgtgcagcggacttcaatcacatcaatgtagaactcacccttcttggaaggataaaaaagaggctccgggttgagcaaatggtggggtaatcagaaaggaatcgtgtgctaccgtatcgggacgtatgtgggtatgtcagtgctaacaagtaaatcatgatcatagggggtgttataatagggcattccgattagcaacgatgacgagtcctggtgttatgctcactatccccagtcgaacacggtttgtgttatccgaaggcagaatgtggtcattcgtatcttgcaacagatccggaaaatttcttcttgaggctgaaaaaataacactccggcagggcttcggaataagactcagcgtgttgctagtacaggtatctcaacgcccagaaaagatgaattaagtcctggaaggaagtgacattagtagcttggttgcaatattcagaggggtgtgattcaggaaggcactaacagttaaaagagcaaggatatcaggaaagttgttggatggtatctatgtctctggaaaaaggaactgttcagcaggctgatgaataagatctaagagttagctggctacggaaagaagatgccatgatgagacttaagactacttgtgatattgagttgatggcatagacagaactatgtttggcaccatcagtggacaacaaacagctggggacgcacccgcgggtcggtgacaaaaggctttcatcggcccggcatggtgtgcccaaccattagttgcgaaagagaaaagcggccttagggacaatagcgcagaacgatacctagaaggaaaggtcccacgggataagcattacaggacacatccaacagtgcagaaccgaccacccaacccgagccaaagaaatacttctctaccccgagt

SEQ ID NO: 533408 - DNA, 1013 bp, Homo sapiens
ggttatgaccctgtaatagactccatgactgggtaacacttcatctagtgattcattcatagcttgtaggaactcgagtcgaccacgctagatgcgtgagactcatcgagaatgcgtgcgtagaaggtgtcgcgtgtctcattgtgacgcatttgcagatcgatgaggttcttggaactgcgtgaaagcatcctttacaggtttctcgaaaccacatgagcgctaatagagcagaaaacgatatccgtagttgcccctgacacattcattcccctcagacattctaactaccacacggcttaggcgcaactaggtaatacgatgatgctaacaggaaaaagtactggtagggagcacctagggggggaacccgatccaagacgagagaagagcatggtccatatgtctctctttctcgaccacatagagaagattggagttggaagaagcatctttggcctatcaagccatacaaaacctcatgtccacttcgtcgtaccaggaattgatgcgctcgtcatcgcattggaaattcagaaattacataacgtttccccctaatacaaagtccttcataacgacgtgtagggaccatgttatacggacccatgcgctaggataggacgcgagtcgagtattcgcatgcataccatacactcgtttgtggaacgcttgtggaagtacgtccgtacatatcactaggaatccactcctggatggaagcgcacgcaagatggaagctgtgcgagctaagccttgctttgctacgccttgctgcgacccccacatttcacccttgttggaaaaggaattgcccccctactacacaaccgcaattgtgggaaattcccaaattccttggtttagccaacggtcttccctattcaaaaggcaatttccttggtacggaacccgctgggcaattgttttggagaatttggcccaacgcattgaatattggcttggtgcacgattaggaagtagttttaaaaattttcttataaggtgccttc

SEQ ID NO: 533409 - DNA, 232 bp, Homo sapiens
gtgaaactatgaactatggacctgagcagggcctcaatcacatagctccatatgtaactagcagcttgtgtgaggatggacatgataactatggccaatgtagaaccctggccacagtgccctggggctttccaaaggcacctcgcatgcctgtttggagcctgtcagacccagcaaaggacaacatctatgtagatagcggatgactgtgtaaggggtggagccgcacccg

SEQ ID NO: 533410 - DNA, 254 bp, Homo sapiens
cgtacgtgtaccggtggtggtgactactgtgtgtgacgaccgtgacgtggtgaaggtggtggtgactacttgtggtgacgaccagtgacgtggtgacacggtggtggtgactactggtggtgaccgacagtgacgtggtgaccggtgactggtgactgtgtggtgactgaccacgtgacgttgggtgacggagtcactggctgactgagtgactgactgacttgacgtgtgggactgacatggttgggtgactg

SEQ ID NO: 533411 - DNA, 1210 bp, Homo sapiens
gtggtagctgtgaggaatgattcgggccgtcaccctgcctcccctgcgtaccgcaccggccgcttctgtcctcggacccattccaatcaatctcgtaaaacatggtggattactatgacagttctaggcgtgcagagacatgcctcacccgaggcatattacatacaggcatcatcggacaacttggcactgcaatgttggcatcccacgatagagaatatcctgtagaatagaagaatgaagcagacgaggaaacattccctgcacgttatgcggtaggtcgactattgaagtgctgctcgtgatgctaatgaaacgggactttctatgcaccagaatctggcaaagaaggcattaagatggtggaaggaggacgttggtcatgtccgtacttgactagtccatttgagaatttgtgccttcgacgattccccgtcaatccccatgactgcattgtctgtccacgaggaattgctcttgggtgggcatatgaggcacgccccattgcttcatgtgttggacgtatccgtttgtggataagaccgccctgttgtcgagggacttgtcttttgagcgaactcagcagaggggggtacccccgaggcggagacgctaggaaaagaccgaacgtgggacccggggtcccggtttattggctcatgcagtccccaagttagcgatttgttcctggatcttctctagcgcacatgtcgcgcttcgcgtctttcctttctcttggattaccagcgatttttacctttccaattttgcggtccatcctagtgaggtccaccagcgattgtgccccctccagcgtttccaatttcacttcctttgcccacgcgttgcgaatagtccggggtagagcctcaagtacgtggcacactccgggcctaaacggtttccaaaaatttccggaattaattcgaaaggctttaccagagcgttaacagcaaacttgggggcttcaaattgtggacagcggatagcacaacacatttccacatcatacgcttacaagcactgaagactttaggtctcccgaaggaacccggggattccacactgcacgaagcacgagttcggaacagatttggcatcaagaacagcacctcggccccaagcgcttaaacagagttcctcttataaacaatcgtaaacctgacgtagctggagcccggaaaccggaccggcagatgggacccgatca

SEQ ID NO: 533412 - DNA, 337 bp, Homo sapiens
tatgggtgccagaccaagactgtcaggatccggggagacatacagcgcttgaaggaaatggacaagagcccttccattacggcacccattactcttcggccatgatcgtgtcgtcgtacctgattcgactgccgccattcgttcagtcatatctcctgctgcaaggtgatagctttgaccatgccgatcgtttgttccagtctattcctgacgcctggaagtctgcgtcctctcgcaacaagacggatgttcgagagctgatccctgagtttttctgcgtgcccgaatttttgacgaacatgaacggctacgactttggccgcagacagagcaatgg

SEQ ID NO: 533413 - DNA, 445 bp, Homo sapiens
tcttccatgcagtgtctctccctagcatgtctgtgatgtcacgtagtcatccccagatagtctcatactgtactcggtcatgcctcgcagtttctacatatacgtgtaacatgtgctagtgctatgtcacgttgacacagcattactcgatgaatgtcagcccttgtcctccagaatagtatcataatggtatccgatgcctcctactgcttggccggaatatggagcatcgatagctgtggcatccatacgacacagtgaggtagcaatcatatgtacagacccgtcatatgcttccacccaaggtaccttgacctgctcaacattaccctagtgctcagcttcacatatcctcgtatcgttggcctattagtatactatgtctcttgtatgctcactgcttatcggtcatcggccctgggtgagtatgtgcgaattagcattc

SEQ ID NO: 533414 - DNA, 124 bp, Homo sapiens
gagcctggcccgtgttaggagtgactatgaagaagaacatgagctgctgtggacatggaaaccatcaacctggacaggagatgcagaggatgttgatttgaatcactatcgcatagggaagatt

SEQ ID NO: 533415 - DNA, 1348 bp, Homo sapiens
tactccagtcgcggtaatcctgaccctggatgataggtcgccactggagcagcagacagccttaccagtacctaccatgatcacacccagggacctgcatagggtagaggggacaccctgaggacctctctcccgcccagcatcctaccctgagtaccccacacagggacctacactactgcaccccaccagaggtacccgctacacaccagagcagccttacataagtaggtactaccctgcgccacctatgaggcagagctagggtacatagcagacaccccatacctaaacccgagtgaccctactacctatgacacaggctatactacccacagagaccaggagccggacccatcgccgataagaccaagaagccacgggatgtagccccggagaccagagcgcgtaccacgcgcgacacacgcgataccctcagtgacggacacgtacccaatatgccacgctatatatacgccttacgctagatagactactagctaacccaccgaagggagctacatagggacacttcgaagggttaactaggggaccataacaaaacggagaaagccttagagaacaggcttacgcgagaactataccggacgcaagaacacgcgttaaccacagaagaagactaaagcaaggcgggcggcggaatacccgtaactatacgacgcattagagcaagaggggcgtaggtaggcaacgtatggcggtataacccttatactagcgacacccacgagatacccctcagttggaacgggaaacagccacatacgagagcatgagccacaaagcggagacatcaattccgagccaagacaatggacaagaccgggaatactgcatgggctatggcggcgagccccagtgggacagtcccgacggagaaggacctattgaaaacgacgccccacggagtagggaaccccagacactcccaacgacaggcagttgggaactacccaatataaaaccaatagacacaatggcataatagacagagacaatataggaccactaacaccgccgcgtgcccttaggaacgcactaagcaaatcgccatacggcatggcaaacacagtaattccccccgcgcagaaacgtgtcacaccaccgtaggtgcgcgatagcgacaggaggaaacacatggcgcagtatgagcaatacctgcgcgcgcccgtccctagagagtcccgttgccataggaccacgcacgtatcaatacgatgccatacaagcaaacacaacccacctggcggacacagaccatcgcgccataccactagctatctcccaccgatgccacaagcatggcggccccccaggtgtacgtcac

SEQ ID NO: 533416 - DNA, 556 bp, Homo sapiens
tgcagcgatacagttctggtgccggtacttccaggtatggactttcggagcaaaaatggtggacagagtgtgccgtgctggaggtctttatatctcttccctctcatatcctctcacgccgcagaacatccagcactgtgttgttgcccatgaaatgaccatctccagaggcgatagaaaagcctttgtcagggaactcctccacaagggccttcacccgcttccctattactctcattccgcttgtagatcagctcccggcgtaggtagctgtcaatctcctgagcagtgatgcgctcctgaggtggtagcgtggcattactaacattggtaacctgggatctgtcaaggcttttgctgttgttaacatggcggtcccccgcagttatacgtgtttgatgagatcctccgtcgtgtaggggatctgaagactgcctgctcgcaggctttcctgctgcaggagggtctggttcaaagcaaagatgacctgtgaaaagttcaacccattcaatggatggcactgctcttccaccttttccactggcttccaaccatg

SEQ ID NO: 533417 - DNA, 199 bp, Homo sapiens
acccctccgggcaccaaccctatggaaccagcgcccatgcacatgacgacatcgccatcgcgtgcgttgtcggcaatggtctgtggcagatccgccacgttgtctacaaaaagcggctccacgcggcccgccacgcgcagcgcgcgggcgagagaacggccatcggcggccaccaccggagcctaaccggcggcgtaca

SEQ ID NO: 533418 - DNA, 348 bp, Homo sapiens
  misc_feature (57)..(57): n is a, c, g, or t
tgtcgcccgggctggagtgcagtggcaggatcagggctccctgcagccccgacctcncaggctccagcgatcctcccgcctcagcctcctgagtagttgggagtagagatgcctcccacatcgcctggctaatttttgtatttttgtggagaggggatctcgccacgttgcccaggcttgaagccagatcaagcaattgggttccttggatttccgaaatagaccccaatattctgcctttaccccggaggttgcagtgagccaagattgggcccctccattccagcctgagagacacagcaacactcttgtcttgataaataaataaataaataaataactgtcaaa

SEQ ID NO: 533419 - DNA, 656 bp, Homo sapiens
  misc_feature (92)..(92): n is a, c, g, or t
  misc_feature (124)..(125): n is a, c, g, or t
  misc_feature (271)..(271): n is a, c, g, or t
  misc_feature (289)..(289): n is a, c, g, or t
  misc_feature (409)..(409): n is a, c, g, or t
gctgggtttacgtggcaaagagtgggcaaaacagtgcgattaccctgatgtaatcactgccatggccagcgtcgccgtgcaattgtccgatnagcctatcgtcagtgttggcctgttctgacannatcggcggcatgactttgcttcctgatttcgaccaattaaaccctgaacaactgcgcgctatcgccgcgcagctgatgcagcgtgtcgagactctcgatcaaaaagtcgagtccatggacaagcagatccatcactacaaaacggncaacgacaagctgacccncgagatcgcacagctcaagcgtttcaagtttgccaagcgcagcgagcagctaaatccgtatcaaaccagcctgctcgatgacgtgatcgatgccgatatcgcggccatcgaagccgagcntgagacgttgcaacccgctccagccccgaccgtggctcggcaaaaacctaaacgcaccgccttgccgcccgagtttccacgcacgcacatccatcacgaaccggacaacactcactgccaatgcggctgcgccctcaagcggtatcggcgaggatgtcagcgagaaactcgactacacgcccggcgtgtacacggttgaacaacacatacgtggcaagtgggtctgtgaggactgcgagaacctgat

SEQ ID NO: 533420 - DNA, 161 bp, Homo sapiens
tttcgtcgtcgtccgtggtgcgaaaaatgggcgaacatcgttaaagggagaaaacgtcaactttgcaacccaaggtttgcggggaaggaaaggaggggcgagcaaggttgcccaaaaacagagtaaaggagtcaacctggtaggtgggggtggtttgggac

SEQ ID NO: 533421 - DNA, 184 bp, Homo sapiens
gcatcctggaactgggatctctcctggcaaagactggacaagctgcagagcttggaggactcctgcagctatgtacgcaccccttcttgcaattccatcagccaaggcctaaagccagcctcgccctggctcccatctctttcttgcatctgcttttcttgcatatggcaggccagcctacagg

SEQ ID NO: 533422 - DNA, 378 bp, Homo sapiens
  misc_feature (6)..(6): n is a, c, g, or t
  misc_feature (12)..(12): n is a, c, g, or t
  misc_feature (70)..(71): n is a, c, g, or t
  misc_feature (100)..(100): n is a, c, g, or t
  misc_feature (103)..(103): n is a, c, g, or t
gcagtntggcgngccaaaccacctatgttggcttgtttagcctcaaccctcgccctttgttgagatcccnnaattcctatgattttataactcagttccnggnggactataagtctatttgtactccaaaccaaacgcagtgcagttcgctactactgaggctgatctgtacgacttcagaccagtccgagacgttattatctaaaaatattacttgatactagatgatccttcagagattttacctataacctatttcttgatgaggttatttaatgcactggagataactgtgacttactgatcaaatacttgaatacttatacttacctgggatttcatttctgctgaaagaaataggaagaacaggactcactt

SEQ ID NO: 533423 - DNA, 1880 bp, Homo sapiens
ctgtgagagcacaacgatgtagcaaactctcgtacaacacacgcactcagtagcccgcaaactgcaacagtatactccacgtcgaaccattgtcacaagacgtattcatactacaatcctaaacccacagcgcatcaacaacacaccttgtagtgcacacccacccataacaacatgcgccatcacacagcaaaactcacacttactactggacaatccacaccaggctaatgcacagaccactagtcactccaggctgaccaggaacaacaaccatctcatgcgccaaaactgccacttaaccgcaaactcaagaacaccaccaccacacacgacctcctcacaaactgtaaacaagaaacattactacattcaccatggagacattaacaatcaaacaccacagtctgacccctcaatgacacacaccaacacaaacaacgcacactttgttgaaccccactaaacattccactcccaacatacattagaccatagaacacgcagcaaccataagaaattaaacacaaccacaatttcaagtggacacataacacacacacacactacatagcagacaaacgccacaatacccacacgaactacaaacaataacaatatcaacgatctataccaacctatgtcagcatactcaccatatacattagctcccacaccacatcacccacccagattagtctaccacaccaactacatcgaagaaacacattccattgccacaacataccctgaccactacacaacactctcaataccaacactgtacgccacatacacgtgaacacactacaacaatatctacaatacgaacacacaccaatggcaaccaaacacaacattccattcaatacaccaactaaccttacccgcggcacaagagaaaaccggcgcaaacaactctcgggcaccagttccaattcctacgacaccactctcacgaacaacatagtgcatgaacacaacaacaatataaacaacaacgacctgatccacacacttataacatattccaacaagctcatcagggatacgatacaacaataaacacacgcatggatatcaataacgaaccaatgtacaaggataaataaccagaacacgtacatcatatacaaaaacaccatcgaatatcacttctactaaactacacatcacaagttgacaacaaactatagcacaccccatcctagcagccccacctaactgcacgctacatacttccgcgcaccctgacaccacacgacaccgaacactactctaaacgggacgcaacacctactctgacaaccgatctccaccactgcaaacacatctgactccaacaaacagtaacagaagcacagtactctctcaaaaccttatcacttgatcacaactgatctgcacacccaagcatatgtgcccaactaaggcaacttaaacacacaccctttatcaaacggacctaatcacatcacctcaccacacacactgcacacccgcgacacacgagccaccgacgaacaacgcatatataccaaaaactatacaaatatcaaactaatcatcccaataccttaaacacaatatcacaaccacacaaaccacacacacaatacaatacgatatctacaataccaactcatacacaaacaaacaccaacacatacctagcaactcaatcaacacacaacattaacaacacactaaactaaaaaaaaacacaatataacactaaacaatctatatcacaccacacactatatacaatcaccatataccacataaaaacaatctcacaaataataacctctcataatatcatacaaaactcacacccaaacaactaaccacacaccaatcacacttactcactacac

SEQ ID NO: 533424 - DNA, 644 bp, Homo sapiens
atcatgctcccatcagaacacaacaatacaaaaaaaaaacaaaaaaacaaaaaatctggcaactaataaattggtggtaactcttaaagcagccttatatagaaaaggtggtggatcctattaattttttttctttctttctatgtaagcaagaacttcactttggacttggcagcacggaccccatttctcgggagtctgtgtgcccggatgggctattcccagattttggtttggaataaactcttttttaatttttaccattagttcccacaagcagaaggaataaacattttaacactgaattctggaacctttcaattatttcaggtggacatctcctgggccaaactaatcaggctcttcggagtcctcttctcactaggcctcaactatggagctccggggtacgtctcggcatggctcaatctcagcaagaatccttctcagtcaatttagccagagttccccatcttcaatagctgaccactcataatatctaatagggctcctcatccttcaccatctgctaggtgatgtcggatcaccctgcattcagcaagaatgctatatgtgggcttagccatgtgggaagcccaaaatatgccaccccaaaatacactcctgtggtataataagagatg

SEQ ID NO: 533425 - DNA, 380 bp, Homo sapiens
atgtctaagcctgattgatttggcctttaacctgaggtatggcagatttatttgctgtgatgatcccttctcccccgaagacttctaacacaagggagctgtcctgaggctctggatgacttttattcttcaaatggcttaccctcccagtagctccagtgacccttccattttccatatccaggaaaatgtgatgcgccacaggtatcaagcgtctggatcgccacttcacgttttattcacaagtgactcagtggaagatccagagtcaacagaggctcgtcaggaagatgtccaccgacaaacgtagaccacaaggaggaagctggggaccaagaggtgtgcggagaccagatccaaggaccggccacagaggagga

SEQ ID NO: 533426 - DNA, 112 bp, Homo sapiens
tactccgtacactgtcagctaacataataatgtaatttagatatgaaacacaatctatccttggcactcccttcaggctttaatccaattattcttgttcattctaaccgta

SEQ ID NO: 533427 - DNA, 218 bp, Homo sapiens
agcccccacacccagccttagagcccgtgccttttttgctaatctctaactcctgtcttttgagaaaggtttagagtaatttatcttaaaattcatttataggctggcgcagtggctcacacctgtaatctcaacactttgagaggctgaggtggaaggatcacttcagctcaggagtttaagaccggcctgagcaacccagtgagaccctgtcttta

SEQ ID NO: 533428 - DNA, 208 bp, Homo sapiens
  misc_feature (3)..(3): n is a, c, g, or t
  misc_feature (11)..(11): n is a, c, g, or t
atnttcggcangagggggattgtaggcatgagcaccatgcctggcctaatttttctgtttttagtagagacaggacttcaccatgttggccaggctggtctcaaattcctgacctcaagtgatgtgcccacctcggctgcccaaagtgctgggattacaggcatgagcttctgtgcccggcctgaactgttaagtgtttgtgaagaat

SEQ ID NO: 533429 - DNA, 347 bp, Homo sapiens
  misc_feature (311)..(311): n is a, c, g, or t
ttaaatgaagcttagtccatctcaggtagacactggtagttactgacaaggtaatgagactcttaggcactgggacagagagggtggggggaccacagacacaataaatgtagggagcttttcctttagggattaaagcaagccaaacagtcaggtggaccccagcatccattcccgagagcaagtgctcatccttggcaataaacgaagactgagtccagggccagaggcgaggggtcctatggctcccatctgggaagcagcccctcagaaatggcagtaattcacagtctggactgaactccccaggncttggaggtaaatggtgaacccaccaaggtaggttt

SEQ ID NO: 533430 - DNA, 264 bp, Homo sapiens
gttgagaatgcgcgtggtcttggattatccaggggggcacactgtactcctgttggtctttccaatcagagactcgaccatcccagcactttggaaggccgaggcaggcagatcacctgaggtcaggagtacgagaccagcctggccaacatggtgaaaccccatctctattaaatatacacaaattagccaggcgtggtggctcacacctgtaatcccagcactttgggaggcagaggcaggagatccactagagcttaggag

SEQ ID NO: 533431 - DNA, 232 bp, Homo sapiens
aatgaatgtaaggtacccctctttttaaggtcgcatttgttacttaccttcgtcatgaattgagcgacccgatggtccgaaaggtatgcctggtgtgcgtctcggagtcacgtgtgtgaagacacatgtcattgtgttgtagttttcgttgtgtcgacatatgtctttgcatccagtaagaaaagtcgggattacctctacattaattgtcatagctcgtgagacgaccttt

SEQ ID NO: 533432 - DNA, 263 bp, Homo sapiens
agagtgctaacgtagccctgctccctcagtgcatacaggaggccgctgccccttctgctactgatcgtggcatctgtctgcgcccagagtcctatctggggtctcctcagcacaggccctctatcaggagctctccaaataggagcctcccatctccaggtgtactctgtgggtctgaccatcccaaaacttaggatcctcctggagagaagatggtagcagcaaaagtaaagggtgagaaaaaggatacgacgctgaaaaaa

SEQ ID NO: 533433 - DNA, 378 bp, Homo sapiens
  misc_feature (45)..(45): n is a, c, g, or t
  misc_feature (104)..(104): n is a, c, g, or t
  misc_feature (114)..(114): n is a, c, g, or t
  misc_feature (130)..(130): n is a, c, g, or t
  misc_feature (138)..(138): n is a, c, g, or t
  misc_feature (300)..(300): n is a, c, g, or t
acgcatacttactcttcctgagaagagattacaaagaagtgtcanggtacttaaacccaaaatgtctccaaaactccaaagcaatcccgggccatctcattganctccaggtancaggataaacgtcttntttctgtngcatagcctcacgtgatgtttctccccctcttctcccaaatactaaatactgcatcactgtaagagtaacagcagtaaataagccagaggttgcgaggcaagctctgtgctgcactgggccctgagggaccaggctgcctgccctactgataagtcttcacntactgaacaagcaacttggagttgctgctgctgctgctgtggtggtggtgtctgttcctggggagttcgcgtgcgatg

SEQ ID NO: 533434 - DNA, 158 bp, Homo sapiens
tagatggcaccactgcactccagcctgggcagcagagtgagatgctatctcaaaaaaattaaataaataatatataagaggaacaaaaaaagacttcagaggaagataaaaacatgatctgtatattacagtgcttatctatcgttacatattagggt

SEQ ID NO: 533435 - DNA, 1588 bp, Homo sapiens
  misc_feature (43)..(43): n is a, c, g, or t
  misc_feature (83)..(83): n is a, c, g, or t
  misc_feature (87)..(87): n is a, c, g, or t
  misc_feature (550)..(550): n is a, c, g, or t
  misc_feature (975)..(975): n is a, c, g, or t
  misc_feature (1010)..(1010): n is a, c, g, or t
aaataggctaggtcggaggcttgttctgaatcggccgaggatnaagttgaagagtggcagcacagggccaaagaagcccaggntgancctggtgaagaccaaggaggagctgcacctggtgatgacagcacccccgcccccaccaccccccgtgtacgagccggtgagctaccatgtccaggagagcttgcaggatgagggcgcagagcccacgggctacagcgcggagctgtctagtgagggcatccgggatgaccgcaatgaggagaagcgcatcactgaggcagagaagaacgagcgtgtgcagcggcagctgctgacgctgagcagcgagctgtcccatggcccgagatgagaaataagaggacccacaatgacatcatccacaacgagaacatgaggcaaggccgggacaagtacaagacgctgcggcagatccggcagggcaacaccaaggcagcgcattcgacgagttcgaggccctgttaacagccaggccaggaccaagggcagaggggtgctcatagcgggcgctgccagcccccgccancgcttgtgtctttaggtgctccaaagtctaggaagctccctcagatcccagttcctttaggaaagcagttacccaaacaggaaacattctgggctgggaaccaggaggcgccctggtttgttttccccagttgtaatagtgccaagcaggcctgattctcgcgattattctcgaatcacctcctgtgttgtgctgggagcaggactgattgaattacggaaaatgcctgtaaagtctgagtaagaaacttcatgctggcctgtgtgatacaagagtcaagcatcattaaaggaaacgtggcaggacttccatctgtgccatacttgttctgtattcgaaatgagctcaaattgattttttaatttctatgaaggatccatctttgtatatttacatgcttagaggggtgaaaattattttggaanttgagtctgaagcactctcgcacacacagtgattncctcctcccgtcactccacgcagctggcagagagcacagtgatcaccagcgtgagtggtggaggaggacacttggattttttttttggtttatttttggcttaacagttttagaatcctttgtacttatacacgcttattaagtgatcagctatatactagtttatatacaagctgataactacagatttgtaagcatttagtttctaaaaggggaaagtttggtccctgtatatttggttacccttttacagaataaaagaattccttttgaaaaaccctttaaaccattggcacttgatgtgatgtggcaggagggcagtggtgcgagctggacctgcctgctgcagtcacgtgtaaacgggatcattatacagggtctatggctttgtaatggcctatgccccttttaatttgcgtcagatccccacatgccattttgagctttcaagaccccggtgtgagagaactctgttggcttgtgttcgtggttggcgggctctctcctgcatgggcttgcaggttgctggaaggcagctttggaggcgtgggtccgccattcttcctttcgggcacggt

SEQ ID NO: 533436 - DNA, 269 bp, Homo sapiens
tagaccagtattcaacatgaatatacatttcgacaaaatcacatcataatattaccaacactgaatcagcaatatataaacaacctaatagggtttatcctgagaacataaggctcatttaactcttgaaaatcaatcaactgtaattagctatagtaacagactaaagaaaagccatatgattaatatactgtttgaacacccacattacaccggatataacattaattacccatacaaactcacagaagactatccacagaaagaac

SEQ ID NO: 533437 - DNA, 1700 bp, Homo sapiens
  misc_feature (58)..(58): n is a, c, g, or t
  misc_feature (91)..(91): n is a, c, g, or t
  misc_feature (138)..(138): n is a, c, g, or t
  misc_feature (195)..(195): n is a, c, g, or t
  misc_feature (199)..(199): n is a, c, g, or t
  misc_feature (662)..(662): n is a, c, g, or t
  misc_feature (1087)..(1087): n is a, c, g, or t
  misc_feature (1122)..(1122): n is a, c, g, or t
aggctgaccgtatggctgcactgcgggctggggaggagctggagagacaggcggtggntcagataaagagccaggagcagctggctgcggngcttgcagaatacactgccaagattgcccttctgtttgaggcgcggnggcgcttggtggtgtgggggggggagagtggcagcacagggccaaagaagcccaggntgancctggtgaagaccaaggaggagctgcacctggtgatgacagcacccccgcccccaccaccccccgtgtacgagccggtgagctaccatgtccaggagagcttgcaggatgagggcgcagagcccacgggctacagcgcggagctgtctagtgagggcatccgggatgaccgcaatgaggagaagcgcatcactgaggcagagaagaacgagcgtgtgcagcggcagctgctgacgctgagcagcgagctgtcccatggcccgagatgagaaataagaggacccacaatgacatcatccacaacgagaacatgaggcaaggccgggacaagtacaagacgctgcggcagatccggcagggcaacaccaaggcagcgcattcgacgagttcgaggccctgttaacagccaggccaggaccaagggcagaggggtgctcatagcgggcgctgccagcccccgccancgcttgtgtctttaggtgctccaaagtctaggaagctccctcagatcccagttcctttaggaaagcagttacccaaacaggaaacattctgggctgggaaccaggaggcgccctggtttgttttccccagttgtaatagtgccaagcaggcctgattctcgcgattattctcgaatcacctcctgtgttgtgctgggagcaggactgattgaattacggaaaatgcctgtaaagtctgagtaagaaacttcatgctggcctgtgtgatacaagagtcaagcatcattaaaggaaacgtggcaggacttccatctgtgccatacttgttctgtattcgaaatgagctcaaattgattttttaatttctatgaaggatccatctttgtatatttacatgcttagaggggtgaaaattattttggaanttgagtctgaagcactctcgcacacacagtgattncctcctcccgtcactccacgcagctggcagagagcacagtgatcaccagcgtgagtggtggaggaggacacttggattttttttttggtttatttttggcttaacagttttagaatcctttgtacttatacacgcttattaagtgatcagctatatactagtttatatacaagctgataactacagatttgtaagcatttagtttctaaaaggggaaagtttggtccctgtatatttggttacccttttacagaataaaagaattccttttgaaaaaccctttaaaccattggcacttgatgtgatgtggcaggagggcagtggtgcgagctggacctgcctgctgcagtcacgtgtaaacgggatcattatacagggtctatggctttgtaatggcctatgccccttttaatttgcgtcagatccccacatgccattttgagctttcaagaccccggtgtgagagaactctgttggcttgtgttcgtggttggcgggctctctcctgcatgggcttgcaggttgctggaaggcagctttggaggcgtgggtccgccattcttcctttcgggcacggt

SEQ ID NO: 533438 - DNA, 181 bp, Homo sapiens
gccgggagtggattcctaagtaggagtgcgaggagtgtcatcagtgatgatcccaggagtggatacctaagtaggaggcgaggaggtcatcagtgagtgatcccatgtgaagtggctgcagttgacgttgtgcccgggaaacctccttaaggccctgcttttttgcgtgcgggtctaggga

SEQ ID NO: 533439 - DNA, 303 bp, Homo sapiens
cgcggtaggagcggtctggtaagagcggctgagatctgcttgtcctgcatttccctgaagttgggtggcaaagaagctactaccagctcaggcaatgtgtctcttgaacttgtactgctctccttgaactgcccagaccccaccttttttagctccttttagggctgcactcagagtacgtggaagttcctaggccgggggtcaaattggagccataaccgctgacctatgccagagccacagctgcaacctacaccacagctcacagcaacattggatccttaccccgctgagaccgctctt

SEQ ID NO: 533440 - DNA, 182 bp, Homo sapiens
cttctcaacgaagtaaataagaaaaatcctcagccaatattaaaacctactttaaagaaaatactgctggcattttaaagggaggatacaaccaaatccaggaccaagcctgtagatggaagacaaatggtaaactaaaaaacattagccaagaaaataaaatgtcaggcgttgagaagctt

SEQ ID NO: 533441 - DNA, 557 bp, Homo sapiens
cgatctagaggatcccagcggccggcctttttttactaactgatcatactactggaatctggctttagatgtaggtattagtaatattcaaattggtctctgttcttttagaaaatcaaggataaaggactggtgtggtggcttacgtctgtaatcccagcactttgggaggccaaggcaagtggatggcctgagcttaggagttggcgaccagcctgggcaacagggtcaaacccagtctctactaaaataaaaaaattagccaggcacggtggtgtgcgcctatagtcccagctacttgggactgaggctgaggcaggagaatcgcttgaacctgggatgcggaggttgcagtaagctgagatcacgccacggcactccagcctgggcgacagagcaagattccgtctcaaaaaataaaaaaaaaaaaaccaggtcacagaaatattcgaggagagaagacgggcgggttacagaacaattttataagcatgactatgtcctcataagatatgggggagtaaagcttgtggcatctaactctgcccagtgacaag

SEQ ID NO: 533442 - DNA, 208 bp, Homo sapiens
ctcgaggacacgatctctgcactaaacacagacactgcttactgacacacaggagagaggaaaccagaagagcagacaccactcaaggtgacagagaaggaacaatgacacggaacacacacacactgggctccgggtcctgtccacctgcctacaagcaacactaggaaacaccttccaagttgacgcctattctacaacataactt

SEQ ID NO: 533443 - DNA, 871 bp, Homo sapiens
gaccgccagcccggagagctgccgggagttccccgggagcgctgcgggagttccccgggagcctcaggtggtgactatcctgtgagaagcaaaagatacttgtgcaagttaaaaaatatgcctcccaagtttaagcgccacctcaatgatgatgatgtcacaggttctgtgaacaagtgaaaggagaaatcttttgaagatgattcagatgaagcaaagaggactttttttctaaggggaccatctggaccaagattgtgcgctagaattgataaacattacagcatgttcagaatcacgtggatgaagtcatgatgtcatgcacggaacattattacaaaggtaattgagagaggggagagactagattgaactacaggacaaatcagaaggcttatcggataatgcaaccagttttagcaacagatccaaaaaattcgaagggcaattgtggtggcgtggatgcaaataaaaggcatcatggtttggttgtgctatcctttgggtagtgattatcaattctatagtcatgaaatacggtactggatttgtgaccagaatcttcattaaacacgatttgggacagaataaaggattgctgaataatttaatgaaactagtggtatataacttcaaaaattttttcaagaaaataggggaagataacttaaatggaagtgcgatgccattacttttctttttaaaaagtctttaatatatgttagcaaggaatgcatattcaattcaggtcaatgtaagactgcgacattggttaacgggaatataaaactaaggaaggggaatgttggagcaggggtgacgtttgcacttttagaggtacgtgatggagcgaagtgcacagagatgggca

SEQ ID NO: 533444 - DNA, 181 bp, Homo sapiens
gcgagcctatcaccagaagatcgacagcaacctagatgagctgtccattgggcttgggtcgtcttaaggacatagccctggggatgcagacagaattgaggagcagatgacattctgaccgctgacaccaagtggcaagtagatgtcacataaaagcacagaagaaagtcgacactcttag

SEQ ID NO: 533445 - DNA, 512 bp, Homo sapiens
  misc_feature (11)..(12): n is a, c, g, or t
  misc_feature (15)..(15): n is a, c, g, or t
  misc_feature (37)..(37): n is a, c, g, or t
  misc_feature (50)..(50): n is a, c, g, or t
ggggaactcgnnggnggcctttgtttagaccagactncgctcgaactcgnccgccgcgttttactttacctccgcaaccactcctgacaaacccgatatggctgagatcgagaaattcgataagtcgaaactgaagaagacagagacgcaagagaaaaatccactgccttccaaagaaacgattgaacaggagaagcaagtaggcgaatcgtaatgaggcgtgcgccgccaatatgcactgtacattccacaagcattgccttcttatattacttcttttagctgtttaacctttgaagatgcaaaagagttggatcaaagttaaatgactgtgctgcccctttcacaataaagactactgaccaccaaagcccgcctgcctttcccatctgctatcatactgctgcaagaaaggaaagactgcatgttgttaagaaaaaatgggtcaaaaaaatggcgggccacaagtaaaactaaaagaaaaccaaactggccaaaggggcctcaacctt

SEQ ID NO: 533446 - DNA, 303 bp, Homo sapiens
gggaagaccgaatcaacaaaggatctgggccgggccattggcatcatggtctatgtatttaactgctccgaacagatggactatcagtcctgtggcaacatttacaagggtcttgcccagacgggcgcctgggcctgctttgatgagtttaataggattacggtggaggtactctccgttgtggctgttcaggtgaagtccgtccaggacgccatacgcgataaaaaggacacattcaactttatgggcgaaatcataagctgtgtgcccacggtgggcatatttattacaatgaatcccggc

SEQ ID NO: 533447 - DNA, 310 bp, Homo sapiens
gaattacatggtgactgtcatcatcacgccagtctcatatttgtaatttttatgtatggattgcttttcaccatcttggtccgaggtaggtcttgaactcctgatctcgtgatccagtcgcctcgttctccccaagtgcttggattactggcctggaggccattcgcgccgtggagcctatccttgcgcttctattatacttaatacacatatgtgcatgctttcatcacttgtttcatccttttattgtatcccactatgattggttgtaggttgtgccaatagtttatctattttggattctttgtga

SEQ ID NO: 533448 - DNA, 264 bp, Homo sapiens
cgcggtcatgtcttacgcccctggctcactgcgttaccgatccggtgttgccgtgcagctgtggtgtgggttgcagacgcggctcgtgatcccgagttgctgtggctctggcagtatgccggtggctacagtctcccattaaacctgaactctaacacgtaccaatgtcaacaactgctgctttcagatctgtctacctacccagtgccagccaggtgcccaaagtcaggtcctgactcaaggctccgtaggacataaccgcgg

SEQ ID NO: 533449 - DNA, 651 bp, Homo sapiens
tccgtcacgcttatcttctttgatcaccaccaccaagtctacctcacagaatcctccgagcttcacttctgtgattgccaccgcaggatcacctcacacagtactcccagcttcacttcttcgatcaccaccactgagaccacctcacacagtactcccagcttcacttcttcgatcaccaccaccgagaccacctcacacagtactcccagcttcacttcttcgatcaccaccaccgagaccacctcacacagtactcccagcttcacttctccaccaccgagaccacctcacacagtactcccagcttcacttcttcaatcaccaccactgagaccacctcacatggagacaacctcacggagttctcccagcttcacttctttgatcaccatcactgggtccacatcccacagtactcccagcttcacttcttcgatcaccatcactgagaccacctcacacagtactcccagcatcacttcttcagtcaccactgccgagaggacatcccacagcactcccagctacgctttttcgattgccaccagtgagacaccctcacacactgttcccagcttcacttctttgatcaccaccaccgagagcacatcccacagtcgtcccactaacttggcgtccttaatcacc

SEQ ID NO: 533450 - DNA, 270 bp, Homo sapiens
tctgtggtgctctagcggctcctttcttatggcatgcctgctggcatggccacgttgcctccgtgtggtggctgtctgcggtgggtgtgggctgtcctgctcatgcacctgggcggccgcacgttctttgcctttcgaggcacccattccgcgcgctgctgcctcttcggcctcgggcatgccccggcttggggccgtcgttccggcactcgtggccccaacccattgcccagacttgcgcacaggcacaccttccaaggcttccgcatc

SEQ ID NO: 533451 - DNA, 514 bp, Homo sapiens
  misc_feature (451)..(451): n is a, c, g, or t
  misc_feature (461)..(461): n is a, c, g, or t
tccgtcacgcttatcttctttgatcaccaccaccaagtctacctcacagaatcctccgagcttcacttctgtgattgccaccgcaggatcacctcacacagtactcccagcttcacttcttcgatcaccaccactgagaccacctcacacagtactcccagcttcacttcttcgatcaccaccaccgagaccacctcacacagtactcccagcttcacttcttcgatcaccaccaccgagaccacctcacacagtactcccagcttcacttcttcgatcaccaccaccgagaccacatcccacagtactcccagcttcacttcttcgatcaccaccaccgagaccacctcacacagtactcccagcttcacttcttcggatcaccaccaccgagaccacctcacacagtactcccagcttcacttctttgatcaccacctctgagaccccntcacacagtnctcccagcttcacttcttcgatacctccacagcccccagaagcaggtttcgtt

SEQ ID NO: 533452 - DNA, 344 bp, Homo sapiens
  misc_feature (182)..(182): n is a, c, g, or t
  misc_feature (326)..(326): n is a, c, g, or t
  misc_feature (329)..(329): n is a, c, g, or t
ggagtgtgcccatggacaagaaggaaactatccatgttagggagttgatctgttatagcgactagtattcccggtacttgtacaaggatgaaatgggttttatgaatgtttactccaggatcccaaaccaagaatcattcaccccaatttttttttagcacctattatgtgccaggcgactngcaaggcacagacacaagaaagtttaaaaaaaccattctcagggctgggtgctgtggctcacagctgaaatcccagcactttgggaggctgaggtgggagaattgcttgagcccaggagttcaaggacagcctgggcaacattnttngactccttctctaca

SEQ ID NO: 533453 - DNA, 986 bp, Homo sapiens
  misc_feature (184)..(184): n is a, c, g, or t
  misc_feature (187)..(187): n is a, c, g, or t
  misc_feature (191)..(191): n is a, c, g, or t
  misc_feature (195)..(195): n is a, c, g, or t
  misc_feature (206)..(209): n is a, c, g, or t
  misc_feature (446)..(446): n is a, c, g, or t
  misc_feature (875)..(876): n is a, c, g, or t
  misc_feature (887)..(887): n is a, c, g, or t
  misc_feature (893)..(893): n is a, c, g, or t
  misc_feature (895)..(895): n is a, c, g, or t
tttctttgtttgtttgtttttttgtctttgtgctttttttgtcttttgtctgtgtgtttgtctgagtgttcacctttttttttcgtgtcttttttgtgttttgtttgttctgtttttattatctttgtctcccaattttctatcaggggtcctcaattcatatacattgcatccccatcatcancancatngaanggtcttaagannnnctggtcagatgatattattgcttcccatcgtgcaaccagtacattagttgccactgagaaagctgacagccaggagtctgtcaagtatgctcaagatatgttatataatactacatgcctgttcacagggggataatgcctaggacatgacttatgtgtacttcttgatttcatcatacaagacaagcacacaaagcaccacccagcctctgagaacattggaccatgcacccttgnacaaaagcctttgcctccgttgcatcacgagcaatcttccggccagcagtcaagcgtgcctgtgtacatgatgtcagttcctctgcgccactgacatgcatcatcatgcggcggcgaacggtgtcaaatggataggaagtcaacccggcaacagcagtgacagtctgtgcgatcatccagctgatgacgatgtgagtgttcttgggatccggaagcattccctttgcagtgtcatagataccgaagtaggcggctcggtagatgataataccctgcacagacacgttaaagccttggtacaggcccttaatcccatcagatttgtagatcttaaccaggcagtcaccgaggcctcggaattccctttcagctccagctttacccacatcagctgctagacgggtacgggcaaaatcaagagggtacacnnacacagggatntggccntncgcaccacccgatgccagattacatgcaaagtagcgccaaactggcttctctgtccacaccacccaggaagatctgcttgtattgatcttt

SEQ ID NO: 533454 - DNA, 235 bp, Homo sapiens
  misc_feature (30)..(30): n is a, c, g, or t
aacaacgcccacaggcatttatggtacacntaatgaacaccgttggtttaaaaagcagctgtcggtccgaatccggatgtgggctcggagccactcacatgtctctcccgcctctccggcgcgcgagcggctcggggggtcccggcggcccgggagcccggtgggccttccgagagcaccgaggggcggcgccgggtgtccccggccggcggcgaatccctccctggcgcgggcg

SEQ ID NO: 533455 - DNA, 190 bp, Homo sapiens
tgagatgatgaaggcctcccagcaggccattgagcggggtgtcaaagtcttgcctgatttgtcagacatataagcggagaagcggacattatcgatgtgaccactgtggcgtcaataaaggagatcacagaaaagaaccgacactgcctcccggacattgctccgcacgctattgagcggctccaccaca

SEQ ID NO: 533456 - DNA, 2013 bp, Homo sapiens
ctctcagtaccacgccggtggccagttctgaggctagcaccctttcaacaagtcctgttgacaccagcacacctgtgaccaattcttctccaaccaattcatctcctacaactgctgaagttaccagcatgccaacatcaactgctggtgaaggaagcactccattaacaaatatgcctgtcagcaccacaccggtggccagttctgaggctagcaccctttcaacaactcctgttgactccaacacttttgttaccagttctagtcaagccagttcatctccagcaactcttcaggtcaccactatgcgtatgtctactccaagtgaaggaagctcttcattaacaactatgctcctcagcagcacatatgtgaccagttctgaggctagcacaccttccactccttctgttgacagaagcacacctgtgaccacttctactcagagcaattctactcctacacctcctgaagttatcaccctgccaatgtcaactcctagtgaagtaagcactccattaaccattatgcctgtcagcaccacatcggtgaccatttctgaggctggcacagcttcaacacttcctgttgacaccagcacacctgtgatcacttctacccaagtcagttcatctcctgtgactcctgaaggtaccaccatgccaatctggacgcttagtgaaggaagcattcccattacaattatgcatgtcagcaccacacgtgtgaccagttctgagggtagcaccctttcaacaccttctgttgtcaccagcacacctgtgaccacttctactgaagccatttcatcttctgcaactcttgacagcaccaccatgtctgtgtcaatgcccatggaaataagcacccttgggaccactattcttgtcagtaccacacctgttacgaggtttcctgagagtagcaccccttccataccatctgtttacaccagcatgtctatgaccactgcctctgaaggcagttcatctcctacaactcttgaaggcaccaccaccatgcctatgtcaactacgagtgaaagaagcactttattgacaactgtcctcatcagccctatatctgtgatgagtccttctgaggccagcacactttcaacacctcctggtgataccagcacacctttgctcacctctaccaaagccggttcattctccatacctgctgaagtcactaccatacgtatttcaattaccagtgaaagaagcactccattaacaactctccttgtcagcaccacacttccaactagctttcctggggccagcatagcttcgacacctcctcttgacacaatgcacaacttttaccccttctactgacactgcctcaactcccacaattcctgtagccaccaccatatctgtatcagtgatcacagaaggaagcacacctgggacaaccatttttattcccagcactcctgtcaccagttctactgctgatgtctttcctgcaacaactggtgctgtatctacccctgtgataacttccactgaactaaacacaccatcaacctccagtagtagtaccaccacatctttttcaactactaaggaatttacaacacccgcaatgactactgcagctcccctcacatatgtgaccatgtctactgcccccagcacacccagaacaaccagcagaggctgcactacttctgcatcaacgctttctgcaaccagtacacctcacacctctacttcgatcaccaccaccgagaccacatcccacagtactcccagcttcacttcttcgatcactcgatcgtcaccaccgagaccacatcccacagtactcccagcttcacttcttcaatcagcaccactgagaccacatcccacagtactcccagcttcacttcttcgatcaccatcactgagaccacctcacacagtactcccagctacactacctcaatcaccaccaccgagctacctcacaccttcctcccaacttcacgtctttgatcaccgcctcccagaaagattg

SEQ ID NO: 533457 - DNA, 3791 bp, Homo sapiens
ctctcagtaccacgccggtggccagttctgaggctagcaccctttcaacaagtcctgttgacaccagcacacctgtgaccaattcttctccaaccaattcatctcctacaactgctgaagttaccagcatgccaacatcaactgctggtgaaggaagcactccattaacaaatatgcctgtcagcaccacaccggtggccagttctgaggctagcaccctttcaacaactcctgttgactccaacacttttgttaccagttctagtcaagccagttcatctccagcaactcttcaggtcaccactatgcgtatgtctactccaagtgaaggaagctcttcattaacaactatgctcctcagcagcacatatgtgaccagttctgaggctagcacaccttccactccttctgttgacagaagcacacctgtgaccacttctactcagagcaattctactcctacacctcctgaagttatcaccctgccaatgtcaactcctagtgaagtaagcactccattaaccattatgcctgtcagcaccacatcggtgaccatttctgaggctggcacagcttcaacacttcctgttgacaccagcacacctgtgatcacttctacccaagtcagttcatctcctgtgactcctgaaggtaccaccatgccaatctggacgcttagtgaaggaagcattcccattacaattatgcatgtcagcaccacacgtgtgaccagttctgagggtagcaccctttcaacaccttctgttgtcaccagcacacctgtgaccacttctactgaagccatttcatcttctgcaactcttgacagcaccaccatgtctgtgtcaatgcccatggaaataagcacccttgggaccactattcttgtcagtaccacacctgttacgaggtttcctgagagtagcaccccttccataccatctgtttacaccagcatgtctatgaccactgcctctgaaggcagttcatctcctacaactcttgaaggcaccaccaccatgcctatgtcaactacgagtgaaagaagcactttattgacaactgtcctcatcagccctatatctgtgatgagtccttctgaggccagcacactttcaacacctcctggtgataccagcacacctttgctcacctctaccaaagccggttcattctccatacctgctgaagtcactaccatacgtatttcaattaccagtgaaagaagcactccattaacaactctccttgtcagcaccacacttccaactagctttcctggggccagcatagcttcgacacctcctcttgacacaatgcacaacttttaccccttctactgacactgcctcaactcccacaattcctgtagccaccaccatatctgtatcagtgatcacagaaggaagcacacctgggacaaccatttttattcccagcactcctgtcaccagttctactgctgatgtctttcctgcaacaactggtgctgtatctacccctgtgataacttccactgaactaaacacaccatcaacctccagtagtagtaccaccacatctttttcaactactaaggaatttacaacacccgcaatgactactgcagctcccctcacatatgtgaccatgtctactgcccccagcacacccagaacaaccagcagaggctgcactacttctgcatcaacgctttctgcaaccagtacacctcacacctctacttctgtcaccacccgtcctgtgaccccttcatcagaatccagcaggccgtcaacaattacttctcacaccatcccacctacatttcctcctgctcactccagtacacctccaacaacctctgcctcctccacgactgtgaaccctgaggctgtcaccaccatgaccaccaggacaaaacccagcacacggaccacttccttccccacggtgaccaccaccgctgtccccacgaatactacaattaagagcaaccccacctcaactcctactgtgccaagaaccacaacatgctttggagatgggtgccagaatacggcctctcgctgcaagaatggaggcacctgggatgggctcaagtgccagtgtcccaacctctattatggggagttgtgtgaggaggtggtcagcagcattgacatagggccaccggagactatctctgcccaaatggaactgactgtgacagtgaccagtgtgaagttcaccgaagagctaaaaaaccactcttcccaggaattccaggagttcaaacagacattcacggaacagatgaatattgtgtattccgggatccctgagtatgtcggggtgaacatcacaaagctacgtcttggcagtgtggtggtggagcatgacgtcctcctaagaaccaagtacacaccagaatacaagacagtattggacaatgccaccgaagtagtgaaagagaaaatcacaaaagtgaccacacagcaaataatgattaatgatatttgctcagacatgatgtgtttcaacaccactggcacccaagtgcaaaacattacggtgacccagtacgaccctgaagaggactgccggaagatggccaaggaatatggagactacttcgtagtggagtaccgggaccagaagccatactgcatcagcccctgtgagcctggcttcagtgtctccaagaactgtagcctcggcaagtgccagatgtctctaagtggacctcagtgcctctgcgtgaccacggaaactcactggtacagtggggagacctgtaaccagggcacccagaagagtctggtgtacggcctcgtgggggcaggggtcgtgctgatgctgatcatcctggtagctctcctgatgctcgttttccgctccaagagagaggtgaaacggcaaaagtacagattgtctcagttatacaagtggcaagaagaggacagtggaccagctcctgggaccttccaaaacattggctttgacatctgccaagatgatgattccatccacctggagtccatctatagtaatttccagccctccttgagacacatagaccctgaaacaaagatccgaattcagaggcctcaggtaatgacgacatcattttaaggcatggagctgagaagtctgggagtgaggagatcccagtccggctaagcttggtggagcattttcccattgagagccttccatgggaactcaatgttcccattgtaagtacaggaaacaagccccgtacttaccaaggagaaagaggagagacagcagtgctgggagattctcaaatagaaacccgtggacgctccaatgggcttgtcatgatatcaggctaggctttcctgctcatttttcaaagacgctccagatttgagggtactctgactgcaacatctatcaccccattgatcgccaggattgatttggttgatctggctgagcaggcgggtgtccccgtcctccctcactgccccatatgtgtccctcctaaagctgcatgctcagttgaagaggacgagaggacgaccttctctgatagaggaggaccacgcttcagtcaaaggcatacaagtatctatctggacttccctgctggcacttccaaacaagctcagagatgttcctcccctcatctgcccgggttcagtaccatggacagcgccctcgacccgctgtttacaaccatgaccccttggacactggactgcatgcactttacatatcacaaaatgctctcataagaattattgcataccatcttcatgaaaaacacctgtatttaaatatagggcatttaccttttggtaaag

SEQ ID NO: 533458 - DNA, 555 bp, Homo sapiens
  misc_feature (6)..(6): n is a, c, g, or t
  misc_feature (70)..(70): n is a, c, g, or t
  misc_feature (75)..(75): n is a, c, g, or t
  misc_feature (82)..(82): n is a, c, g, or t
  misc_feature (108)..(108): n is a, c, g, or t
  misc_feature (141)..(143): n is a, c, g, or t
  misc_feature (184)..(184): n is a, c, g, or t
  misc_feature (200)..(200): n is a, c, g, or t
  misc_feature (274)..(275): n is a, c, g, or t
  misc_feature (350)..(350): n is a, c, g, or t
  misc_feature (418)..(418): n is a, c, g, or t
  misc_feature (420)..(420): n is a, c, g, or t
  misc_feature (521)..(521): n is a, c, g, or t
tgagcnttaaaaaccaaactttgacataaccttatttcttgtatttgccccctttttttttataaaaggngaatnaaaaganataatttaatataaccattgtatggnttcctaatcaagatttcacgttctgcgggcgcnnngggggtggttttctttgctctctgtaattagagcctttggnagcaaagttgaaaggnagtatttccattctgttactgttttgtagcactttgtccatttattgatttttaaagtagatatttagataccnnacctgccctgccctgccccaaaaagaaaaatgtttattgtcctgctaatctatatgcctacacctcagaagctgncagatgagcttcctaaaacatgggggtgagtaaatgttagaactgtgatatcttctcatttccacagngntttgggtttaaaacaaatgggtaatatttgtaagcctgaaagctgccatcctctttaacatctctacctaccttttttaaaatattttttctggaaggtanaagtaacagttaaggcactcagaaacatattgtt

SEQ ID NO: 533459 - DNA, 4433 bp, Homo sapiens
atggggtgccagcttcacttctttgataaccacctctgagaccccgtcacacagtactcccagcttcacttcttcaatcagcaccactgagaccacatcccacagtactcccagcttcacttcttcgatcaccaccactgagaccacctcacacagtactcccagcttcacttcttcgatcaccaccaccgagaccacctcacacagtactcccagcttcacttcttcgatcaccaccaccgagaccacctcacacagtactcccagcttcacttcttcgatcaccaccaccgagaccacatcccacagtactcccagcttcacttcttcgatcaccaccaccgagaccacctcacacagtactcccagcttcacttcttcaatcaccaccactgagaccacctcacacagtactcccagcttcacttcttcgatcaccaccaccgagaccacctcacacagtactcccagcctcagttcttcaaccatctactccacagtcagcacatccacaactgccatcacctcacattttactacctcagagactgcggtgactcccacacctgtaaccccatcttctctgagtacagacatcccgaccacatccctaagaactctcaccccattatctttgaacaccagcacttcattgactacaaccacagactttccctctatacccactgatatcagtaccttaccaactcgaacacacatcatttcatcttctccctccatccaaagtacagaaacctcatcccttgtgggcaccacctctcccaccatgtccactgtgagaatgaccctcagaattactgagaacaccccaatcagttcctttagcacaagtattgttgttatacctgaaacccaacaacacagacccctcctgtactgacgtcagccactgggacccaaacatctcctgcacctactactgtcacctttggaagtacggattcctccacgtccactcttcatactcttactccatcaacagccttgagcacgatcgtgtcaacatcacaggttcctattcctagcacacattcctccacccttcaaacaactccttctactccctcattgcaaacttcactcacatctacaagtgagttcactacagaatctttcactaggggaagtacgtctacaaatgcaatcttgacttcttttagtaccatcatctggtcctcaacacccactattatcatgtcctcttctccatcttctgccagcataactccagtgttctccactaccattcattctgttccttcttcaccatacattttcagtacagaaaatgtgggctccgcttctatcacaggctttcctagtctctcttcctctgcaactaccagcacttcttcaaccagctcctctctgaccacagctctcactgaaataacccccttttcttatatttcccttccctccaccacaccctgtccaggaactataacaattaccatagtccctgcctctcccactgatccatgtgttgaaatggatcccagcactgaagctacttctcctcccaccaccccattaacagtctttccctttactaccgaaatggtcacctgtcctacctccatcagtatccaaactactcttactacatatatggacacttcttccatgatgccagaaagtgagtccagcatctcacccaatgcttccagttccactggcactgggactgtacccacaaacacagttttcacaagtactcgactgcccaccagtgagacctggctgagcaacagttctgtgatccccctacctcttcctggcgtctctaccatcccgctcaccatgaaaccaagcagtagcctcccgaccatcctgaggacttcaagcaagtcaacacacccatccccacccaccactaggacttcagagacaccagtggccactacccagactcctaccacccttacatcacgcaggacaactcgcatcacttctcagatgaccacacagtccacgttgaccaccactgcaggcacctgtgacaatggtggcacctgggaacagggccagtgtgcttgccttccggggttttctggggaccgctgtcagctccagaccagatgccagaatgggggtcagtgggatggcctcaaatgccagtgccccagcaccttctatggttccagttgtgagtttgctgtggaacaggtggatctagatgtagtggagaccgaggtgggcatggaagtgtctgtggatcagcagttctcgccggacctcaatgacaacacttcccaggcctacagggatttcaacaagaccttctggaatcagatgcagaagatttttgcagacatgcagggcttcaccttcaagggtgtggagatcctgtccctgaggaatggcagcatcgtggtggactacctggtcctgctggagatgcccttcagcccccagctggagagcgagtatgagcaggtgaagaccacgctgaaggaggggctgcagaacgccagccaggatgtgaacagctgccaggactcccagaccctgtgttttaagcctgactccatcaaggtgaacaacaacagcaagacagagctgaccccggcagccatctgccgccgcgccgctcccacgggctatgaagagttctacttccccttggtggaggccacccggctccgctgtgtcaccaaatgcacgtcgggggtggacaacgccatcgactgtcaccagggccagtgcgttctggagacgagcggtcccacgtgtcgctgctactccaccgacacgcactggttctctggcccgcgctgcgaggtggccgtccactggagggcgctggtcgggggcctgacggccggcgccgcgctgctggtgctgctgctgctggcgctgggcgtccgggcggtgcgctccggatggtggggcggccagcgccgaggccggtcctgggaccaggacaggaaatggttcgagacctgggatgaggaagtcgtgggcactttttcaaactggggtttcgaggacgacggaacagacaaggatacaaatttctatgtggccttggagaacgtggacaccactatgaaggtgcacatcaagagacccgagatgacctcgtcctcagtgtgagccctgcggggccccttcaccaccccctccgccctgccccggacacaagggtctgcattgcgtccatttcaagaggtggccccaggacgcgggcagcccaggctcctgctgttcttgggcaagatgagactgttcccccaaatcccatccttctccttccaacttggctgaaacccacctggagacgcagttcacgtccaggctcttccactgtggaatcttgggcaagtcagtaacgagcctcagtttcctcacctgcaaaacgggtacagcattcctgtatgatagctcacgccgttgttgtgaaaaccacatagacttggtcaattctcggtcctactctgccctcccgtctcagccctcgtgttgccattgcctctctcggatcctccaatcctcacgtccttcacctggtctctggccctggttcttattttctctcaattccctactgcctgtttcttactttgaacctggaggcagcctgcagccccatcccatctcctgccctctcctgatctaactccctgctgcatctcttgctctcattccttagacgtcctccccttttgaccccgttccttcatccatcctgcaccccagtcccccagccctaaatcctccctcctctcctcacatcctggtccctagcaaggtatagatagcctctgtgtcttaggataccccgggtgctgttccctcggtcaccctgttgcccagttccccgtttctcttgctctcattccttgtatcctttccccttttgagcccgtccattcatcggttctgcccccgactcccccagccctaaataccccagctgctgttccccccatcaccctgctgcccaattccccgtttctcttgctctcattccttgtatcttctccccttctgagcctgtccattcatcggtggttctgcccctactcccccagccctaaataccccagctgctgttcctccccatcaccccgctactggattctccatttttattctccacccctttctctcacccctggagccctgcgggtgggggcagggcatgagttccccagtccccaaggaaaggcagccccctcagtctccctcctcctcattcccttccatctccctcccctctgccttttaaacccatcccctccgattcccctcctcccccctctctccctggtgtcaactcgattcctgcggtaactctgagccctgaaatcctcagtctccttggcggggaagattggctttggggacaggaagtcggcacatctccaggtctccatgtgcacaatatagagtttattgtaaaaagc

SEQ ID NO: 533460 - DNA, 893 bp, Homo sapiens
  misc_feature (23)..(23): n is a, c, g, or t
  misc_feature (64)..(64): n is a, c, g, or t
  misc_feature (70)..(71): n is a, c, g, or t
  misc_feature (73)..(73): n is a, c, g, or t
  misc_feature (81)..(82): n is a, c, g, or t
  misc_feature (112)..(112): n is a, c, g, or t
  misc_feature (117)..(117): n is a, c, g, or t
  misc_feature (119)..(119): n is a, c, g, or t
  misc_feature (122)..(123): n is a, c, g, or t
  misc_feature (126)..(126): n is a, c, g, or t
  misc_feature (131)..(131): n is a, c, g, or t
  misc_feature (173)..(173): n is a, c, g, or t
  misc_feature (175)..(175): n is a, c, g, or t
  misc_feature (185)..(185): n is a, c, g, or t
  misc_feature (194)..(194): n is a, c, g, or t
  misc_feature (204)..(204): n is a, c, g, or t
  misc_feature (215)..(215): n is a, c, g, or t
  misc_feature (289)..(289): n is a, c, g, or t
  misc_feature (343)..(343): n is a, c, g, or t
  misc_feature (388)..(388): n is a, c, g, or t
  misc_feature (417)..(417): n is a, c, g, or t
  misc_feature (433)..(433): n is a, c, g, or t
  misc_feature (509)..(509): n is a, c, g, or t
  misc_feature (520)..(520): n is a, c, g, or t
  misc_feature (524)..(524): n is a, c, g, or t
atgttcgtgcgcaagtcccagtnccgcctgcccttcaaggccaccacgcctgtcatcatggtgncccccnncnccggggtnncccccttcataggcttcatccaggagcggncctgncngcnncancaggncaaggaggtgggggagacgctgctgtacctacgctgccgccncncggatgaggnctccctgtnccgggaggcngtggcgcagtnccacagggacggtgcgctcacccagctcaacgtggccttctcccgggagaagtccaaaaaggtctacgtccagnacctgctaaagcaagaccgagagcacctgtggaagttgatcgaaggcggtgccnacatctacgtctgtggggatgcacggaacatggccagggatgtgnagaacaccttctacgacatcgtggctganctcggggccatggagnacgtgcaggcggtggactacatcaagaaactgatgaccaagggccgctactccctggacgtgtggagctaggggcnctgcctgctcnccancccacccccacagactccggcctgtaatcagctctcctggctccctcccgtagtctccctgggtgtgtttggcttggccttggccatgggcgcaggcccagtgacaaagactcctctgggcctggggtgcatcctcctcagcccccaggcccaggtgaggtccaccggcccctggcagcacagcccagggcctgcatgggggcaccgggctccatgcctctggagcgctctggccctcggtggctgcacagaagggctctttctctctgctgagctgggcccagcccctccacgtgatttccagtgagtgtaaataattttaaataacctctggcccttggaataaagttctgttttctgtaaaaaaaa

SEQ ID NO: 533461 - DNA, 4464 bp, Homo sapiens
  misc_feature (126)..(126): n is a, c, g, or t
  misc_feature (128)..(128): n is a, c, g, or t
  misc_feature (131)..(131): n is a, c, g, or t
atggggtgccagcttcacttctttgataaccacctctgagaccccgtcacacagtactcccagcttcacttcttcaatcagcaccactgagaccacatcccgactcgatcgtcaccaccgagaccncntcncacagtactcccagcttcacttcttcgatcaccaccactgagaccacctcacacagtactcccagcttcacttcttcgatcaccaccaccgagaccacctcacacagtactcccagcttcacttcttcgatcaccaccaccgagaccacctcacacagtactcccagcttcacttcttcgatcaccaccaccgagaccacatcccacagtactcccagcttcacttcttcgatcaccaccaccgagaccacctcacacagtactcccagcttcacttcttcaatcaccaccactgagaccacctcacacagtactcccagcttcacttcttcgatcaccaccaccgagaccacctcacacagtactcccagcctcagttcttcaaccatctactccacagtcagcacatccacaactgccatcacctcacattttactacctcagagactgcggtgactcccacacctgtaaccccatcttctctgagtacagacatcccgaccacatccctaagaactctcaccccattatctttgaacaccagcacttcattgactacaaccacagactttccctctatacccactgatatcagtaccttaccaactcgaacacacatcatttcatcttctccctccatccaaagtacagaaacctcatcccttgtgggcaccacctctcccaccatgtccactgtgagaatgaccctcagaattactgagaacaccccaatcagttcctttagcacaagtattgttgttatacctgaaacccaacaacacagacccctcctgtactgacgtcagccactgggacccaaacatctcctgcacctactactgtcacctttggaagtacggattcctccacgtccactcttcatactcttactccatcaacagccttgagcacgatcgtgtcaacatcacaggttcctattcctagcacacattcctccacccttcaaacaactccttctactccctcattgcaaacttcactcacatctacaagtgagttcactacagaatctttcactaggggaagtacgtctacaaatgcaatcttgacttcttttagtaccatcatctggtcctcaacacccactattatcatgtcctcttctccatcttctgccagcataactccagtgttctccactaccattcattctgttccttcttcaccatacattttcagtacagaaaatgtgggctccgcttctatcacaggctttcctagtctctcttcctctgcaactaccagcacttcttcaaccagctcctctctgaccacagctctcactgaaataacccccttttcttatatttcccttccctccaccacaccctgtccaggaactataacaattaccatagtccctgcctctcccactgatccatgtgttgaaatggatcccagcactgaagctacttctcctcccaccaccccattaacagtctttccctttactaccgaaatggtcacctgtcctacctccatcagtatccaaactactcttactacatatatggacacttcttccatgatgccagaaagtgagtccagcatctcacccaatgcttccagttccactggcactgggactgtacccacaaacacagttttcacaagtactcgactgcccaccagtgagacctggctgagcaacagttctgtgatccccctacctcttcctggcgtctctaccatcccgctcaccatgaaaccaagcagtagcctcccgaccatcctgaggacttcaagcaagtcaacacacccatccccacccaccactaggacttcagagacaccagtggccactacccagactcctaccacccttacatcacgcaggacaactcgcatcacttctcagatgaccacacagtccacgttgaccaccactgcaggcacctgtgacaatggtggcacctgggaacagggccagtgtgcttgccttccggggttttctggggaccgctgtcagctccagaccagatgccagaatgggggtcagtgggatggcctcaaatgccagtgccccagcaccttctatggttccagttgtgagtttgctgtggaacaggtggatctagatgtagtggagaccgaggtgggcatggaagtgtctgtggatcagcagttctcgccggacctcaatgacaacacttcccaggcctacagggatttcaacaagaccttctggaatcagatgcagaagatttttgcagacatgcagggcttcaccttcaagggtgtggagatcctgtccctgaggaatggcagcatcgtggtggactacctggtcctgctggagatgcccttcagcccccagctggagagcgagtatgagcaggtgaagaccacgctgaaggaggggctgcagaacgccagccaggatgtgaacagctgccaggactcccagaccctgtgttttaagcctgactccatcaaggtgaacaacaacagcaagacagagctgaccccggcagccatctgccgccgcgccgctcccacgggctatgaagagttctacttccccttggtggaggccacccggctccgctgtgtcaccaaatgcacgtcgggggtggacaacgccatcgactgtcaccagggccagtgcgttctggagacgagcggtcccacgtgtcgctgctactccaccgacacgcactggttctctggcccgcgctgcgaggtggccgtccactggagggcgctggtcgggggcctgacggccggcgccgcgctgctggtgctgctgctgctggcgctgggcgtccgggcggtgcgctccggatggtggggcggccagcgccgaggccggtcctgggaccaggacaggaaatggttcgagacctgggatgaggaagtcgtgggcactttttcaaactggggtttcgaggacgacggaacagacaaggatacaaatttctatgtggccttggagaacgtggacaccactatgaaggtgcacatcaagagacccgagatgacctcgtcctcagtgtgagccctgcggggccccttcaccaccccctccgccctgccccggacacaagggtctgcattgcgtccatttcaagaggtggccccaggacgcgggcagcccaggctcctgctgttcttgggcaagatgagactgttcccccaaatcccatccttctccttccaacttggctgaaacccacctggagacgcagttcacgtccaggctcttccactgtggaatcttgggcaagtcagtaacgagcctcagtttcctcacctgcaaaacgggtacagcattcctgtatgatagctcacgccgttgttgtgaaaaccacatagacttggtcaattctcggtcctactctgccctcccgtctcagccctcgtgttgccattgcctctctcggatcctccaatcctcacgtccttcacctggtctctggccctggttcttattttctctcaattccctactgcctgtttcttactttgaacctggaggcagcctgcagccccatcccatctcctgccctctcctgatctaactccctgctgcatctcttgctctcattccttagacgtcctccccttttgaccccgttccttcatccatcctgcaccccagtcccccagccctaaatcctccctcctctcctcacatcctggtccctagcaaggtatagatagcctctgtgtcttaggataccccgggtgctgttccctcggtcaccctgttgcccagttccccgtttctcttgctctcattccttgtatcctttccccttttgagcccgtccattcatcggttctgcccccgactcccccagccctaaataccccagctgctgttccccccatcaccctgctgcccaattccccgtttctcttgctctcattccttgtatcttctccccttctgagcctgtccattcatcggtggttctgcccctactcccccagccctaaataccccagctgctgttcctccccatcaccccgctactggattctccatttttattctccacccctttctctcacccctggagccctgcgggtgggggcagggcatgagttccccagtccccaaggaaaggcagccccctcagtctccctcctcctcattcccttccatctccctcccctctgccttttaaacccatcccctccgattcccctcctcccccctctctccctggtgtcaactcgattcctgcggtaactctgagccctgaaatcctcagtctccttggcggggaagattggctttggggacaggaagtcggcacatctccaggtctccatgtgcacaatatagagtttattgtaaaaagc

SEQ ID NO: 533462 - DNA, 292 bp, Homo sapiens
acattcatctctctggctcagcattctgtgtgtgaagctggcagaattggtcagatgcatcacgcgtggatggctttgtttgagaaaaagtgcgggaggatgagttccactatcgatacgtaccagactcaggtctcagacgcaggcttgtaccgctgcatggtgacagcctggtctcctgtcagtcgcagcctttgttgagaagcagcaagcagtctctccaatcctattaagatagacttccaaacctcaggtcctatatttattgcttgtgtgcgttcagacagaccat

SEQ ID NO: 533463 - DNA, 4293 bp, Homo sapiens
atggggtgccagcttcacttctttgataaccacctctgagaccccgtcacacagtactcccagcttcacttcttcaatcagcaccactgagaccacatcccacagtactcccagcttcacttcttcgatcaccaccactgagaccacctcacacagtactcccagcttcacttcttcgatcaccaccaccgagaccacctcacacagtactcccagcttcacttcttcgatcaccaccaccgagaccacctcacacagtactcccagcttcacttcttcgatcaccaccaccgagaccacatcccacagtactcccagcttcacttcttcgatcaccaccaccgagaccacctcacacagtactcccagcttcacttcttcaatcaccaccactgagaccacctcacacagtactcccagcttcacttcttcgatcaccaccaccgagaccacctcacacagtactcccagcctcagttcttcaaccatctactccacagtcagcacatccacaactgccatcacctcacattttactacctcagagactgcggtgactcccacacctgtaaccccatcttctctgagtacagacatcccgaccacaagcctacgaactctcaccccttcgtctgtgggcaccagcacttcattgactacaaccacagactttccctctatacccactgatatcagtaccttaccaactcgaacacacatcatttcatcttctccctccatccaaagtacagaaacctcatcccttgtgggcaccacctctcccaccatgtccactgtgagaatgaccctcagaattactgagaacaccccaatcagttcctttagcacaagtattgttgttatacctgaaacccaacaacacagacccctcctgtactgacgtcagccactgggacccaaacatctcctgcacctactactgtcacctttggaagtacggattcctccacgtccactcttcatactcttactccatcaacagccttgagcacgatcgtgtcaacatcacaggttcctattcctagcacacattcctccacccttcaaacaactccttctactccctcattgcaaacttcactcacatctacaagtgagttcactacagaatctttcactaggggaagtacgtctacaaatgcaatcttgacttcttttagtaccatcatctggtcctcaacacccactattatcatgtcctcttctccatcttctgccagcataactccagtgttctccactaccattcattctgttccttcttcaccatacattttcagtacagaaaatgtgggctccgcttctatcacaggctttcctagtctctcttcctctgcaactaccagcacttcttcaaccagctcctctctgaccacagctctcactgaaataacccccttttcttatatttcccttccctccaccacaccctgtccaggaactataacaattaccatagtccctgcctctcccactgatccatgtgttgaaatggatcccagcactgaagctacttctcctcccaccaccccattaacagtctttccctttactaccgaaatggtcacctgtcctacctccatcagtatccaaactactcttactacatatatggacacttcttccatgatgccagaaagtgagtccagcatctcacccaatgcttccagttccactggcactgggactgtacccacaaacacagttttcacaagtactcgactgcccaccagtgagacctggctgagcaacagttctgtgatccccctacctcttcctggcgtctctaccatcccgctcaccatgaaaccaagcagtagcctcccgaccatcctgaggacttcaagcaagtcaacacacccatccccacccaccactaggacttcagagacaccagtggccactacccagactcctaccacccttacatcacgcaggacaactcgcatcacttctcagatgaccacacagtccacgttgaccaccactgcaggcacctgtgacaatggtggcacctgggaacagggccagtgtgcttgccttccggggttttctggggaccgctgtcagctccagaccagatgccagaatgggggtcagtgggatggcctcaaatgccagtgccccagcaccttctatggttccagttgtgagtttgctgtggaacaggtggatctagatgtagtggagaccgaggtgggcatggaagtgtctgtggatcagcagttctcgccggacctcaatgacaacacttcccaggcctacagggatttcaacaagaccttctggaatcagatgcagaagatttttgcagacatgcagggcttcaccttcaagggtgtggagatcctgtccctgaggaatggcagcatcgtggtggactacctggtcctgctggagatgcccttcagcccccagctggagagcgagtatgagcaggtgaagaccacgctgaaggaggggctgcagaacgccagccaggatgtgaacagctgccaggactcccagaccctgtgttttaagcctgactccatcaaggtgaacaacaacagcaagacagagctgaccccggcagccatctgccgccgcgccgctcccacgggctatgaagagttctacttccccttggtggaggccacccggctccgctgtgtcaccaaatgcacgtcgggggtggacaacgccatcgactgtcaccagggccagtgcgttctggagacgagcggtcccacgtgtcgctgctactccaccgacacgcactggttctctggcccgcgctgcgaggtggccgtccactggagggcgctggtcgggggcctgacggccggcgccgcgctgctggtgctgctgctgctggcgctgggcgtccgggcggtgcgctccggatggtggggcggccagcgccgaggccggtcctgggaccaggacaggaaatggttcgagacctgggatgaggaagtcgtgggcactttttcaaactggggtttcgaggacgacggaacagacaaggatacaaatttctatgtggccttggagaacgtggacaccactatgaaggtgcacatcaagagacccgagatgacctcgtcctcagtgtgagccctgcggggccccttcaccaccccctccgccctgccccggacacaagggtctgcattgcgtccatttcaagaggtggccccaggacgcgggcagcccaggctcctgctgttcttgggcaagatgagactgttcccccaaatcccatccttctccttccaacttggctgaaacccacctggagacgcagttcacgtccaggctcttccactgtggaatcttgggcaagtcagtaacgagcctcagtttcctcacctgcaaaacgggtacagcattcctgtatgatagctcacgccgttgttgtgaaaaccacatagacttggtcaattctcggtcctactctgccctcccgtctcagccctcgtgttgccattgcctctctcggatcctccaatcctcacgtccttcacctggtctctggccctggttcttattttctctcaattccctactgcctgtttcttactttgaacctggaggcagcctgcagccccatcccatctcctgccctctcctgatctaactccctgctgcatctcttgctctcattccttagacgtcctccccttttgaccccgttccttcatccatcctgcaccccagtcccccagccctaaatcctccctcctctcctcacatcctggtccctagcaaggtatagatagcctctgtgtcttaggataccccgggtgctgttccctcggtcaccctgttgcccagttccccgtttctcttgctctcattccttgtatcctttccccttttgagcccgtccattcatcggttctgcccccgactcccccagccctaaataccccagctgctgttccccccatcaccctgctgcccaattctttattctccacccctttctctcacccctggagccctgcgggtgggggcagggcatgagttccccagtccccaaggaaaggcagccccctcagtctccctcctcctcattcccttccatctccctcccctctgccttttaaacccatcccctccgattcccctcctcccccctctctccctggtgtcaactcgattcctgcggtaactctgagccctgaaatcctcagtctccttggcggggaagattggctttggggacaggaagtcggcacatctccaggtctccatgtgcacaatatagagtttattgtaaaaagc

SEQ ID NO: 533464 - DNA, 239 bp, Homo sapiens
  misc_feature (14)..(14): n is a, c, g, or t
  misc_feature (155)..(155): n is a, c, g, or t
  misc_feature (167)..(167): n is a, c, g, or t
gtgggctctgagancctccaggaaagagcttttgaaaataaatgtgaagctgggcttaggagctcatgcctgcaatcccagagactagggaggccgagaagggaggatcgcttgaggtcaggagttagagaccagcctggggaacacagcaagancccatctcaaanacacacacacacacacactaaagaaaaaccaaaacaaaacaaaacaaaacaaaaaaaccaagccaggcatgg

SEQ ID NO: 533465 - DNA, 1041 bp, Homo sapiens
  misc_feature (812)..(812): n is a, c, g, or t
acttatgagactgcgacatctgcccgatggacgccgtcatcaacaatgtagattgtggtgacataccctctacggttgaacagaacaatcgatgcctccgaggcttgaacccgtcggactctcgtactaggtacacaactgtacatcggcacaaagatcccaggactgaggcacatgagcatagtcccttgcctgaactgcaggcatcagcatcatgaatcatttggttggcagaaaccacctaggagacaagtggcacggtacctatctcgtactgaatgtaccatgtaattcacactgagaaggtctgactctctcagtacttgggttgacgcactctcgttgtgtggcttgtctcccggagaccagggatcgaatgacatgtctcttgagcgaatcccaataatgaatatgctcacagagtacccagggttgcagctttggttgatgcctgcagagattattattccacgagttgggactcgagcacagggggcaagatctataagatcgacctgtcgctggctagagctgctcgctctcgtgcatcgaaactggtgggtgcatgttggtgtgccatggaacgttcactggttgtgcccataacgattcatccggtgcgataggatggtttgtcctgacatggactggtctgccaggtgataccgaggagcccgcattttacctgtgtgatgggttgagtatagaagacattgagcttcaatgttccaaaacaaaaaacaagcaagacctaatatttgttgggagtgggatcccccaacaatgtgaaaattggtttgtctgttgacatntcgcacccttccggggggctaaaaaattgtccgacaaccttcattaaggcaacagcacggcacatccaggaagcctgtaccaagcggcatttccgaaccacgtttcataggacaatgttcccgggggggcaaggccttcctgcaaatggaaacaccgggagcgagggcatgggagagactggaggtacaccgaggcggagagcaaacaaatgattgacctggtgtcgac

SEQ ID NO: 533466 - DNA, 583 bp, Homo sapiens
cgtctgtttgtagaaaaatatatgtgcaaaagtagtgtaactatattattcactaaatagctgatatggctatacttcagagtcttcgatagtatgatcaggggtgtctttaaaagtgtcttctgtagcagaataggtgggagttgggtctcttctcgaaggaggcttaggctaagcagggagcgaaggtgatggaggtggtgtcgcagcaacacttgccttaggctcgttctccatctgtgcatagatcggatctacagagttggtagtatgtttagattttcgtttgaagagatgccatttagtcacctgagttccatcagcagctggtgaagttgggtttgtctctggaactatctcagaagggttcatgggacttccataattcttattatccacgattgtcagatacagtcacctggataggctgaaccagtttgacagcactgtctctggcctgagtacatggggttttcaaatattatgggctgcttccccatttccatgacaaagtcttcactcattggcattgacctgtcaatagcagtctcaggtccaaaaccagacactccaatatccatgt

SEQ ID NO: 533467 - DNA, 5368 bp, Homo sapiens
  misc_feature (423)..(423): n is a, c, g, or t
atggggtgccagcttcacttctttgataaccacctctgagaccccgtcacacagtactcccagcttcacttcttcaatcagcaccactgagaccacatcccacagtactcccagcttcacttcttcgatcaccaccactgagaccacctcacacagtactcccagcttcacttcttcgatcaccaccaccgagaccacctcacacagtactcccagcttcacttcttcgatcaccaccaccgagaccacctcacacagtactcccagcttcacttcttcgatcaccaccaccgagaccacatcccacagtactcccagcttcacttcttcgatcaggaccactgagaccacctctcatagtactcccagcttcacttcttcgatcatcgccaccgaaaccacctcacacagtactcccagctncacttctttgatccccaccaccgagaccacctcacacagtactcccagcttcacttcttcaatcaccaccactgagaccacctcacacagtactcccagcttcacttcttcgatcaccaccaccgactcgatcgtcaccaccgagaccacatcccacagtactcccagcttcacttcttcaatcagcaccactgagaccacatcccacagtactcccagcttcacttcttcgatcaccatcactgagaccacctcacacagtactcccagctacactacctcaatcaccaccaccgagaccccctcaagcagtactcccagcttcacttcttcgatcaccaccaccgagaccacatcccacagtactcccagcttcacttcttcaatcagcaccactgagaccacatcccacagtactcccagcttcacttcttcgatcaccaccactgagaccacctcacacggtactcccagcttcacttcttcaatcaccaccactgagaccccctcacacagtactcccagcttcacttctttgatcaccaccaccgagaccacctcacacagtactcccagcttcacttcttcgatcaccaccaccgagaccacctcacacagtactcccagcttcacttctttgatcaccaccactgagaccccgtcacacagtactcccagcttcacttcttcgatcaccaccaccgagaccacctcacacagtactaccagcttcacttcttcgatcaccaccaccgagaccacctcacacagtactcccagcttcagttcttcaatcaccaccactgagacccccttacacagtactcctggcctaccttcgtgggtcaccaccaccaagaccacctcacacattactcctggcctcacttcttcaatcaccaccactgagactacctcacacagtactcccggcttcacttcttcaatcaccaccactggaccacctcacacagtactcccagcctcagttcttcaaccatctactccacagtcagcacatccacaactgccatcacctcacattttactacctcagagactgcggtgactcccacacctgtaaccccatcttctctgagtacagacatcccgaccacatccctaagaactctcaccccattatctttgaacaccagcacttcattgactacaaccacagactttccctctatacccactgatatcagtaccttaccaactcgaacacacatcatttcatcttctccctccatccaaagtacagaaacctcatcccttgtgggcaccacctctcccaccatgtccactgtgagaatgaccctcagaattactgagaacaccccaatcagttcctttagcacaagtattgttgttatacctgaaacccaacaacacagacccctcctgtactgacgtcagccactgggacccaaacatctcctgcacctactactgtcacctttggaagtacggattcctccacgtccactcttcatactcttactccatcaacagccttgagcacgatcgtgtcaacatcacaggttcctattcctagcacacattcctccacccttcaaacaactccttctactccctcattgcaaacttcactcacatctacaagtgagttcactacagaatctttcactaggggaagtacgtctacaaatgcaatcttgacttcttttagtaccatcatctggtcctcaacacccactattatcatgtcctcttctccatcttctgccagcataactccagtgttctccactaccattcattctgttccttcttcaccatacattttcagtacagaaaatgtgggctccgcttctatcacaggctttcctagtctctcttcctctgcaactaccagcacttcttcaaccagctcctctctgaccacagctctcactgaaataacccccttttcttatatttcccttccctccaccacaccctgtccaggaactataacaattaccatagtccctgcctctcccactgatccatgtgttgaaatggatcccagcactgaagctacttctcctcccaccaccccattaacagtctttccctttactaccgaaatggtcacctgtcctacctccatcagtatccaaactactcttactacatatatggacacttcttccatgatgccagaaagtgagtccagcatctcacccaatgcttccagttccactggcactgggactgtacccacaaacacagttttcacaagtactcgactgcccaccagtgagacctggctgagcaacagttctgtgatccccctacctcttcctggcgtctctaccatcccgctcaccatgaaaccaagcagtagcctcccgaccatcctgaggacttcaagcaagtcaacacacccatccccacccaccactaggacttcagagacaccagtggccactacccagactcctaccacccttacatcacgcaggacaactcgcatcacttctcagatgaccacacagtccacgttgaccaccactgcaggcacctgtgacaatggtggcacctgggaacagggccagtgtgcttgccttccggggttttctggggaccgctgtcagctccagaccagatgccagaatgggggtcagtgggatggcctcaaatgccagtgccccagcaccttctatggttccagttgtgagtttgctgtggaacaggtggatctagatgtagtggagaccgaggtgggcatggaagtgtctgtggatcagcagttctcgccggacctcaatgacaacacttcccaggcctacagggatttcaacaagaccttctggaatcagatgcagaagatttttgcagacatgcagggcttcaccttcaagggtgtggagatcctgtccctgaggaatggcagcatcgtggtggactacctggtcctgctggagatgcccttcagcccccagctggagagcgagtatgagcaggtgaagaccacgctgaaggaggggctgcagaacgccagccaggatgtgaacagctgccaggactcccagaccctgtgttttaagcctgactccatcaaggtgaacaacaacagcaagacagagctgaccccggcagccatctgccgccgcgccgctcccacgggctatgaagagttctacttccccttggtggaggccacccggctccgctgtgtcaccaaatgcacgtcgggggtggacaacgccatcgactgtcaccagggccagtgcgttctggagacgagcggtcccacgtgtcgctgctactccaccgacacgcactggttctctggcccgcgctgcgaggtggccgtccactggagggcgctggtcgggggcctgacggccggcgccgcgctgctggtgctgctgctgctggcgctgggcgtccgggcggtgcgctccggatggtggggcggccagcgccgaggccggtcctgggaccaggacaggaaatggttcgagacctgggatgaggaagtcgtgggcactttttcaaactggggtttcgaggacgacggaacagacaaggatacaaatttctatgtggccttggagaacgtggacaccactatgaaggtgcacatcaagagacccgagatgacctcgtcctcagtgtgagccctgcggggccccttcaccaccccctccgccctgccccggacacaagggtctgcattgcgtccatttcaagaggtggccccaggacgcgggcagcccaggctcctgctgttcttgggcaagatgagactgttcccccaaatcccatccttctccttccaacttggctgaaacccacctggagacgcagttcacgtccaggctcttccactgtggaatcttgggcaagtcagtaacgagcctcagtttcctcacctgcaaaacgggtacagcattcctgtatgatagctcacgccgttgttgtgaaaaccacatagacttggtcaattctcggtcctactctgccctcccgtctcagccctcgtgttgccattgcctctctcggatcctccaatcctcacgtccttcacctggtctctggccctggttcttattttctctcaattccctactgcctgtttcttactttgaacctggaggcagcctgcagccccatcccatctcctgccctctcctgatctaactccctgctgcatctcttgctctcattccttagacgtcctccccttttgaccccgttccttcatccatcctgcaccccagtcccccagccctaaatcctccctcctctcctcacatcctggtccctagcaaggtatagatagcctctgtgtcttaggataccccgggtgctgttccctcggtcaccctgttgcccagttccccgtttctcttgctctcattccttgtatcctttccccttttgagcccgtccattcatcggttctgcccccgactcccccagccctaaataccccagctgctgttccccccatcaccctgctgcccaattccccgtttctcttgctctcattccttgtatcttctccccttctgagcctgtccattcatcggtggttctgcccctactcccccagccctaaataccccagctgctgttcctccccatcaccccgctactggattctccatttttattctccacccctttctctcacccctggagccctgcgggtgggggcagggcatgagttccccagtccccaaggaaaggcagccccctcagtctccctcctcctcattcccttccatctccctcccctctgccttttaaacccatcccctccgattcccctcctcccccctctctccctggtgtcaactcgattcctgcggtaactctgagccctgaaatcctcagtctccttggcggggaagattggctttggggacaggaagtcggcacatctccaggtctccatgtgcacaatatagagtttattgtaaaaagc

SEQ ID NO: 533468 - DNA, 387 bp, Homo sapiens
tctagaggatccacgtgcattgtgttatattcacatagtgaagattggaacacccaaatgccatcaatgatagactggattaagaaaatgcagcacatatacaccatggaatactaagcagccataaaaaatgatgtgttcatttcctttgcagggacatggatgaagctggaaaccatcattcccagcaaactatcgcaaggacaaaaaaccaaacaccacatgttctcactcataggtgggagctaaatggtgagaacacaatggcacgtggatccacaatggcacgtggatcacaatggcacgtggatcaccatggcacgtggatcaccattgtggatcaccatggcacgtggatcacaatggcacgtggatcaccatggcacg

SEQ ID NO: 533469 - DNA, 150 bp, Homo sapiens
ttgggatgcaacgcaggaggattgtttgagcccaggaattcaagatcagtctcggcaacatagtgagaccctcgtctatacgaaaaattaaaaaaagaattagccaggcatggtggtgtgcccctgtggtcctagctacttgggaggctg

SEQ ID NO: 533470 - DNA, 456 bp, Homo sapiens
  misc_feature (62)..(62): n is a, c, g, or t
  misc_feature (89)..(89): n is a, c, g, or t
  misc_feature (113)..(114): n is a, c, g, or t
  misc_feature (123)..(123): n is a, c, g, or t
  misc_feature (250)..(250): n is a, c, g, or t
  misc_feature (278)..(278): n is a, c, g, or t
ggggcacaaaaagggcggggaacaaggggggaaggaaagaggaaaggaaaaacccaaggaangggacaaaaaaaaaaaagcaaaggcgncaaggaaaaaacgggaggcacccnngggggacanacaaggaccaggcagcaaaaaagcaatcggagcaaaaataaaacaaaaagccacaacaaaagaaagccaaaccaatcccccaccaaaaaggaagaaaaaaattgatgtgaagcccatccacccttcnacccaggtgccatagagcaaaggtgacngcagcagtaagtcagagctgaatgacagacaaaaatggaggccagacaccacggtctggaggaagctacgctgaattccagaacccagactctctatgggttaatatcttgtttttcctgagattaaattaagaccagatctcctaggacctagtggacatctggtattattaatctc

SEQ ID NO: 533471 - DNA, 5396 bp, Homo sapiens
  misc_feature (423)..(423): n is a, c, g, or t
atggggtgccagcttcacttctttgataaccacctctgagaccccgtcacacagtactcccagcttcacttcttcaatcagcaccactgagaccacatcccacagtactcccagcttcacttcttcgatcaccaccactgagaccacctcacacagtactcccagcttcacttcttcgatcaccaccaccgagaccacctcacacagtactcccagcttcacttcttcgatcaccaccaccgagaccacctcacacagtactcccagcttcacttcttcgatcaccaccaccgagaccacatcccacagtactcccagcttcacttcttcgatcaggaccactgagaccacctctcatagtactcccagcttcacttcttcgatcatcgccaccgaaaccacctcacacagtactcccagctncacttctttgatccccaccaccgagaccacctcacacagtactcccagcttcacttcttcaatcaccaccactgagaccacctcacacagtactcccagcttcacttcttcgatcaccaccaccgactcgatcgtcaccaccgagaccacatcccacagtactcccagcttcacttcttcaatcagcaccactgagaccacatcccacagtactcccagcttcacttcttcgatcaccatcactgagaccacctcacacagtactcccagctacactacctcaatcaccaccaccgagaccccctcaagcagtactcccagcttcacttcttcgatcaccaccaccgagaccacatcccacagtactcccagcttcacttcttcaatcagcaccactgagaccacatcccacagtactcccagcttcacttcttcgatcaccaccactgagaccacctcacacggtactcccagcttcacttcttcaatcaccaccactgagaccccctcacacagtactcccagcttcacttctttgatcaccaccaccgactcgatcgtcaccaccgagaccacatacgaccacctcacacagtactcccagcttcacttcttcgatcaccaccaccgagaccacctcacacagtactcccagcttcacttctttgatcaccaccactgagaccccgtcacacagtactcccagcttcacttcttcgatcaccaccaccgagaccacctcacacagtactaccagcttcacttcttcgatcaccaccaccgagaccacctcacacagtactcccagcttcagttcttcaatcaccaccactgagacccccttacacagtactcctggcctaccttcgtgggtcaccaccaccaagaccacctcacacattactcctggcctcacttcttcaatcaccaccactgagactacctcacacagtactcccggcttcacttcttcaatcaccaccactggaccacctcacacagtactcccagcctcagttcttcaaccatctactccacagtcagcacatccacaactgccatcacctcacattttactacctcagagactgcggtgactcccacacctgtaaccccatcttctctgagtacagacatcccgaccacatccctaagaactctcaccccattatctttgaacaccagcacttcattgactacaaccacagactttccctctatacccactgatatcagtaccttaccaactcgaacacacatcatttcatcttctccctccatccaaagtacagaaacctcatcccttgtgggcaccacctctcccaccatgtccactgtgagaatgaccctcagaattactgagaacaccccaatcagttcctttagcacaagtattgttgttatacctgaaacccaacaacacagacccctcctgtactgacgtcagccactgggacccaaacatctcctgcacctactactgtcacctttggaagtacggattcctccacgtccactcttcatactcttactccatcaacagccttgagcacgatcgtgtcaacatcacaggttcctattcctagcacacattcctccacccttcaaacaactccttctactccctcattgcaaacttcactcacatctacaagtgagttcactacagaatctttcactaggggaagtacgtctacaaatgcaatcttgacttcttttagtaccatcatctggtcctcaacacccactattatcatgtcctcttctccatcttctgccagcataactccagtgttctccactaccattcattctgttccttcttcaccatacattttcagtacagaaaatgtgggctccgcttctatcacaggctttcctagtctctcttcctctgcaactaccagcacttcttcaaccagctcctctctgaccacagctctcactgaaataacccccttttcttatatttcccttccctccaccacaccctgtccaggaactataacaattaccatagtccctgcctctcccactgatccatgtgttgaaatggatcccagcactgaagctacttctcctcccaccaccccattaacagtctttccctttactaccgaaatggtcacctgtcctacctccatcagtatccaaactactcttactacatatatggacacttcttccatgatgccagaaagtgagtccagcatctcacccaatgcttccagttccactggcactgggactgtacccacaaacacagttttcacaagtactcgactgcccaccagtgagacctggctgagcaacagttctgtgatccccctacctcttcctggcgtctctaccatcccgctcaccatgaaaccaagcagtagcctcccgaccatcctgaggacttcaagcaagtcaacacacccatccccacccaccactaggacttcagagacaccagtggccactacccagactcctaccacccttacatcacgcaggacaactcgcatcacttctcagatgaccacacagtccacgttgaccaccactgcaggcacctgtgacaatggtggcacctgggaacagggccagtgtgcttgccttccggggttttctggggaccgctgtcagctccagaccagatgccagaatgggggtcagtgggatggcctcaaatgccagtgccccagcaccttctatggttccagttgtgagtttgctgtggaacaggtggatctagatgtagtggagaccgaggtgggcatggaagtgtctgtggatcagcagttctcgccggacctcaatgacaacacttcccaggcctacagggatttcaacaagaccttctggaatcagatgcagaagatttttgcagacatgcagggcttcaccttcaagggtgtggagatcctgtccctgaggaatggcagcatcgtggtggactacctggtcctgctggagatgcccttcagcccccagctggagagcgagtatgagcaggtgaagaccacgctgaaggaggggctgcagaacgccagccaggatgtgaacagctgccaggactcccagaccctgtgttttaagcctgactccatcaaggtgaacaacaacagcaagacagagctgaccccggcagccatctgccgccgcgccgctcccacgggctatgaagagttctacttccccttggtggaggccacccggctccgctgtgtcaccaaatgcacgtcgggggtggacaacgccatcgactgtcaccagggccagtgcgttctggagacgagcggtcccacgtgtcgctgctactccaccgacacgcactggttctctggcccgcgctgcgaggtggccgtccactggagggcgctggtcgggggcctgacggccggcgccgcgctgctggtgctgctgctgctggcgctgggcgtccgggcggtgcgctccggatggtggggcggccagcgccgaggccggtcctgggaccaggacaggaaatggttcgagacctgggatgaggaagtcgtgggcactttttcaaactggggtttcgaggacgacggaacagacaaggatacaaatttctatgtggccttggagaacgtggacaccactatgaaggtgcacatcaagagacccgagatgacctcgtcctcagtgtgagccctgcggggccccttcaccaccccctccgccctgccccggacacaagggtctgcattgcgtccatttcaagaggtggccccaggacgcgggcagcccaggctcctgctgttcttgggcaagatgagactgttcccccaaatcccatccttctccttccaacttggctgaaacccacctggagacgcagttcacgtccaggctcttccactgtggaatcttgggcaagtcagtaacgagcctcagtttcctcacctgcaaaacgggtacagcattcctgtatgatagctcacgccgttgttgtgaaaaccacatagacttggtcaattctcggtcctactctgccctcccgtctcagccctcgtgttgccattgcctctctcggatcctccaatcctcacgtccttcacctggtctctggccctggttcttattttctctcaattccctactgcctgtttcttactttgaacctggaggcagcctgcagccccatcccatctcctgccctctcctgatctaactccctgctgcatctcttgctctcattccttagacgtcctccccttttgaccccgttccttcatccatcctgcaccccagtcccccagccctaaatcctccctcctctcctcacatcctggtccctagcaaggtatagatagcctctgtgtcttaggataccccgggtgctgttccctcggtcaccctgttgcccagttccccgtttctcttgctctcattccttgtatcctttccccttttgagcccgtccattcatcggttctgcccccgactcccccagccctaaataccccagctgctgttccccccatcaccctgctgcccaattccccgtttctcttgctctcattccttgtatcttctccccttctgagcctgtccattcatcggtggttctgcccctactcccccagccctaaataccccagctgctgttcctccccatcaccccgctactggattctccatttttattctccacccctttctctcacccctggagccctgcgggtgggggcagggcatgagttccccagtccccaaggaaaggcagccccctcagtctccctcctcctcattcccttccatctccctcccctctgccttttaaacccatcccctccgattcccctcctcccccctctctccctggtgtcaactcgattcctgcggtaactctgagccctgaaatcctcagtctccttggcggggaagattggctttggggacaggaagtcggcacatctccaggtctccatgtgcacaatatagagtttattgtaaaaagc

SEQ ID NO: 533472 - DNA, 131 bp, Homo sapiens
tacctctagtcaccctgacggacctgccgaggaggacacctgcatggccttcagatccatctgcagccggagtgaagctgttcatccgggccctgcttggacccagcaccctcccgagacttcaccccagt

SEQ ID NO: 533473 - DNA, 203 bp, Homo sapiens
aaaaccccccttttttaaaaaaaaatttgggggtttggtttcccctttggggggggggacgccccccccgggtttttttttacccccgaaaaaagggggcccccgggggtgggggggccccccggggaggcggggggggggcccggggtatttccgggggcccggttccccccagggggtttaaaaaaaaaccctttttttta

SEQ ID NO: 533474 - DNA, 105 bp, Homo sapiens
tcggtggccccactccaagccctggagtactccaaggagggctgggagtatgtgacaggcgcgcaccaatgtagcgagtcagcagtgtgcctgccttgcccctgt

SEQ ID NO: 533475 - DNA, 1484 bp, Homo sapiens
  misc_feature (1)..(2): n is a, c, g, or t
  misc_feature (196)..(196): n is a, c, g, or t
  misc_feature (239)..(239): n is a, c, g, or t
  misc_feature (260)..(260): n is a, c, g, or t
  misc_feature (304)..(304): n is a, c, g, or t
  misc_feature (323)..(323): n is a, c, g, or t
  misc_feature (330)..(330): n is a, c, g, or t
  misc_feature (543)..(543): n is a, c, g, or t
nnctctgcgtccttcctgctctttgcctcgtgtttctgttctctcgttgtcatggtagtagagagcagcagataccagaagaatagctgtatagcgtggaggaggtgagagagcagaggcgagacgagcaggaagtggattggattggtgcgtccgactttcagaatcaattcctaggtgccgatgcgctaatgtntaactcgcattgacccgcggtactggtattgacagaccgagcngttgggttctttatgcactangtagtggcgtctgctgcttagcgacacggcggctggtgtgcgtntgctctagctaccgccacnctaagtnggtggtacgatcacgctatgcgaccgacgcgacgcgttggtgcttcgctacgtgatagtatgattatgaattcgtgatcgacgcgggtggtgtcgcgcacagctagctgttgtgttcttctagctcggccctgcttgctctgggatggccgtgagcttagtagatggctctctgtgtgtcctacagcgcggtcactcaaactcttgtctggtngtgtgtcttcctcgccccgccccgcggtgtgtgacaccgtgaggtgtgtgtgtgtcgctggttcaccgcacgagagatagaccacaacgttcttcgtctgggtgtacccagtacattggtgtggtgtgggatccgctgcgtccgctccgggttatatcttgtttcgtcgatcgaaacaaaccaaaaagagggcggttgtcgctttatgtctagttagatgccttgctgccgcatcatccgtaaatacagagggcgtgtttcgagggaacctctgttgtcagaaggtgcgctgtcacacacaggcgcggggaccgttgcatgataataatgtggtcacaccatactggagttttcacaagacaggtgcacctcgcgttatataatggtgccctccccctcccctctcttttagttgcattgtagtaagtaagacatgtgttcccagactctgctgtttgtgacgatcttatatttgctctcctttgtgcatgtgtgatataaaataatatgtaacatgtcagtcctccctctgcgttcccaacaaccgtctttttattgctccccgctgggcagctttcgtgcggcaccgacgtgtgtctaaagagacgggagttcctctgttaataatgaggcgccactctcttacctgcagcagtcgcgccgttttgtggggggcgcgctcacgtgtctctctctcctcgcgccgtgcgtaaattattcttgtcaagcagatagcgaccgcaagagggggggtcgatctattacaataggtgagtcattgggagacatacctccttacttctcctcgaggcctcggctcacaatgaggcccacggggaccccgctcgggtgacagaatgtttcttgctggagcatgttctcttctgtaataaagacattgtttcttcgacaggtcaaatcaaaagaacacaaaatatact

SEQ ID NO: 533476 - DNA, 710 bp, Homo sapiens
  misc_feature (16)..(16): n is a, c, g, or t
  misc_feature (34)..(34): n is a, c, g, or t
  misc_feature (306)..(306): n is a, c, g, or t
  misc_feature (422)..(423): n is a, c, g, or t
  misc_feature (428)..(429): n is a, c, g, or t
gcaccgagcttaattngcccaacacttggggagnggccacttccctttggggggatttttttgcccctgtgaaccctctaagcctttttattttgggaaaaccacctttccaaatttttttgtgttcttttgctcccccaccccccaaatttttttttgggccccgggtttttttttatcgcccgccccccttggtgtcccccccaccagcccccctcctttttttattggggccccccccccccccctttggggggaagaaaaaacccacccccccccctttttctccttttaggagaaaaaaanaaagaggtttttttttttttttttttgtaaaacacccccggggggcaaaaaaaaaaatttttgtgtttaacaaaaaccaaaaattcttttttttgggggggggggggggggggggnnccccnnattccctccccctccccctcctctctttcctgtggtagataaaaaaaaaaaaaaaaagagggtggggggccgccaacaaccaccccccccccttttttttaaaaaaaaaaataaaacccccccccgcccggggggggggggggagggggcctccccccccccccacctttttttttcccccccccccccgcccatgtggttttttttgtttttggcccccccccccccccccgcgggagacgagaaaaaaaccccccccttggtgtggggggcggcgttac

SEQ ID NO: 533477 - DNA, 887 bp, Homo sapiens
agcgggagttacgggtcctccgtacgggaggactagctctgtgtctcggacagcggtgagattaatgagtctgatttatccaactcttgtctcgcggatgtcgccagctcaagagcagtaggcaacgaaatgtgtctagggatgcgtgacatggcagttcttgacgagatgaccccgtattcgtattatactgagatccattcgttgtggctacctgcagaaaagtatgcggacatgattgataagtaaggtttctctggataaccttaggtaagagacttatgctcaggataattctcgtgagtggtacgcagggagacgtctcattacattactgtacgaggtaccatgatatcgtatcggttcgccaagattctttagacttcagtgacatgtatttcatgcatctttccagagtgatgggacctaaatggtgtcgtccatatgagaaaccatatattggcagaaaattacgaacgagaatatcatgtcgttgtgccccctttatgaggaatgggattctcgaaaatgggagattatcaggttattgggtgccttccttctagtgaatgtatctgattcccgagagattaggagaggattgtaacccggtacaaaaggagtgtgtatctaggggcgactcaaaatatcaaaaacgtcaagttcgtaggcattccccaggtagggaacttaaaaagtgaaagactcatgtgaaataggacgacattgcatgaacgaattcgttgactgagatgcgtagcataagcaaaacagaaacattgggctgaatatgcgattcaatgcggttacttcccatggactctgcacgctttccaatgataccactttgaatagattgtttaatattaaacaatgaaacgaaattg

SEQ ID NO: 533478 - DNA, 943 bp, Homo sapiens
gagagaactagtccgagttttatttattttttttaaagggcttgttctatttcaatgggctgatctatgtaatcccagaggccagtttgtccagacaaagtgggaggttgaattcctgggtctcgttcctccttggataaagtctggatgatctcctccttctgggccgtggaggcgctcttcagcgggcgcttgcgtgcttcctgaggtctaagaacctgcgggacctcagccgtggtcagccgaggagcttcttgcgggccttgtctgccttcagcttgtggtttgtgttccatgaaaatccgctggtatttgaacactattcccattcaccttcaggtacaggctgtgatacatgtggcgatcgatacttcttagattcagggtatcttctgagcagccggcgcaaaatcctaattctgctcatccagtgtgaccttctctggcatccgggcattggctgtacccttccgcttacctatgcccatggtgcctgcccttccggggggccaggggtgtttacccggaatcaagcccggaaatggaccgtcaaaaggcttgcggcatgatctagcccatctttgatgagcttccggatctgctgacgggagttggcacttgggggaaatacatgggtcatcatgggggtcaaaccagaacccttcttctgtgccccagtgggaggaaccctagaggcagagcgtcttatgaagcctgagcatacttcatggatgggccggaaaagatgagggcagaggtgaaacgcctgtggaaacacaaaaagggggagactgggcataaccttggcacaaaacaagaacaagaaagccccgggacacgggtgtgcccagagaggcagcggggcccccctagagaccatcccattgtagccatatgaagggcccgaaaatcccaatgggcaatacacaacacataagaggca

SEQ ID NO: 533479 - DNA, 949 bp, Homo sapiens
tgtggaatatggttgtaaagtggagtccatattcctgaacgtggctggtgtgaacacgacaccgggacaggcgctcagaacgtggacatctcaagactccagaggaagcgccttgtacacggtgcctgctcaccagtgaccgatgttcatccactgtgactcactaggtagtgcactgagtctctgacaagagtggggtcattccaggccctccagtgtgtgtgatagtcaccatggccatgccagggtatattcttgaagccacacatggctggacggaacccagtagaccaccctaccccagtccacctggactcttggttgacagtcggagacaaggttgtgcgtggttcctgacctgctgctaagagtcacttgaccagatctgcatctgcatgggctgcgcggaggttgcccagacacagttttcttccggcgacagctcttaggtgttcactctcagccagcctcagttggctttgtgaagtgtgaaaagcctacaatgtgataggacagtgctagcgtgttgatgtacctactgtggcccagctgaccagccatggacctggtgatctccacagggactctacatcctctatgtggccacattcctgagccagaggccaggtctaacatggcgcctgagcctttctgcatgcctctggatgagagggagaacctgttacattctttactagccaggaactagagcccaagcaaaaggagatgtcttcctgggagccattgaccagccgcatgatgttcaatgtaccataagtgtgcggaattcagtaaggcactgagcttcgattcagactttgaatgccacaacgtaagcacagggcaaatgtgcaccccccagtgatgtcccggactcaagtgtcgcgggacgcgtgccggggtcacaggacgggacaaggaacatacaacgagagtatactgtggtacc

SEQ ID NO: 533480 - DNA, 664 bp, Homo sapiens
agcggggtgtagctcccggaatgcggacgcggaacgcagcggaggctagtcgtaacagtcagtccgcagtcgccagtcagtactcttatctatgctcgtaagctgtgcgcggtcgttgaccgaaggattggaggcgctgataatgatgacatcatctcggtgcagctgaagaagacctcagaggtggacctgggcaagccgtggtgaagttcagtgcatgcagactgaatcaatgtggcggggaagatcaggcccacgttactggcgcgcggcgcgaggagactcgtcatatctgagccgcagtcctgcattcggatcgtccgttgtgacaagcactagggacgcgctcaagtaagctcctgatgatattatgagctgtattagttctattgaatctgaaatatgccattggctgaaaatcaggatttgcttgatatattatctggaaggatgcttatgatagaaggttaacttatttggaagggtacatgtaagaaatggctcttgacaggcttagagatatgaaaagaggtgtgtgttgtttaatggtgtgatcttagctagcaagagtagacagtaggaacagaacactggatataggatgaaggagtggaaaatcgatgtctaaggatatactagtctgtagtggtggcattaacatatt

SEQ ID NO: 533481 - DNA, 458 bp, Homo sapiens
tgataatggaaaacgttctttatagtaatagggtaaatgaagagagtaaactcaacgaaccaggagttctttaataatttgtattcattaaagatttgggatagattttagtttggaatggaatattcatgtgtcacactgaggatcaggtattgggcagttcccttgacagggtttcctttagcctaataataataataattcacaagagaggtaaggaaaaaattctaggccgggcacggtggcttacacctgtaatcccagcacttggggaggctgaggtgggctaatcatgaggtcaggagctcgagaccagcctggccaacatggtgaaaccccatgtctaataaaaaaacaaaagttaaccaggcatggtggcatgcgcctgtaatcgcagctacttgggaggctgaggcaggagaatggcttgaacctgggaggcgtaggttgtggtgagc

SEQ ID NO: 533482 - DNA, 146 bp, Homo sapiens
ctataaggcagtgtcgggcacactcaaccctactgagcacactccagcggggtaagatggtggcacttggtatattaagtgtatttacctcagtactttaaaaggaaagggaaaatatcagctcaataaagtgaccttggaaaaaa

SEQ ID NO: 533483 - DNA, 226 bp, Homo sapiens
gaggagtatctacaaaccacagagacctcggaacacatatacctattattcggcgcatgagcggccggtcctaggcacagctctaagccctccttattgcgagccgagcgtgggccagccaggcaaccttctagggtacgaccacatctacgacgttatcgtcacagcccatgcatttgtaaataatccgtcttcatagtaatacccatttcataatcggaggctt

SEQ ID NO: 533484 - DNA, 367 bp, Homo sapiens
aaaaaaaaaaaaggggggtttttccccccaccccctggttttttggcagggggctggggggccggattcccggaaattcccccgggggaaaccgggttttaaaatttccctattcccaggaaccccgggttttttttaccccctaataaaattggggccggcgggggcccccccccggggttgggggggaaaactttttggtttttcccctgggaaaaaccggggggggaaggggttttttgggtgggccgggggcggtggggggcccccccctttttttttttggggcccccgcccttgggggggggttttttttcccgggggggccccccctttccccccaaaaaataaaaatttttttggttta

SEQ ID NO: 533485 - DNA, 181 bp, Homo sapiens
accccagagtctcgctcgtctaccagagcgtgcactttgatcctaaaataagcttcatctccgggctgcgccctggagtgcagggggcaggattcgtgcagctgctttggctttctcttcctaaatttcattgtgtgagtttctttccttcccaataggtgatcttaattactttcagaat

SEQ ID NO: 533486 - DNA, 247 bp, Homo sapiens
gtcgactgatgactaagcatataagcctatgggagctattttttttctgaaccaccatatacagtgtaaaacctaaggccctgattctctacttgcggctgcgtaatcctcccttatgtgggtctcactggatgccccagtgctcctgctccttcagctgtgaaacttttcttttctttgcccctccttggactgaagtgtggctattgtttcgcctctgacctttcaaggggagctatagtcgacg

SEQ ID NO: 533487 - DNA, 187 bp, Homo sapiens
ctagtagagagggcaggactatcttcagctcccagttggatggttacagcagcatgtagagacccacatcacgaacttctgctccaacaactaccacaagaacataccaggaaagccgagataatccacagaccctttgaaggagctggattgctgctgtaggctctgtgggacagccaaggaactc

SEQ ID NO: 533488 - DNA, 339 bp, Homo sapiens
agatggagtctcactctgttgctcaggctggagtgcagtggcaccatcttggctcaccacaacctccgcctcccggattcaagccattctcctgcctcagcctcccgagtaactgggattacaggcttgtgccaccgcacccagctaatttttgtaattttagtcgagagaaggtgtcaccatgttagccaggcttgtcttgaactcctgaccttgagatatctgcccacctcagcctctcaaagtgctgggattataggcttgagccaccacggctggatgaatcataaattgtaaacctgaataaaatgctgcaacctccaatgagaggaaaataaa

SEQ ID NO: 533489 - DNA, 109 bp, Homo sapiens
gatctctgcaggagagagaactgtaatacccaatgtacacttccacaacggctaaaataggctcaatgtcactattaaagtgataaagtggaggtccgtggggcgaaaa

SEQ ID NO: 533490 - DNA, 227 bp, Homo sapiens
tggcccgccttgtaggcatcctttataaggaccatttctgttcctagagcttactagaattcattcttcactgaaaaaaaaaaaatttacttaagaaagcttttctttcctaattctcactcaattttgcagaatttatttgtaattagtattacaaattctggccaaaaggagacttgtaattagcgtaaagtgattgttccccgcttgggattccttcttaaagt

SEQ ID NO: 533491 - DNA, 182 bp, Homo sapiens
ctccagtgtcccatgcatctccatgcgatctcccgatctcctccatcttgtcttgatccaggcccgatgccatatgtcctgggctccaccctgcttgcgtacgcctctcattgtgcttgttgtcgtgcatgctcctcctgtccgagccttgtgtcgctccgatgtgcaccactgcttgcctg

SEQ ID NO: 533492 - DNA, 1217 bp, Homo sapiens
gcgtgtgcgctacggtgtgcgtttggcgagcttgtctggccttctacgcgcctgttggggggtgtattcacgtttctggctttggacaatcttttcaagccgtgtcccctcttgcgggtttacccccccctgcccctcgcgcggtgttgttcctccggggtgtttccctccacccccctgcccgggggggtccccccgcggtccccaggaagatattggaaaagggcgccccgcgggatggcccctatgtgccccgggggccacacccgcccccacaacagagttccgcgcgggggttcccccagggcgacccattgggggcccaaaacccccaggacatacgggacacgggggccccccccccgggaagaagaggcttggggccccccccttcgagattccatttttgaggaactttgggggtgccgttttttatgggggccaccgagcccccccagagctgtcccccacggccccccctcttagtgtgggccgccgttcacaatggtgttacttcgctccccggggggccccatacctccggtgtcactccaatccgctgggaccccccaaggcctccaagctccaggcccacagcccccgaaaaggggaaggggaaagggctttaacgccccacgcccctggatccccacaggaggccccccctgggtgacaccaaggggcctcggcgccaacagccctccctctttccccgggcccggaattggggcccccccccggcgtctttctgttggtcttttatagggctttatccgcacttcaatggcgcccgcccttgtccctctttcactctcccccccgcgcccaccccgcccacaaggcccccaaatatgggggagggacccacggggtttctggggaagctctgagagccctcccccccagcccacattggaggtgccccgagagccccctcttttgtttttttccccccacactttccctcttatttaagagaacacccccccaataaccgaactttttccccccccacaaaaaaaaaaaaaaaaaaaaaaaaaggtggcgcaccaccctcgtgagttcccggctatacttcgagaaggctgaggccacagttcgaggagggcttgaggccacggagaattgcttgatcccggggggcggagggtgccgatgagactgagatagcaccccgtgcactcccagcatgggcgaccagaaccggatggtttcca

SEQ ID NO: 533493 - DNA, 3965 bp, Homo sapiens
cgggacgctcctcacttcctagatgggatggcggccgggaagaggcgctcctcatttcctagatgggatggcggccgggcagagatgctcctcactttcctccagccgcgagaccccctccccttccgcctcgcggcgcttcctcgctccgcggtcttctctctccacccccgacaccgcggggctccccccgcccgcccacggcgggccccggctgcccgatccccctcgcttcccgcgctctccagcggggccccagccccggccccctctctccctcccttctctctaattccccttccggacgctgccatcatgttgaagcctcagccgctacaacagccctcccagccccagcagccgccccccacgcaacaggccgtggcccgtcggccccccgggggcaccagccctcccaacggcggcctcccggggccgctggccacctctgcggctcctcccgggcctccagcggccgcctccccctgcctggggcctgtggccgctgccgggagcgggctccgccggggagccgaaggcatcttggcgccgcagccgccgccgccgcagcaacaccaggagaggccgggggcagccgccatcggcagcgccaggggacagagcacaggaaagggacccccacagtcacctgtgtttgaaggcgtctacaacaattccagaatgctgcatttccttacagctgttgtgggctccacttgtgatgtaaaggtgaaaaatggtaccacttatgagggtatcttcaagacgctaagctcaaagtttgaactagccgtggatgctgtgcaccggaaagcatctgagccagcaggtggccctcgtcgggaggacattgtggacaccatggtgtttaagccaagtgatgtcatgcttgttcacttccgaaatgttgacttcaactatgctactaaagacaagttcaccgattcagccattgccatgaactcgaaagtgaatggggaacacaaagagaaggtgcttcagcgctgggaggggggtgacagcaacagcgacgactatgacctcgagtctgacatgtccaatggatgggaccccaatgaaatgttcaagttcaatgaggagaactacggtgtgaagactacctatgatagcagtctttcttcttatacggtgcccttagaaaaggacaactcagaagagtttcgtcagcgagagctgcgtgcggcccagttggctcgagagattgaatcaagcccccagtaccgcctacggatcgccatggagaacgacgatgggcgcactgaagaggagaagcacagtgcagtccagcggcagggctcagggcgggagagccccagcttggcatccagggaggggaagtatatccctctgcctcaacgagtccgggaaggtccccggggaggagttcgatgcagcagctctcggggcggtcggcctggccttagctctttgccacctcgtggccctcaccatctggacaacagcagccctggcccaggttctgaggcccgtggtatcaatggaggcccttcccgcatgtccccaaaggcacagcggcctctgagaggtgccaagactctgtcttcgcccagtaataggccttctggagaaacttctgttccacctcctcctgcagtgggccggatgtatcccccgcgttctcccaagtctgctgcccctgccccaatctcagcttcctgtccagagcctcccatcggctcggcagtgccaacctcttcagcctccatccctgtgacctcatcagtctcagatcctggagtgggctccatttctccagcttctccaaagatctccctggcccccacagatgtaaaagaactctctaccaaggaacctgggagaactctggagccccaggagctggctcggatagctgggaaagtccctggtcttcagaatgaacagaaacgattccaactggaagaactgagaaagtttggggcccagtttaagcttcagcccagtagctcccctgagaacagcctggatccttttcctccccggatcttaaaggaggagcccaaaggaaaggagaaagaggttgatggtctgttgacttcagagcccatggggtctcccgtctcctccaagacagagtccgtatcggataaggaggacaaaccacccctggcaccatcaggaggcactgaggggccagagcagcccccaccaccttgtccaagccaaactggcagccccccggtgggcctcatcaagggagaagacaaagatgagggccctgttgctgaacaagtaaagaaatcaacgttgaaccctaatgctaaggagttcaatcctacaaagcctctgctgtctgtgaataaatccaccagtaccccaacttctccggggccccggactcattcaactccctccatcccggtgctgacagcaggccagagtgggctatacagcccccagtacatctcctacatacctcagatccacatgggaccagctgtgcaggcacctcagatgtatccatatcctgtatccaattcagtgcctgggcagcagggcaagtaccggggagcaaaaggctcccttcctccgcagcgctcggaccaacaccagccagcctcagccccgccgatgatgcaggccgccgcggctgctggcccgcctctggtggctgccacgccctattcttcctacatcccctacaaccctcagcagttcccaggccagccagccatgatgcagcccatggcccactacccctcacagccggtgtttgcccccatgcttcagagcaacccacgcatgctgacgtcgggcagccatccccaggccatcgtgtcatcctctacccctcagtacccttctgcagagcagcctaccccccaagccctttatgccactgttcaccagtcctacccacaccatgccacacagctccatgcccaccagccgcagccggctaccacgcctactggaagccagccgcagtcccagcatgcggcccccagtcctgtccagcatcaggcggggcaggccccacacttgggcagtggacagccacagcagaatctgtaccacccaggggccctgacaggcacgccgccctctctgccaccgggaccttctgcccagtcccctcagagcagcttcccccagccagccgctgtgtatgccatccaccaccagcagctgccccacggcttcaccaacatggcccatgttacccaggcccatgtccaaactggaatcacagcagccccgccccctcaccctggggctccccacccgccccaggtgatgctgctgcacccaccccagagtcatggggggcccccccaaggcgcggtgccccagagtggggtgcctgcactctcagcttccacaccctcaccctacccctacatcggacacccccaaggtgagcagcctggccaggcgcctggatttccaggaggagccgatgacaggattcagttcaatctcatccctcccagcagctccccttccaccccccggggaactgaagattgtcctggccgcgacctgagacctccatgagtggagggaagagtgatctatgtctcttcccccagcagctcggaccactcccagccccccatccccccgttccccaggggagctggggaattcctgccaagcaccttgaatgggaggggcctcacagagggcagggccagggtccagcaggggtggggggttcctgctctgcccctgcccgtccccacccagtcttgccctcccatcctctcatctattcccccgctggagacggaagatcttttattttctattatttataacttcagacttgggccccctgttctttctttcccattaacttgagtgacctgtgtgagagacagacagatgccccacgaggatggctggacaaggacttttactttttattacataaaaatattaaaaaataaataaaaaaaataaaattttaaactaactta

SEQ ID NO: 533494 - DNA, 156 bp, Homo sapiens
gaccccggacggttatcgcgaccggcaaccccccgatcgacgggaaagacggggcgatcgaatttgcgtacagcatggaagaagctgcgcgcaagccgatggagctggaggacggtacggtagattataaagaaatcatccggctgaaaaacgtca

SEQ ID NO: 533495 - DNA, 4209 bp, Homo sapiens
cgggacgctcctcacttcctagatgggatggcggccgggaagaggcgctcctcatttcctagatgggatggcggccgggcagagatgctcctcactttcctccagccgcgagaccccctccccttccgcctcgcggcgcttcctcgctccgcggtcttctctctccacccccgacaccgcggggctccccccgcccgcccacggcgggccccggctgcccgatccccctcgcttcccgcgctctccagcggggccccagccccggccccctctctccctcccttctctctaattccccttccggacgctgccatcatgttgaagcctcagccgctacaacagccctcccagccccagcagccgccccccacgcaacaggccgtggcccgtcggccccccgggggcaccagccctcccaacggcggcctcccggggccgctggccacctctgcggctcctcccgggcctccagcggccgcctccccctgcctggggcctgtggccgctgccgggagcgggctccgccggggagccgaaggcatcttggcgccgcagccgccgccgccgcagcaacaccaggagaggccgggggcagccgccatcggcagcgccaggggacagagcacaggaaagggacccccacagtcacctgtgtttgaaggcgtctacaacaattccagaatgctgcatttccttacagctgttgtgggctccacttgtgatgtaaaggtgaaaaatggtaccacttatgagggtatcttcaagacgctaagctcaaagtttgaactagccgtggatgctgtgcaccggaaagcatctgagccagcaggtggccctcgtcgggaggacattgtggacaccatggtgtttaagccaagtgatgtcatgcttgttcacttccgaaatgttgacttcaactatgctactaaagacaagttcaccgattcagccattgccatgaactcgaaagtgaatggggaacacaaagagaagtccaatggatgggaccccaatgaaatgttcaagttcaatgaggagaactacggtgtgaagactacctatgatagcagtctttcttcttatacggtgcccttagaaaaggacaactcagaagagtttcgtcagcgagagctgcgtgcggcccagttggctcgagagattgaatcaagcccccagtaccgcctacggatcgccatggagaacgacgatgggcgcactgaagaggagaagcacagtgcagtccagcggcagggctcagggcgggagagccccagcttggcatccagggaggggaagtatatccctctgcctcaacgagtccgggaaggtccccggggaggagttcgatgcagcagctctcggggcggtcggcctggccttagctctttgccacctcgtggccctcaccatctggacaacagcagccctggcccaggttctgaggcccgtggtatcaatggaggcccttcccgcatgtccccaaaggcacagcggcctctgagaggtgccaagactctgtcttcgcccagtaataggccttctggagaaacttctgttccacctcctcctgcagtgggccggatgtatcccccgcgttctcccaagtctgctgcccctgccccaatctcagcttcctgtccagagcctcccatcggctcggcagtgccaacctcttcagcctccatccctgtgacctcatcagtctcagatcctggagtgggctccatttctccagcttctccaaagatctccctggcccccacagatgtaaaagaactctctaccaaggaacctgggagaactctggagccccaggagctggctcggatagctgggaaagtccctggtcttcagaatgaacagaaacgattccaactggaagaactgagaaagtttggggcccagtttaagcttcagcccagtagctcccctgagaacagcctggatccttttcctccccggatcttaaaggaggagcccaaaggaaaggagaaagaggttgatggtctgttgacttcagagcccatggggtctcccgtctcctccaagacagagtccgtatcggataaggaggacaaaccacccctggcaccatcaggaggcactgaggggccagagcagcccccaccaccttgtccaagccaaactggcagccccccggtgggcctcatcaagggagaagacaaagatgagggccctgttgctgaacaagtaaagaaatcaacgttgaaccctaatgctaaggagttcaatcctacaaagcctctgctgtctgtgaataaatccaccagtaccccaacttctccggggccccggactcattcaactccctccatcccggtgctgacagcaggccagagtgggctatacagcccccagtacatctcctacatacctcagatccacatgggaccagctgtgcaggcacctcagatgtatccatatcctgtatccaattcagtgcctgggcagcagggcaagtaccggggagcaaaaggctcccttcctccgcagcgctcggaccaacaccagccagcctcagccccgccgatgatgcaggccgccgcggctgctggcccgcctctggtggctgccacgccctattcttcctacatcccctacaaccctcagcagttcccaggccagccagccatgatgcagcccatggcccactacccctcacagccggtgtttgcccccatgcttcagagcaacccacgcatgctgacgtcgggcagccatccccaggccatcgtgtcatcctctacccctcagtacccttctgcagagcagcctaccccccaagccctttatgccactgttcaccagtcctacccacaccatgccacacagctccatgcccaccagccgcagccggctaccacgcctactggaagccagccgcagtcccagcatgcggcccccagtcctgtccagcatcaggcggggcaggccccacacttgggcagtggacagccacagcagaatctgtaccacccaggggccctgacaggcacgccgccctctctgccaccgggaccttctgcccagtcccctcagagcagcttcccccagccagccgctgtgtatgccatccaccaccagcagctgccccacggcttcaccaacatggcccatgttacccaggcccatgtccaaactggaatcacagcagccccgccccctcaccctggggctccccacccgccccaggtgatgctgctgcacccaccccagagtcatggggggcccccccaaggcgcggtgccccagagtggggtgcctgcactctcagcttccacaccctcaccctacccctacatcggacacccccaaggtgagcagcctggccaggcgcctggatttccaggaggagccgatgacaggattcgtgagttctcattagctgggggaatttggcatggaagagctgaggggctgcaggtggggcaggatgcacgggttctgggtggggagtgaggggtcttggaggcagggctgtcccacagggcgcccgccgacctgcacctgtctgtgaagtatgtagggtgggcagaagccacagtcgccgccgccaggggcttgctcctggctctgtcctttgcttccctccgtcctcgctcagttgtgatccagcagcccccctccccactgcctccccagctctcagtgaccccgactgtctcctgacttagccgagttcaatctcatccctcccagcagctccccttccaccccccggggaactgaagattgtcctggccgcgacctgagacctccatgagtggagggaagagtgatctatgtctcttcccccagcagctcggaccactcccagccccccatccccccgttccccaggggagctggggaattcctgccaagcaccttgaatgggaggggcctcacagagggcagggccagggtccagcaggggtggggggttcctgctctgcccctgcccgtccccacccagtcttgccctcccatcctctcatctattcccccgctggagacggaagatcttttattttctattatttataacttcagacttgggccccctgttctttctttcccattaacttgagtgacctgtgtgagagacagacagatgccccacgaggatggctggacaaggacttttactttttattacataaaaatattaaaaaataaataaaaaaaataaaattttaaactaactta

SEQ ID NO: 533496 - DNA, 4201 bp, Homo sapiens
cgggacgctcctcacttcctagatgggatggcggccgggaagaggcgctcctcatttcctagatgggatggcggccgggcagagatgctcctcactttcctccagccgcgagaccccctccccttccgcctcgcggcgcttcctcgctccgcggtcttctctctccacccccgacaccgcggggctccccccgcccgcccacggcgggccccggctgcccgatccccctcgcttcccgcgctctccagcggggccccagccccggccccctctctccctcccttctctctaattccccttccggacgctgccatcatgttgaagcctcagccgctacaacagccctcccagccccagcagccgccccccacgcaacaggccgtggcccgtcggccccccgggggcaccagccctcccaacggcggcctcccggggccgctggccacctctgcggctcctcccgggcctccagcggccgcctccccctgcctggggcctgtggccgctgccgggagcgggctccgccggggagccgaaggcatcttggcgccgcagccgccgccgccgcagcaacaccaggagaggccgggggcagccgccatcggcagcgccaggggacagagcacaggaaagggacccccacagtcacctgtgtttgaaggcgtctacaacaattccagaatgctgcatttccttacagctgttgtgggctccacttgtgatgtaaaggtgaaaaatggtaccacttatgagggtatcttcaagacgctaagctcaaagtttgaactagccgtggatgctgtgcaccggaaagcatctgagccagcaggtggccctcgtcgggaggacattgtggacaccatggtgtttaagccaagtgatgtcatgcttgttcacttccgaaatgttgacttcaactatgctactaaagacaagttcaccgattcagccattgccatgaactcgaaagtgaatggggaacacaaagagaaggtgcttcagcgctgggaggggggtgacagcaacagcgacgactatgacctcgagtctgacatgtccaatggatgggaccccaatgaaatgttcaagttcaatgaggagaactacggtgtgaagactacctatgatagcagtctttcttcttatacggtgcccttagaaaaggacaactcagaagagtttcgtcagcgagagctgcgtgcggcccagttggctcgagagattgaatcaagcccccagtaccgcctacggatcgccatggagaacgacgatgggcgcactgaagaggagaagcacagtgcagtccagcggcagggctcagggcgggagagccccagcttggcatccagggaggggaagtatatccctctgcctcaacgagtccgggaaggtccccggggaggagttcgatgcagcagctctcggggcggtcggcctggccttagctctttgccacctcgtggccctcaccatctggacaacagcagccctggcccaggttctgaggcccgtggtatcaatggaggcccttcccgcatgtccccaaaggcacagcggcctctgagaggtgccaagactctgtcttcgcccagtaataggccttctggagaaacttctgttccacctcctcctgcagtgggccggatgtatcccccgcgttctcccaagtctgctgcccctgccccaatctcagcttcctgtccagagcctcccatcggctcggcagtgccaacctcttcagcctccatccctgtgacctcatcagtctcagatcctggagtgggctccatttctccagcttctccaaagatctccctggcccccacagatagtccctggtcttcagaatgaacagaaacgattccaactggaagaactgagaaagtttggggcccagtttaagcttcagcccagtagctcccctgagaacagcctggatccttttcctccccggatcttaaaggaggagcccaaaggaaaggagaaagaggttgatggtctgttgacttcagagcccatggggtctcccgtctcctccaagacagagtccgtatcggataaggaggacaaaccacccctggcaccatcaggaggcactgaggggccagagcagcccccaccaccttgtccaagccaaactggcagccccccggtgggcctcatcaagggagaagacaaagatgagggccctgttgctgaacaagtaaagaaatcaacgttgaaccctaatgctaaggagttcaatcctacaaagcctctgctgtctgtgaataaatccaccagtaccccaacttctccggggccccggactcattcaactccctccatcccggtgctgacagcaggccagagtgggctatacagcccccagtacatctcctacatacctcagatccacatgggaccagctgtgcaggcacctcagatgtatccatatcctgtatccaattcagtgcctgggcagcagggcaagtaccggggagcaaaaggctcccttcctccgcagcgctcggaccaacaccagccagcctcagccccgccgatgatgcaggccgccgcggctgctggcccgcctctggtggctgccacgccctattcttcctacatcccctacaaccctcagcagttcccaggccagccagccatgatgcagcccatggcccactacccctcacagccggtgtttgcccccatgcttcagagcaacccacgcatgctgacgtcgggcagccatccccaggccatcgtgtcatcctctacccctcagtacccttctgcagagcagcctaccccccaagccctttatgccactgttcaccagtcctacccacaccatgccacacagctccatgcccaccagccgcagccggctaccacgcctactggaagccagccgcagtcccagcatgcggcccccagtcctgtccagcatcaggcggggcaggccccacacttgggcagtggacagccacagcagaatctgtaccacccaggggccctgacaggcacgccgccctctctgccaccgggaccttctgcccagtcccctcagagcagcttcccccagccagccgctgtgtatgccatccaccaccagcagctgccccacggcttcaccaacatggcccatgttacccaggcccatgtccaaactggaatcacagcagccccgccccctcaccctggggctccccacccgccccaggtgatgctgctgcacccaccccagagtcatggggggcccccccaaggcgcggtgccccagagtggggtgcctgcactctcagcttccacaccctcaccctacccctacatcggacacccccaaggtgagcagcctggccaggcgcctggatttccaggaggagccgatgacaggattcgtgagttctcattagctgggggaatttggcatggaagagctgaggggctgcaggtggggcaggatgcacgggttctgggtggggagtgaggggtcttggaggcagggctgtcccacagggcgcccgccgacctgcacctgtctgtgaagtatgtagggtgggcagaagccacagtcgccgccgccaggggcttgctcctggctctgtcctttgcttccctccgtcctcgctcagttgtgatccagcagcccccctccccactgcctccccagctctcagtgaccccgactgtctcctgacttagccgagttcaatctcatccctcccagcagctccccttccaccccccggggaactgaagattgtcctggccgcgacctgagacctccatgagtggagggaagagtgatctatgtctcttcccccagcagctcggaccactcccagccccccatccccccgttccccaggggagctggggaattcctgccaagcaccttgaatgggaggggcctcacagagggcagggccagggtccagcaggggtggggggttcctgctctgcccctgcccgtccccacccagtcttgccctcccatcctctcatctattcccccgctggagacggaagatcttttattttctattatttataacttcagacttgggccccctgttctttctttcccattaacttgagtgacctgtgtgagagacagacagatgccccacgaggatggctggacaaggacttttactttttattacataaaaatattaaaaaataaataaaaaaaataaaattttaaactaactta

SEQ ID NO: 533497 - DNA, 893 bp, Homo sapiens
tcccccccctcttctttcccctttacgctctaatcccccccccctagaggtcattttggcactgttggaacactccttgagctgttgaagatcccgtgatcattacctggggaggggttcctgaaaccttccacatcgggatctgcggactttcatttttctaagagacttactcaatcccatgcatgcactacctcacccaccgtgagaaaggacaggcgcctctccctcacacatcactcataaattttcagcacttcatctttccccacccaccccgaaggacaactatcctacaatacatcccccacccccccccctcgactactccccccacaggacccgtacgttcataccgacgccctccacccatctcaccactacgtccctctcctctctttcccgctcccgccccactaccacctgcgtcatccccgcccactacccgatacgtggacattagtcaccgctgagaagttcacatagcccttcctcctccccgatcttatcaccacacaaaccactatccccactcgctagcttaaccagtcgtttcctcccccctattctcccccacatttactatatctcaacctctcccttccaacccattacttctcctctttctcaacctctcccctttccctctctccgtaagcccccctcacccacatcgatatcctatacgcatacttctttcatcctcctctttacccctccctcaacttcccccacccctctaatcctttattgatactcatcttcaccccttcacactttcttcttttaccacactattgtgctacatctcctttatactctcccccatacatttcctttatccccacactctcccttctgtcccatatcttcctatcaatatctctatttct

SEQ ID NO: 533498 - DNA, 4070 bp, Homo sapiens
cgggacgctcctcacttcctagatgggatggcggccgggaagaggcgctcctcatttcctagatgggatggcggccgggcagagatgctcctcactttcctccagccgcgagaccccctccccttccgcctcgcggcgcttcctcgctccgcggtcttctctctccacccccgacaccgcggggctccccccgcccgcccacggcgggccccggctgcccgatccccctcgcttcccgcgctctccagcggggccccagccccggccccctctctccctcccttctctctaattccccttccggacgctgccatcatgttgaagcctcagccgctacaacagccctcccagccccagcagccgccccccacgcaacaggccgtggcccgtcggccccccgggggcaccagccctcccaacggcggcctcccggggccgctggccacctctgcggctcctcccgggcctccagcggccgcctccccctgcctggggcctgtggccgctgccgggagcgggctccgccggggagccgaaggcatcttggcgccgcagccgccgccgccgcagcaacaccaggagaggccgggggcagccgccatcggcagcgccaggggacagagcacaggaaagggacccccacagtcacctgtgtttgaaggcgtctacaacaattccagaatgctgcatttccttacagctgttgtgggctccacttgtgatgtaaaggtgaaaaatggtaccacttatgagggtatcttcaagacgctaagctcaaagtttgaactagccgtggatgctgtgcaccggaaagcatctgagccagcaggtggccctcgtcgggaggacattgtggacaccatggtgtttaagccaagtgatgtcatgcttgttcacttccgaaatgttgacttcaactatgctactaaagacaagttcaccgattcagccattgccatgaactcgaaagtgaatggggaacacaaagagaaggtgcttcagcgctgggaggggggtgacagcaacagcgacgactatgacctcgagtctgacatgtccaatggatgggaccccaatgaaatgttcaagttcaatgaggagaactacggtgtgaagactacctatgatagcagtctttcttcttatacggtgcccttagaaaaggacaactcagaagagtttcgtcagcgagagctgcgtgcggcccagttggctcgagagattgaatcaagcccccagtaccgcctacggatcgccatggagaacgacgatgggcgcactgaagaggagaagcacagtgcagtccagcggcagggctcagggcgggagagccccagcttggcatccagggaggggaagtatatccctctgcctcaacgagtccgggaaggtccccggggaggagttcgatgcagcagctctcggggcggtcggcctggccttagctctttgccacctcgtggccctcaccatctggacaacagcagccctggcccaggttctgaggcccgtggtatcaatggaggcccttcccgcatgtccccaaaggcacagcggcctctgagaggtgccaagactctgtcttcgcccagtaataggccttctggagaaacttctgttccacctcctcctgcagtgggccggatgtatcccccgcgttctcccaagtctgctgcccctgccccaatctcagcttcctgtccagagcctcccatcggctcggcagtgccaacctcttcagcctccatccctgtgacctcatcagtctcagatcctggagtgggctccatttctccagcttctccaaagatctccctggcccccacagatgtaaaagaactctctaccaaggaacctgggagaactctggagccccaggagctggctcggatagctgggaaagtccctggtcttcagaatgaacagaaacgattccaactggaagaactgagaaagtttggggcccagtttaagcttcagcccagtagctcccctgagaacagcctggatccttttcctccccggatcttaaaggaggagcccaaaggaaaggagaaagaggttgatggtctgttgacttcagagcccatggggtctcccgtctcctccaagacagagtccgtatcggataaggaggacaaaccacccctggcaccatcaggaggcactgaggggccagagcagcccccaccaccttgtccaagccaaactggcagccccccggtgggcctcatcaagggagaagacaaagatgagggccctgttgctgaacaagtaaagaaatcaacgttgaaccctaatgctaaggagttcaatcctacaaagcctctgctgtctgtgaataaatccaccagtaccccaacttctccggggccccggactcattcaactccctccatcccggtgctgacagcaggccagagtgggctatacagcccccagtacatctcctacatacctcagatccacatgggaccagctgtgcaggcacctcagatgtatccatatcctgtatccaattcagtgcctgggcagcagggcaagtaccggggagcaaaaggctcccttcctccgcagcgctcggaccaacaccagccagcctcagccccgccgatgatgcaggccgccgcggctgctggcccgcctctggtggctgccacgccctattcttcctacatcccctacaaccctcagcagttcccaggccagccagccatgatgcagcccatggcccactacccctcacagccggtgtttgcccccatgcttcagagcaacccacgcatgctgacgtcgggcagccatccccaggccatcgtgtcatcctctacccctcagtacccttctgcagagcagcctaccccccaagccctttatgccactgttcaccagtcctacccacaccatgccacacagctccatgcccaccagccgcagccggctaccacgcctactggaagccagccgcagtcccagcatgcggcccccagtcctgtccagcatcaggcggggcaggccccacacttgggcagtggacagccacagcagaatctgtaccacccaggggccctgacaggcacgccgccctctctgccaccgggaccttctgcccagtcccctcagagcagcttcccccagccagccgctgtgtatgccatccaccaccagcagctgccccacggcttcaccaacatggcccatgttacccaggcccatgtccaaactggaatcacagcagccccgccccctcaccctggggctccccacccgccccaggtgatgctgctgcacccaccccagagtcatggggggcccccccaaggcgcggtgccccagagtggggtgcctgcactctcagcttccacaccctcaccctacccctacatcggacacccccaaagtatgtagggtgggcagaagccacagtcgccgccgccaggggcttgctcctggctctgtcctttgcttccctccgtcctcgctcagttgtgatccagcagcccccctccccactgcctccccagctctcagtgaccccgactgtctcctgacttagccgagttcaatctcatccctcccagcagctccccttccaccccccggggaactgaagattgtcctggccgcgacctgagacctccatgagtggagggaagagtgatctatgtctcttcccccagcagctcggaccactcccagccccccatccccccgttccccaggggagctggggaattcctgccaagcaccttgaatgggaggggcctcacagagggcagggccagggtccagcaggggtggggggttcctgctctgcccctgcccgtccccacccagtcttgccctcccatcctctcatctattcccccgctggagacggaagatcttttattttctattatttataacttcagacttgggccccctgttctttctttcccattaacttgagtgacctgtgtgagagacagacagatgccccacgaggatggctggacaaggacttttactttttattacataaaaatattaaaaaataaataaaaaaaataaaattttaaactaactta

SEQ ID NO: 533499 - DNA, 254 bp, Homo sapiens
cacggatcaagaggtgaattcaaatgggaaactgatcctcttactgtatatatataactggacataaaagagaaaaggtatgagagtctgaaaaggtctggcttccaggttcagccatgaaccttagtgagctgtgtgatgctggcaaggttactctacctttctggatggtactttcttcaattatgataaagtgcggtgtctgatgaggtaaatacagagattatatccagcacaaaattcccgaagtctca

SEQ ID NO: 533500 - DNA, 3231 bp, Homo sapiens
  misc_feature (66)..(66): n is a, c, g, or t
  misc_feature (92)..(92): n is a, c, g, or t
  misc_feature (102)..(102): n is a, c, g, or t
  misc_feature (131)..(131): n is a, c, g, or t
  misc_feature (134)..(134): n is a, c, g, or t
tgtgctgcggtgatctagaggatcccttggggctcattcagggagaagacaagatgagggcctgtngctgaacaagtaaagaaatcaacgtngaaccctaangctaaggagttcaatcctacaaagcctcngcngtctgtgaataaatccaccagtaccccaacttctccggggccccggactcattcaagcccccagtaccgcctacggatcgccatggagaacgacgatgggcgcactgaagaggagaagcacagtgcagtccagcggcagggctcagggcgggagagccccagcttggcatccagggaggggaagtatatccctctgcctcaacgagtccgggaaggtccccggggaggagttcgatgcagcagctctcggggcggtcggcctggccttagctctttgccacctcgtggccctcaccatctggacaacagcagccctggcccaggttctgaggcccgtggtatcaatggaggcccttcccgcatgtccccaaaggcacagcggcctctgagaggtgccaagactctgtcttcgcccagtaataggccttctggagaaacttctgttccacctcctcctgcagtgggccggatgtatcccccgcgttctcccaagtctgctgcccctgccccaatctcagcttcctgtccagagcctcccatcggctcggcagtgccaacctcttcagcctccatccctgtgacctcatcagtctcagatcctggagtgggctccatttctccagcttctccaaagatctccctggcccccacagatgtaaaagaactctctaccaaggaacctgggagaactctggagccccaggagctggctcggatagctgggaaagtccctggtcttcagaatgaacagaaacgattccaactggaagaactgagaaagtttggggcccagtttaagcttcagcccagtagctcccctgagaacagcctggatccttttcctccccggatcttaaaggaggagcccaaaggaaaggagaaagaggttgatggtctgttgacttcagagcccatggggtctcccgtctcctccaagacagagtccgtatcggataaggaggacaaaccacccctggcaccatcaggaggcactgaggggccagagcagcccccaccaccttgtccaagccaaactggcagccccccggtgggcctcatcaagggagaagacaaagatgagggccctgttgctgaacaagtaaagaaatcaacgttgaaccctaatgctaaggagttcaatcctacaaagcctctgctgtctgtgaataaatccaccagtaccccaacttctccggggccccggactcattcaactccctccatcccggtgctgacagcaggccagagtgggctatacagcccccagtacatctcctacatacctcagatccacatgggaccagctgtgcaggcacctcagatgtatccatatcctgtatccaattcagtgcctgggcagcagggcaagtaccggggagcaaaaggctcccttcctccgcagcgctcggaccaacaccagccagcctcagccccgccgatgatgcaggccgccgcggctgctggcccgcctctggtggctgccacgccctattcttcctacatcccctacaaccctcagcagttcccaggccagccagccatgatgcagcccatggcccactacccctcacagccggtgtttgcccccatgcttcagagcaacccacgcatgctgacgtcgggcagccatccccaggccatcgtgtcatcctctacccctcagtacccttctgcagagcagcctaccccccaagccctttatgccactgttcaccagtcctacccacaccatgccacacagctccatgcccaccagccgcagccggctaccacgcctactggaagccagccgcagtcccagcatgcggcccccagtcctgtccagcatcaggcggggcaggccccacacttgggcagtggacagccacagcagaatctgtaccacccaggggccctgacaggcacgccgccctctctgccaccgggaccttctgcccagtcccctcagagcagcttcccccagccagccgctgtgtatgccatccaccaccagcagctgccccacggcttcaccaacatggcccatgttacccaggcccatgtccaaactggaatcacagcagccccgccccctcaccctggggctccccacccgccccaggtgatgctgctgcacccaccccagagtcatggggggcccccccaaggcgcggtgccccagagtggggtgcctgcactctcagcttccacaccctcaccctacccctacatcggacacccccaaggtgagcagcctggccaggcgcctggatttccaggaggagccgatgacaggattcgtgagttctcattagctgggggaatttggcatggaagagctgaggggctgcaggtggggcaggatgcacgggttctgggtggggagtgaggggtcttggaggcagggctgtcccacagggcgcccgccgacctgcacctgtctgtgaagtatgtagggtgggcagaagccacagtcgccgccgccaggggcttgctcctggctctgtcctttgcttccctccgtcctcgctcagttgtgatccagcagcccccctccccactgcctccccagctctcagtgaccccgactgtctcctgacttagccgagttcaatctcatccctcccagcagctccccttccaccccccggggaactgaagattgtcctggccgcgacctgagacctccatgagtggagggaagagtgatctatgtctcttcccccagcagctcggaccactcccagccccccatccccccgttccccaggggagctggggaattcctgccaagcaccttgaatgggaggggcctcacagagggcagggccagggtccagcaggggtggggggttcctgctctgcccctgcccgtccccacccagtcttgccctcccatcctctcatctattcccccgctggagacggaagatcttttattttctattatttataacttcagacttgggccccctgttctttctttcccattaacttgagtgacctgtgtgagagacagacagatgccccacgaggatggctggacaaggacttttactttttattacataaaaatattaaaaaataaataaaaaaaataaaattttaaactaactta

SEQ ID NO: 533501 - DNA, 261 bp, Homo sapiens
ggcttcagaatacagtgagaccccatctctacaaaacaaaacaggcaggtgtggtggtacgtgcctgtagtcccagctattcaggaggctgaggcgggaggattgcttcagcctgggcttgcagtgagccatgattgtgccactgccttccagcctgggcgacactgcaagaccttgtctctaaacaaacacacacacacacacacaaagagcttctttatgtcttgctgtggattccgtggcatagcttgtcgttctttt

SEQ ID NO: 533502 - DNA, 4443 bp, Homo sapiens
cgggacgctcctcacttcctagatgggatggcggccgggaagaggcgctcctcatttcctagatgggatggcggccgggcagagatgctcctcactttcctccagccgcgagaccccctccccttccgcctcgcggcgcttcctcgctccgcggtcttctctctccacccccgacaccgcggggctccccccgcccgcccacggcgggccccggctgcccgatccccctcgcttcccgcgctctccagcggggccccagccccggccccctctctccctcccttctctctaattccccttccggacgctgccatcatgttgaagcctcagccgctacaacagccctcccagccccagcagccgccccccacgcaacaggccgtggcccgtcggccccccgggggcaccagccctcccaacggcggcctcccggggccgctggccacctctgcggctcctcccgggcctccagcggccgcctccccctgcctggggcctgtggccgctgccgggagcgggctccgccggggagccgaaggcatcttggcgccgcagccgccgccgccgcagcaacaccaggagaggccgggggcagccgccatcggcagcgccaggggacagagcacaggaaagggacccccacagtcacctgtgtttgaaggcgtctacaacaattccagaatgctgcatttccttacagctgttgtgggctccacttgtgatgtaaaggtgaaaaatggtaccacttatgagggtatcttcaagacgctaagctcaaagtttgaactagccgtggatgctgtgcaccggaaagcatctgagccagcaggtggccctcgtcgggaggacattgtggacaccatggtgtttaagccaagtgatgtcatgcttgttcacttccgaaatgttgacttcaactatgctactaaagacaagttcaccgattcagccattgccatgaactcgaaagtgaatggggaacacaaagagaaggtgcttcagcgctgggaggggggtgacagcaacagcgacgactatgacctcgagtctgacatgtccaatggatgggaccccaatgaaatgttcaagttcaatgaggagaactacggtgtgaagactacctatgatagcagtctttcttcttatacggtgcccttagaaaaggacaactcagaagagtttcgtcagcgagagctgcgtgcggcccagttggctcgagagattgaatcaagcccccagtaccgcctacggatcgccatggagaacgacgatgggcgcactgaagaggagaagcacagtgcagtccagcggcagggctcagggcgggagagccccagcttggcatccagggaggggaagtatatccctctgcctcaacgagtccgggaaggtccccggggaggagttcgatgcagcagctctcggggcggtcggcctggccttagctctttgccacctcgtggccctcaccatctggacaacagcagccctggcccaggttctgaggcccgtggtatcaatggaggcccttcccgcatgtccccaaaggcacagcggcctctgagaggtgccaagactctgtcttcgcccagtaataggccttctggagaaacttctgttccacctcctcctgcagtgggccggatgtatcccccgcgttctcccaagtctgctgcccctgccccaatctcagcttcctgtccagagcctcccatcggctcggcagtgccaacctcttcagcctccatccctgtgacctcatcagtctcagatcctggagtgggctccatttctccagcttctccaaagatctccctggcccccacagatgtaaaagaactctctaccaaggaacctgggagaactctggagccccaggagctggctcggatagctgggaaagtccctggtcttcagaatgaacagaaacgattccaactggaagaactgagaaagtttggggcccagtttaagcttcagcccagtagctcccctgagaacagcctggatccttttcctccccggatcttaaaggaggagcccaaaggaaaggagaaagaggttgatggtctgttgacttcagagcccatggggtctcccgtctcctccaagacagagtccgtatcggataaggaggacaaaccacccctggcaccatcaggaggcactgaggggccagagcagcccccaccaccttgtccaagccaaactggcagccccccggtgggcctcatcaagggagaagacaaagatgagggccctgttgctgaacaagtaaagaaatcaacgttgaaccctaatgctaaggagttcaatcctacaaagcctctgctgtctgtgaataaatccaccagtaccccaacttctccggggccccggactcattcaactccctccatcccggtgctgacagcaggccagagtgggctatacagcccccagtacatctcctacatacctcagatccacatgggaccagctgtgcaggcacctcagatgtatccatatcctgtatccaattcagtgcctgggcagcagggcaagtaccggggagcaaaaggctcccttcctccgcagcgctcggaccaacaccagccagcctcagccccgccgatgatgcaggccgccgcggctgctggcccgcctctggtggctgccacgccctattcttcctacatcccctacaaccctcagcagttcccaggccagccagccatgatgcagcccatggcccactacccctcacagccggtgtttgcccccatgcttcagagcaacccacgcatgctgacgtcgggcagccatccccaggccatcgtgtcatcctctacccctcagtacccttctgcagagcagcctaccccccaagccctttatgccactgttcaccagtcctacccacaccatgccacacagctccatgcccaccagccgcagccggctaccacgcctactggaagccagccgcagtcccagcatgcggcccccagtcctgtccagcatcaggcggggcaggccccacacttgggcagtggacagccacagcagaatctgtaccacccaggggccctgacaggcacgccgccctctctgccaccgggaccttctgcccagtcccctcagagcagcttcccccagccagccgctgtgtatgccatccaccaccagcagctgccccacggcttcaccaacatggcccatgttacccaggcccatgtccaaactggaatcacagcagccccgccccctcaccctggggctccccacccgccccaggtgatgctgctgcacccaccccagagtcatggggggcccccccaaggcgcggtgccccagagtggggtgcctgcactctcagcttccacaccctcaccctacccctacatcggacacccccaaggtgagcagcctggccaggcgcctggatttccaggaggagccgatgacaggattcgtgagttctcattagctgggggaatttggcatggaagagctgaggggctgcaggtggggcaggatgcacgggttctgggtggggagtgaggggtcttggaggcagggctgtcccacagggcgcccgccgacctgcacctgtctgtgaagtatgtagggtgggcagaagccacagtcgccgccgccaggggcttgctcctggctctgtcctttgcttccctccgtcctcgctcagttgtgatccagcagcccccctccccactgcctccccagctctcagtgaccccgactgtctcctgacttagccgaggtaaggtcagtgcagcagacagggccagactggggtgtggggggctgagctgggcacatgagtgagggctctggcttactgggaaacagcgattgacctgtgcttctgacagcccccgagacaccttgaggaggccgctccttcccagacacacccccacgcccccactggacggcattggaggaagggacagctgcttgggttctaatgctcctgctctcttctctttcccctccaaccagttcaatctcatccctcccagcagctccccttccaccccccggggaactgaagattgtcctggccgcgacctgagacctccatgagtggagggaagagtgatctatgtctcttcccccagcagctcggaccactcccagccccccatccccccgttccccaggggagctggggaattcctgccaagcaccttgaatgggagggcagtcttgccctcccatcctctcatctattcccccgctggagacggaagatcttttattttctattatttataacttcagacttgggccccctgttctttctttcccattaacttgagtgacctgtgtgagagacagacagatgccccacgaggatggctggacaaggacttttactttttattacataaaaatattaaaaaataaataaaaaaaataaaattttaaactaactta

SEQ ID NO: 533503 - DNA, 4267 bp, Homo sapiens
cgggacgctcctcacttcctagatgggatggcggccgggaagaggcgctcctcatttcctagatgggatggcggccgggcagagatgctcctcactttcctccagccgcgagaccccctccccttccgcctcgcggcgcttcctcgctccgcggtcttctctctccacccccgacaccgcggggctccccccgcccgcccacggcgggccccggctgcccgatccccctcgcttcccgcgctctccagcggggccccagccccggccccctctctccctcccttctctctaattccccttccggacgctgccatcatgttgaagcctcagccgctacaacagccctcccagccccagcagccgccccccacgcaacaggccgtggcccgtcggccccccgggggcaccagccctcccaacggcggcctcccggggccgctggccacctctgcggctcctcccgggcctccagcggccgcctccccctgcctggggcctgtggccgctgccgggagcgggctccgccggggagccgaaggcatcttggcgccgcagccgccgccgccgcagcaacaccaggagaggccgggggcagccgccatcggcagcgccaggggacagagcacaggaaagggacccccacagtcacctgtgtttgaaggcgtctacaacaattccagaatgctgcatttccttacagctgttgtgggctccacttgtgatgtaaaggtgaaaaatggtaccacttatgagggtatcttcaagacgctaagctcaaagtttgaactagccgtggatgctgtgcaccggaaagcatctgagccagcaggtggccctcgtcgggaggacattgtggacaccatggtgtttaagccaagtgatgtcatgcttgttcacttccgaaatgttgacttcaactatgctactaaagacaagttcaccgattcagccattgccatgaactcgaaagtgaatggggaacacaaagagaaggtgcttcagcgctgggaggggggtgacagcaacagcgacgactatgacctcgagtctgacatgtccaatggatgggaccccaatgaaatgttcaagttcaatgaggagaactacggtgtgaagactacctatgatagcagtctttcttcttatacggtgcccttagaaaaggacaactcagaagagtttcgtcagcgagagctgcgtgcggcccagttggctcgagagattgaatcaagcccccagtaccgcctacggatcgccatggagaacgacgatgggcgcactgaagaggagaagcacagtgcagtccagcggcagggctcagggcgggagagccccagcttggcatccagggaggggaagtatatccctctgcctcaacgagtccgggaaggtccccggggaggagttcgatgcagcagctctcggggcggtcggcctggccttagctctttgccacctcgtggccctcaccatctggacaacagcagccctggcccaggttctgaggcccgtggtatcaatggaggcccttcccgcatgtccccaaaggcacagcggcctctgagaggtgccaagactctgtcttcgcccagtaataggccttctggagaaacttctgttccacctcctcctgcagtgggccggatgtatcccccgcgttctcccaagtctgctgcccctgccccaatctcagcttcctgtccagagcctcccatcggctcggcagtgccaacctcttcagcctccatccctgtgacctcatcagtctcagatcctggagtgggctccatttctccagcttctccaaagatctccctggcccccacagatgtaaaagaactctctaccaaggaacctgggagaactctggagccccaggagctggctcggatagctgggaaagtccctggtcttcagaatgaacagaaacgattccaactggaagaactgagaaagtttggggcccagtttaagcttcagcccagtagctcccctgagaacagcctggatccttttcctccccggatcttaaaggaggagcccaaaggaaaggagaaagaggttgatggtctgttgacttcagagcccatggggtctcccgtctcctccaagacagagtccgtatcggataaggaggacaaaccacccctggcaccatcaggaggcactgaggggccagagcagcccccaccaccttgtccaagccaaactggcagccccccggtgggcctcatcaagggagaagacaaagatgagggccctgttgctgaacaagtaaagaaatcaacgttgaaccctaatgctaaggagttcaatcctacaaagcctctgctgtctgtgaataaatccaccagtaccccaacttctccggggccccggactcattcaactccctccatcccggtgctgacagcaggccagagtgggctatacagcccccagtacatctcctacatacctcagatccacatgggaccagctgtgcaggcacctcagatgtatccatatcctgtatccaattcagtgcctgggcagcagggcaagtaccggggagcaaaaggctcccttcctccgcagcgctcggaccaacaccagccagcctcagccccgccgatgatgcaggccgccgcggctgctggcccgcctctggtggctgccacgccctattcttcctacatcccctacaaccctcagcagttcccaggccagccagccatgatgcagcccatggcccactacccctcacagccggtgtttgcccccatgcttcagagcaacccacgcatgctgacgtcgggcagccatccccaggccatcgtgtcatcctctacccctcagtacccttctgcagagcagcctaccccccaagccctttatgccactgttcaccagtcctacccacaccatgccacacagctccatgcccaccagccgcagccggctaccacgcctactggaagccagccgcagtcccagcatgcggcccccagtcctgtccagcatcaggcggggcaggccccacacttgggcagtggacagccacagcagaatctgtaccacccaggggccctgacaggcacgccgccctctctgccaccgggaccttctgcccagtcccctcagagcagcttcccccagccagccgctgtgtatgccatccaccaccagcagctgccccacggcttcaccaacatggcccatgttacccaggcccatgtccaaactggaatcacagcagccccgccccctcaccctggggctccccacccgccccaggtgatgctgctgcacccaccccagagtcatggggggcccccccaaggcgcggtgccccagagtggggtgcctgcactctcagcttccacaccctcaccctacccctacatcggacacccccaaggtgagcagcctggccaggcgcctggatttccaggaggagccgatgacaggattcgtgagttctcattagctgggggaatttggcatggaagagctgaggggctgcaggtggggcaggatgcacgggttctgggtggggagtgaggggtcttggaggcagggctgtcccacagggcgcccgccgacctgcacctgtctgtgaagtatgtagggtgggcagaagccacagtcgccgccgccaggggcttgctcctggctctgtcctttgcttccctccgtcctcgctcagttgtgatccagcagcccccctccccactgcctccccagctctcagtgaccccgactgtctcctgacttagccgaggtaaggtcagtgcagcagacagggccagactggggtgtggggggctgagctgggcacatgagtgagggctctggcttactgggaaacagcgattgacctgtgcttctgacagcccccgagacaccttgaggaggccgctccttcccagacacacccccacgcccccactggacggcattggaggaagggacagctgcttgggttctaatgctcctgctctcttctctttcccctccaaccagttcaatctcatccctcccagcagctccccttccaccccccggggaactgaagattgtcctggccgcgacctgagacctccatgagtggagggaagagtgatctatgtctcttcccccagcagctcggaccactcccagccccccatccccccgttccccaggggagctggggaattcctgccaagcaccttgaatgggagggcctcagggagggccaggccaagcagggtgggggtctgcacggcctggcccacccaacctg

SEQ ID NO: 533504 - DNA, 3180 bp, Homo sapiens
  misc_feature (3146)..(3146): n is a, c, g, or t
cgggacgctcctcacttcctagatgggatggcggccgggaagaggcgctcctcatttcctagatgggatggcggccgggcagagatgctcctcactttcctccagccgcgagaccccctccccttccgcctcgcggcgcttcctcgctccgcggtcttctctctccacccccgacaccgcggggctccccccgcccgcccacggcgggccccggctgcccgatccccctcgcttcccgcgctctccagcggggccccagccccggccccctctctccctcccttctctctaattccccttccggacgctgccatcatgttgaagcctcagccgctacaacagccctcccagccccagcagccgccccccacgcaacaggccgtggcccgtcggccccccgggggcaccagccctcccaacggcggcctcccggggccgctggccacctctgcggctcctcccgggcctccagcggccgcctccccctgcctggggcctgtggccgctgccgggagcgggctccgccggggagccgaaggcatcttggcgccgcagccgccgccgccgcagcaacaccaggagaggccgggggcagccgccatcggcagcgccaggggacagagcacaggaaagggacccccacagtcacctgtgtttgaaggcgtctacaacaattccagaatgctgcatttccttacagctgttgtgggctccacttgtgatgtaaaggtgaaaaatggtaccacttatgagggtatcttcaagacgctaagctcaaagtttgaactagccgtggatgctgtgcaccggaaagcatctgagccagcaggtggccctcgtcgggaggacattgtggacaccatggtgtttaagccaagtgatgtcatgcttgttcacttccgaaatgttgacttcaactatgctactaaagacaagttcaccgattcagccattgccatgaactcgaaagtgaatggggaacacaaagagaaggtgcttcagcgctgggaggggggtgacagcaacagcgacgactatgacctcgagtctgacatgtccaatggatgggaccccaatgaaatgttcaagttcaatgaggagaactacggtgtgaagactacctatgatagcagtctttcttcttatacggtgcccttagaaaaggacaactcagaagagtttcgtcagcgagagctgcgtgcggcccagttggctcgagagattgaatcaagcccccagtaccgcctacggatcgccatggagaacgacgatgggcgcactgaagaggagaagcacagtgcagtccagcggcagggctcagggcgggagagccccagcttggcatccagggaggggaagtatatccctctgcctcaacgagtccgggaaggtccccggggaggagttcgatgcagcagctctcggggcggtcggcctggccttagctctttgccacctcgtggccctcaccatctggacaacagcagccctggcccaggttctgaggcccgtggtatcaatggaggcccttcccgcatgtccccaaaggcacagcggcctctgagaggtgccaagactctgtcttcgcccagtaataggccttctggagaaacttctgttccacctcctcctgcagtgggccggatgtatcccccgcgttctcccaagtctgctgcccctgccccaatctcagcttcctgtccagagcctcccatcggctcggcagtgccaacctcttcagcctccatccctgtgacctcatcagtctcagatcctggagtgggctccatttctccagcttctccaaagatctccctggcccccacagatgtaaaagaactctctaccaaggaacctgggagaactctggagccccaggagctggctcggatagctgggaaagtccctggtcttcagaatgaacagaaacgattccaactggaagaactgagaaagtttggggcccagtttaagcttcagcccagtagctcccctgagaacagcctggatccttttcctccccggatcttaaaggaggagcccaaaggaaaggagaaagaggttgatggtctgttgacttcagagcccatggggtctcccgtctcctccaagacagagtccgtatcggataaggaggacaaaccacccctggcaccatcaggaggcactgaggggccagagcagcccccaccaccttgtccaagccaaactggcagccccccggtgggcctcatcaagggagaagacaaagatgagggccctgttgctgaacaagtaaagaaatcaacgttgaaccctaatgctaaggagttcaatcctacaaagcctctgctgtctgtgaataaatccaccagtaccccaacttctccggggccccggactcattcaactccctccatcccggtgctgacagcaggccagagtgggctatacagcccccagtacatctcctacatacctcagatccacatgggaccagctgtgcaggcacctcagatgtatccatatcctgtatccaattcagtgcctgggcagcagggcaagtaccggggagcaaaaggctcccttcctccgcagcgctcggaccaacaccagccagcctcagccccgccgatgatgcaggccgccgcggctgctggcccgcctctggtggctgccacgccctattcttcctacatcccctacaaccctcagcagttcccaggccagccagccatgatgcagcccatggcccactacccctcacagccggtgtttgcccccatgcttcagagcaacccacgcatgctgacgtcgggcagccatccccaggccatcgtgtcatcctctacccctcagtacccttctgcagagcagcctaccccccaagccctttatgccactgttcaccagtcctacccacaccatgccacacagctccatgcccaccagccgcagccggctaccacgcctactggaagccagccgcagtcccagcatgcggcccccagtcctgtccagcatcaggcggggcaggccccacacttgggcagtggacagccacagcagaatctgtaccacccaggggccctgacaggcacgccgccctctctgccaccgggaccttctgcccagtccctcaaaaatccccagcagcggggttgccncacaaaggcccggtcaaagccgaccgccgcacgg

SEQ ID NO: 533505 - DNA, 2591 bp, Homo sapiens
ctgctccgcccctctctgggggagagtatttcagttatggaagtttgttggaattcagaggcaaacaatgtctatcagcccttggattataatttcacttctgtgatcctcaagagtttctcttttttctttgctttcttgtcctctgttcttttggcactgtgtagccaccttagagaaagaatgttttgtattttcttctttttgactgttttctcatagtccctggtcttcagaatgaacagaaacgattccaactggaagaactgagaaagtttggggcccagtttaagcttcagcccagtagctcccctgagaacagcctggatccttttcctccccggatcttaaaggaggagcccaaaggaaaggagaaagaggttgatggtctgttgacttcagagcccatggggtctcccgtctcctccaagacagagtccgtatcggataaggaggacaaaccacccctggcaccatcaggaggcactgaggggccagagcagcccccaccaccttgtccaagccaaactggcagccccccggtgggcctcatcaagggagaagacaaagatgagggccctgttgctgaacaagtaaagaaatcaacgttgaaccctaatgctaaggagttcaatcctacaaagcctctgctgtctgtgaataaatccaccagtaccccaacttctccggggccccggactcattcaactccctccatcccggtgctgacagcaggccagagtgggctatacagcccccagtacatctcctacatacctcagatccacatgggaccagctgtgcaggcacctcagatgtatccatatcctgtatccaattcagtgcctgggcagcagggcaagtaccggggagcaaaaggctcccttcctccgcagcgctcggaccaacaccagccagcctcagccccgccgatgatgcaggccgccgcggctgctggcccgcctctggtggctgccacgccctattcttcctacatcccctacaaccctcagcagttcccaggccagccagccatgatgcagcccatggcccactacccctcacagccggtgtttgcccccatgcttcagagcaacccacgcatgctgacgtcgggcagccatccccaggccatcgtgtcatcctctacccctcagtacccttctgcagagcagcctaccccccaagccctttatgccactgttcaccagtcctacccacaccatgccacacagctccatgcccaccagccgcagccggctaccacgcctactggaagccagccgcagtcccagcatgcggcccccagtcctgtccagcatcaggcggggcaggccccacacttgggcagtggacagccacagcagaatctgtaccacccaggggccctgacaggcacgccgccctctctgccaccgggaccttctgcccagtcccctcagagcagcttcccccagccagccgctgtgtatgccatccaccaccagcagctgccccacggcttcaccaacatggcccatgttacccaggcccatgtccaaactggaatcacagcagccccgccccctcaccctggggctccccacccgccccaggtgatgctgctgcacccaccccagagtcatggggggcccccccaaggcgcggtgccccagagtggggtgcctgcactctcagcttccacaccctcaccctacccctacatcggacacccccaaggtgagcagcctggccaggcgcctggatttccaggaggagccgatgacaggattcgtgagttctcattagctgggggaatttggcatggaagagctgaggggctgcaggtggggcaggatgcacgggttctgggtggggagtgaggggtcttggaggcagggctgtcccacagggcgcccgccgacctgcacctgtctgtgaagtatgtagggtgggcagaagccacagtcgccgccgccaggggcttgctcctggctctgtcctttgcttccctccgtcctcgctcagttgtgatccagcagcccccctccccactgcctccccagctctcagtgaccccgactgtctcctgacttagccgagttcaatctcatccctcccagcagctccccttccaccccccggggaactgaagattgtcctggccgcgacctgagacctccatgagtggagggaagagtgatctatgtctcttcccccagcagctcggaccactcccagccccccatccccccgttccccaggggagctggggaattcctgccaagcaccttgaatgggaggggcctcacagagggcagggccagggtccagcaggggtggggggttcctgctctgcccctgcccgtccccacccagtcttgccctcccatcctctcatctattcccccgctggagacggaagatcttttattttctattatttataacttcagacttgggccccctgttctttctttcccattaacttgagtgacctgtgtgagagacagacagatgccccacgaggatggctggacaaggacttttactttttattacataaaaatattaaaaaataaataaaaaaaataaaattttaaactaactta

SEQ ID NO: 533506 - DNA, 689 bp, Homo sapiens
  misc_feature (41)..(41): n is a, c, g, or t
  misc_feature (70)..(70): n is a, c, g, or t
  misc_feature (90)..(90): n is a, c, g, or t
  misc_feature (93)..(93): n is a, c, g, or t
  misc_feature (106)..(106): n is a, c, g, or t
  misc_feature (136)..(136): n is a, c, g, or t
  misc_feature (140)..(140): n is a, c, g, or t
  misc_feature (223)..(223): n is a, c, g, or t
  misc_feature (242)..(242): n is a, c, g, or t
  misc_feature (322)..(322): n is a, c, g, or t
  misc_feature (363)..(363): n is a, c, g, or t
  misc_feature (464)..(464): n is a, c, g, or t
  misc_feature (568)..(568): n is a, c, g, or t
  misc_feature (599)..(599): n is a, c, g, or t
  misc_feature (656)..(656): n is a, c, g, or t
taataaaaagttgattttgagaaggggagatatgatgtttnttgattagagtttgctcagaagccccttntgggagtttttttttaattngtnttattggggttangttattttgggggtgtttggttggaggggntggngtttttagttttatagttgggagaggttgggatagagctggggaggtagttgaggtgttttagtgttagatgagggctggttnattcttttagtttaatttngttttataggtgagatggtatttggttataaatatgaattttgattgagggaggtttgatttgggatttttagggtaggnagaatgattatggtccaggttccacaggatgtggagttttngggcttagtatcatggtatgtggggcccatgttcaagtggagtgaattgtagctgggaaggtttgctcaggtacaggggaatctggtttgtttttgcaggnccaccccatggagtatgtaagggtggtatgttatctcccccccaactccaatagcacgtatgtgtctcaggagcctttggatgcctcctgccatcctgtgtgcnccctgaggccctataactcgtctcgcatctngtcacccttaggccggaccaggcgccccatgaatagcagggagccgctttgggtgtnccgcactaggaagatgaaggggtggtcggcgta

SEQ ID NO: 533507 - DNA, 3534 bp, Homo sapiens
  misc_feature (3159)..(3159): n is a, c, g, or t
  misc_feature (3165)..(3165): n is a, c, g, or t
  misc_feature (3168)..(3168): n is a, c, g, or t
  misc_feature (3171)..(3172): n is a, c, g, or t
  misc_feature (3176)..(3176): n is a, c, g, or t
  misc_feature (3184)..(3184): n is a, c, g, or t
  misc_feature (3188)..(3188): n is a, c, g, or t
  misc_feature (3197)..(3198): n is a, c, g, or t
  misc_feature (3216)..(3216): n is a, c, g, or t
  misc_feature (3219)..(3220): n is a, c, g, or t
  misc_feature (3225)..(3227): n is a, c, g, or t
  misc_feature (3234)..(3234): n is a, c, g, or t
  misc_feature (3240)..(3240): n is a, c, g, or t
  misc_feature (3243)..(3243): n is a, c, g, or t
  misc_feature (3248)..(3248): n is a, c, g, or t
  misc_feature (3253)..(3253): n is a, c, g, or t
  misc_feature (3255)..(3255): n is a, c, g, or t
  misc_feature (3257)..(3257): n is a, c, g, or t
  misc_feature (3265)..(3265): n is a, c, g, or t
  misc_feature (3267)..(3267): n is a, c, g, or t
  misc_feature (3270)..(3270): n is a, c, g, or t
  misc_feature (3272)..(3274): n is a, c, g, or t
  misc_feature (3278)..(3282): n is a, c, g, or t
  misc_feature (3285)..(3286): n is a, c, g, or t
  misc_feature (3296)..(3296): n is a, c, g, or t
  misc_feature (3464)..(3464): n is a, c, g, or t
  misc_feature (3511)..(3511): n is a, c, g, or t
cgggacgctcctcacttcctagatgggatggcggccgggaagaggcgctcctcatttcctagatgggatggcggccgggcagagatgctcctcactttcctccagccgcgagaccccctccccttccgcctcgcggcgcttcctcgctccgcggtcttctctctccacccccgacaccgcggggctccccccgcccgcccacggcgggccccggctgcccgatccccctcgcttcccgcgctctccagcggggccccagccccggccccctctctccctcccttctctctaattccccttccggacgctgccatcatgttgaagcctcagccgctacaacagccctcccagccccagcagccgccccccacgcaacaggccgtggcccgtcggccccccgggggcaccagccctcccaacggcggcctcccggggccgctggccacctctgcggctcctcccgggcctccagcggccgcctccccctgcctggggcctgtggccgctgccgggagcgggctccgccggggagccgaaggcatcttggcgccgcagccgccgccgccgcagcaacaccaggagaggccgggggcagccgccatcggcagcgccaggggacagagcacaggaaagggacccccacagtcacctgtgtttgaaggcgtctacaacaattccagaatgctgcatttccttacagctgttgtgggctccacttgtgatgtaaaggtgaaaaatggtaccacttatgagggtatcttcaagacgctaagctcaaagtttgaactagccgtggatgctgtgcaccggaaagcatctgagccagcaggtggccctcgtcgggaggacattgtggacaccatggtgtttaagccaagtgatgtcatgcttgttcacttccgaaatgttgacttcaactatgctactaaagacaagttcaccgattcagccattgccatgaactcgaaagtgaatggggaacacaaagagaaggtgcttcagcgctgggaggggggtgacagcaacagcgacgactatgacctcgagtctgacatgtccaatggatgggaccccaatgaaatgttcaagttcaatgaggagaactacggtgtgaagactacctatgatagcagtctttcttcttatacggtgcccttagaaaaggacaactcagaagagtttcgtcagcgagagctgcgtgcggcccagttggctcgagagattgaatcaagcccccagtaccgcctacggatcgccatggagaacgacgatgggcgcactgaagaggagaagcacagtgcagtccagcggcagggctcagggcgggagagccccagcttggcatccagggaggggaagtatatccctctgcctcaacgagtccgggaaggtccccggggaggagttcgatgcagcagctctcggggcggtcggcctggccttagctctttgccacctcgtggccctcaccatctggacaacagcagccctggcccaggttctgaggcccgtggtatcaatggaggcccttcccgcatgtccccaaaggcacagcggcctctgagaggtgccaagactctgtcttcgcccagtaataggccttctggagaaacttctgttccacctcctcctgcagtgggccggatgtatcccccgcgttctcccaagtctgctgcccctgccccaatctcagcttcctgtccagagcctcccatcggctcggcagtgccaacctcttcagcctccatccctgtgacctcatcagtctcagatcctggagtgggctccatttctccagcttctccaaagatctccctggcccccacagatgtaaaagaactctctaccaaggaacctgggagaactctggagccccaggagctggctcggatagctgggaaagtccctggtcttcagaatgaacagaaacgattccaactggaagaactgagaaagtttggggcccagtttaagcttcagcccagtagctcccctgagaacagcctggatccttttcctccccggatcttaaaggaggagcccaaaggaaaggagaaagaggttgatggtctgttgacttcagagcccatggggtctcccgtctcctccaagacagagtccgtatcggataaggaggacaaaccacccctggcaccatcaggaggcactgaggggccagagcagcccccaccaccttgtccaagccaaactggcagccccccggtgggcctcatcaagggagaagacaaagatgagggccctgttgctgaacaagtaaagaaatcaacgttgaaccctaatgctaaggagttcaatcctacaaagcctctgctgtctgtgaataaatccaccagtaccccaacttctccggggccccggactcattcaactccctccatcccggtgctgacagcaggccagagtgggctatacagcccccagtacatctcctacatacctcagatccacatgggaccagctgtgcaggcacctcagatgtatccatatcctgtatccaattcagtgcctgggcagcagggcaagtaccggggagcaaaaggctcccttcctccgcagcgctcggaccaacaccagccagcctcagccccgccgatgatgcaggccgccgcggctgctggcccgcctctggtggctgccacgccctattcttcctacatcccctacaaccctcagcagttcccaggccagccagccatgatgcagcccatggcccactacccctcacagccggtgtttgcccccatgcttcagagcaacccacgcatgctgacgtcgggcagccatccccaggccatcgtgtcatcctctacccctcagtacccttctgcagagcagcctaccccccaagccctttatgccactgttcaccagtcctacccacaccatgccacacagctccatgcccaccagccgcagccggctaccacgcctactggaagccagccgcagtcccagcatgcggcccccagtcctgtccagcatcaggcggggcaggccccacacttgggcagtggacagccacagcagaatctgtaccacccaggggccctgacaggcacgccgccctctctgccaccgggaccttctgcccagtcccctcagagcagttcccccaagccaagccagcatgttgtatgncaatcnaanaannaagnagcatgcnacanaggcattannaaacaatggcacaatgtntannaagannnaaatgtnaaacanatnggaanacaancncnacacaccnanaanannnaatnnnnncannaaaaaaaagnaaaaagggtggatgatgatgaaaaaaaaaaaagaggtaatgggggggaaaaaaaaagggagagggtgaaaaagaggtgggggtgaatgaaatataagattaaaaaaaataaacataaaaataaataggaaaaaaaaaagtatgtagggtgggaagaagaaaaagtagnagaagaaaggggattgataatggatatgtaatttgattaaataagtnatagataagttgtgataaaggag

SEQ ID NO: 533508 - DNA, 471 bp, Homo sapiens
caggatcttctcgaatcgacggtttctcggaagagggggatgtgtcaggatcataagataatagtggagagaaggtcagcagataaacacgtgaacaaaggtctctgtgtcatagacaaggtaaagaactaagtgctgtgctttagatatgcatacacataaacatctcaatgccttacagagcagtattgctgcccccatgtcccacctccagccctaaggcggttttcccctaactcagtagatggaacatacaatcgggttttacaccattgcccagggacgggcaggagacagatgccttcctcttgtttcaacggcaaagaggcgttccttcttctttcactaatccttctcagcacagaccctttacgggtgtcacgctgggggacggtcaggtctttcccttcccacgaggccatatttcagactatcacatggggagaaaccgtcgaattcgaggggtaccga

SEQ ID NO: 533509 - DNA, 1375 bp, Homo sapiens
tggcattggcatagttccttaactagggctcaagggtgtttgagggtccacacttcaagaagaaggattcgggagttgggggaagggaggctcagtgagggaccttctgtggtgagcattctataggcctttacactttccagcacacctccgtgccggtgggccatcgggaaagcagtgcaggccaagaggcctttcccccttctgtggagcccccatcttcgagggaaaagagacattcatagagtttacagaaaacgaggcacaaggtggggaagccagaggcacgcccccctgtgtggcaagctttctttatagtggtgcctcccccagaggggtttggcggcaaataggtggctccagagagacacttgggtggtgtggggcacccacgactttgtgtgtagaaacaaagtgtgcgcctttgtgtgaagtgtctgtggggacgcccacggggtataaccacggtgggtgtgtctcctcactataaaacccatgtgggacaagccctcgggggaaaccacccttttgtggccccaaggggggcccttccccacacaagggggagaacctctctctcgagagcacaaaaagagcgcgtgtgcgggtgggtgtgaccccatataggggggtgtttcacaaaacttttatcacccctctcctatgtggggggacataataagacctctgtggtgtccaagtgtgcaaccactggtgggcaacgacatgtctgtgggcgccccaaggggaagaaggcccacatgcgggtgtggggggagggagacgccgagaatatacaatacaaaggggggagatatttcggtggggcacatacaaacaggaaaggatggcctttacgagggggggccaaaaaacctgtgttggagacgaggtgttctacaagatctagtgatcggaggagcgctgggacaatttacaagtggggaaggggtaataggggggggcgaaaattataaaatataacgcaccgtgctttcgagagggcgagaaatcgcaacgggggtctttatatttaaaaacccccctgttattccgcgcggtgggggatcaacaagtttgtggggtcaacctcggagtggggacccaaccatctcggcgggggatacaccaaatttataccttgttattttggggagagggacccctaaataaggacctcgtgggggcttcccaaacactcggacaaacaggcttctcggaggaagaagaggccctcttttttttccaacaacaaaggtgtaaaaaaggcggcaccactgagaaaggcgggttgttaggaaaaaccacttcccaccgggtgttcgggtgctggcttcgcaggcagagtagagggccaccctattgtgagaatatc

SEQ ID NO: 533510 - DNA, 475 bp, Homo sapiens
  misc_feature (92)..(93): n is a, c, g, or t
  misc_feature (116)..(117): n is a, c, g, or t
  misc_feature (120)..(121): n is a, c, g, or t
ccgtctctatggtcagggtctctcctagaccaagccccacccagcagccgaggcaaaagggttcccaaagtggagaggagtaagagatcccnncccccaaacaggtaggaaagggnnaanntctccttcaaccaggaccccacccataggtacacacaaaaaaggggggatcgaggccagacacggtggctcacgcctgtaatcccagcagtttgggaagccgaggcgggtggaacacttgaggtcaggggtttgagaccagcctggcttgaacctgggaggcggaggttgcagtgagccgagattgcgccactgcactccagcctgggcgacagagtgagactctgtctcaaaaaaaacaaaaagcaggaggattgggagcctgtcagccccatcctgagaccccgtcctcatttctgtaatgatggatctcgctccccctttcccccaagaacctaataaaggcttgtgaaga

SEQ ID NO: 533511 - DNA, 1181 bp, Homo sapiens
gggcgatggcgacgtgtcgcagcaaatccaggctgctgactgcggtgtgctgtgtgcggcgtgcagcggcggtgactgagtgatagagagccacagcacgaggagctgccatggcctggacagccagtggctgccatgataggaaaactgtgctgagatgtgggcgagaactgtccactgctgtggcctggcgacaagctggttccttgtggacgaatgcactggtataatgcatgtggtgatggcaataccgtgcatgggatgtgtggaccatgtgacatccagacacacgttcccatggcgctgcgatcaagcaagtgcacacacatcgtttcaacgatgaggctaaagctggcagaccatcaagagagggacatgcgtggacaggcgcaggcattactgtgcgtgagatccacagacaggactgactatggacatagacgcttgtgtcaggagttggtagtgagatcgtagaagcacttggagacatgggcagggcagcagtgtgaaagcgacagaagggagtcagtaggaaggcatgcgcccaaaggagtagcaagaaaggggtcagaaaggatgttagccacgagggtaagaaccatgaatagaagaaagaaaacccaggggaccagcaagaacccgactaattaggctcgacaaaaaatccattccaagagaatcggttacaaggataaccaagaccgcaaataaccccatgaatttccgttatgttggggcaccatacgattattataggcgcccaaccgaagcgtaagtggggaaaggcagggggtaaccaatgaggtgaggaagggcacaccagagggacacgaaaccacgatcagagacaataatagggagaaacaaaaggaaaaaacctccgaggaaaacgggggcatccttatgggaaaatacaggcataagataattggaacaaaagtaaagaagaggattaaaacggggaacatagcttgcaaaaaattggcgaggggacaccaatagatgtaaggaaaagttggtgagaaacaagaggttgatgaaatacgaaattcgcaaattgggggaaggaaagacggggaaaaagagagaaaagagacaacatggggaacaagcatgatgggagagaccaaagacggtgaaaaaaaagtaggatgaaacgttgtagtagaaaagaaaaaaaa

SEQ ID NO: 533512 - DNA, 462 bp, Homo sapiens
ctggattgtgtcttagaggcataggagcctgaagggctgcgagctgggaaggggcaggccggcgctgggtgtaggggacagaggggagaggaggaagcgggccgcaatagaaagacgtggacggggctggacgtggtggctgacgcctgtaatcccagcactttgggaggccgagacaggcggatcacttgaggtcaggagttcgagaccagtctggccaacatggagaaaccccgtctctactaaaaatacaaaattagccaggcgtggtggtgcatgcctgtaatcccagctactcgggaggccaaggcaggagaatcgcttggacttgggaggtggaggttgcagtgagccaagatggcaccattgtactccaggctgagcaggctagcaagactcactctccaaaaaaaagaaaaaaagatttttttttaataagccaggcatggtgacacatgtctg

SEQ ID NO: 533513 - DNA, 460 bp, Homo sapiens
ccccaccgccgttcccgcaggagggaatgggtgggaagaaacaagcccaaagcttcctttgtcgggacccctccccaacagtcttcggcttaggaaaggaagggcccgaaaagggggaagaagaaaaattggctggttggcctggctcttaagtggcttgaggggagggtttggataatttcttaagaatggaaccattttttcccttccgtaatggaagaatggggcttcaaaaagaaggttaatcaaggtaaattttcaagaaacctggaaagccacctggaaaaatttcccccttgggttttttttcaagtgggtaaggtttctttttttaagcccctttggaccaccttttctaagaatgggggaaccaagaagtttttcttggagctggaaaaggaaataaaatggccaaaggtggaataaccgggtaattggcccttcaaaagccccaatttcc

SEQ ID NO: 533514 - DNA, 154 bp, Homo sapiens
gtgctgtatgggggttgcgtaggtcccaaaggaacacgcagttcccaccacctcctaggtcgcaggagctgttgcgcttcaggcagaaggatactagtatggttgtgtaacattaatggccatggcacatacttggtgtcaatcctgatactca

SEQ ID NO: 533515 - DNA, 201 bp, Homo sapiens
ctttgtttgggcatattgtgtgtttgttgggcaattttgtttttcagcccaggtccagtcattgcatgcagagctgcatccatcttggcacatattttattccgttcccagcacagcagcttgccatccaaccacaagtcacattgtcatttcatcgtcatcgtacacatcagcatttacacagcgttccattcatcaaca

SEQ ID NO: 533516 - DNA, 160 bp, Homo sapiens
ttctagactcgccagtgggtgtgactgtggcccatgctgatattgcgtgatgttatctactcagtgagggtggggagtctgttgaattgatcagatgacgcagactgcctccgtatgtcccgtgtgctccagcgtcatcgatgaataagcagtgtacctg

SEQ ID NO: 533517 - DNA, 177 bp, Homo sapiens
atgctccctcttcacagtctcaactagaaacttctcaacaccacgtggggagctcatgacccgctcccgcacagtgtagatccccctagctctactatcccttccctattccatactggcttgaaccaggggcccaatctctgaaaccatttcccatcttggacgcttgccttattc

SEQ ID NO: 533518 - DNA, 393 bp, Homo sapiens
  misc_feature (295)..(295): n is a, c, g, or t
  misc_feature (305)..(305): n is a, c, g, or t
ctccatcttacttggagcccagtgggcaaatcaaatatggttaccttgtaggagggccttccttactggattgggagataagctgtgaagcttgatgtttaatgcagtaacttgcaaacttgatttacttgaaattgcatacaaatttcctgagcatctaaaaactagccttattactgagctttgcctttcctgctgggagtagtggcaaaattagcactcatggctgtagaaagatcactgagtgaagctctgactcctcctttgccaacacacagcagagcaagaaatacancttgcctgtnttcatctaggtggcaactttgagggtcttgaatgggactgaggttgccttggtggtgacatcagcagagaagtcatagtgaagtcatt

SEQ ID NO: 533519 - DNA, 554 bp, Homo sapiens
  misc_feature (6)..(6): n is a, c, g, or t
  misc_feature (185)..(185): n is a, c, g, or t
  misc_feature (313)..(313): n is a, c, g, or t
  misc_feature (340)..(340): n is a, c, g, or t
  misc_feature (373)..(373): n is a, c, g, or t
accctnaaaacaaagtgcccgcgggcatgatcttacctacaatgaatggggagtcagtagacccagtggggcagtcagcactgaaaactgaggagcgcaaggctaagcctgctccttcaaaaacccaggccagacctgtttttgtcaaaatccccacttgtaagatctttgtgggggaaaccttnctgacgtcaccagaggagctctattgagtgtttaccacccaagagctggtgcaggcctttacccatgctcctgctacattagaagcagacagaggtggaaagttccacatggtagatggtaacgtgtntggggaatttactgatctggtccctgngaaacatattgtgatgaagtggaggtttaaatnttggtcagagggacactttgtcaccatgaccttgtccttttattgcaagaacggtgagactgagctgtgcatggaaggtcgtggtattcttgtttctgaggaagagcggtctcgacaggggtggtagcggttctactttgtgggtcttaagcagagctttggttgtgggttacgtttattt

SEQ ID NO: 533520 - DNA, 212 bp, Homo sapiens
  misc_feature (4)..(4): n is a, c, g, or t
  misc_feature (7)..(7): n is a, c, g, or t
  misc_feature (15)..(15): n is a, c, g, or t
  misc_feature (19)..(19): n is a, c, g, or t
  misc_feature (38)..(38): n is a, c, g, or t
  misc_feature (54)..(54): n is a, c, g, or t
  misc_feature (60)..(60): n is a, c, g, or t
  misc_feature (85)..(85): n is a, c, g, or t
  misc_feature (89)..(89): n is a, c, g, or t
  misc_feature (101)..(101): n is a, c, g, or t
  misc_feature (104)..(104): n is a, c, g, or t
  misc_feature (132)..(132): n is a, c, g, or t
  misc_feature (146)..(147): n is a, c, g, or t
  misc_feature (149)..(150): n is a, c, g, or t
  misc_feature (155)..(155): n is a, c, g, or t
  misc_feature (157)..(157): n is a, c, g, or t
  misc_feature (167)..(167): n is a, c, g, or t
  misc_feature (183)..(183): n is a, c, g, or t
ccgnggntacgcccncagnacactccacatctgtgccncatacagggactcccnaataancacgagcaaaacagacagccctgtntatntataggcctttncangaagagactagcaggagcagtaataaanacaggaaacccagnncnncattntnagggcttccnaaaaaacaggcttctnagagtcgtatcttttttctttttttatcc

SEQ ID NO: 533521 - DNA, 375 bp, Homo sapiens
catccggagttatgtgaacggaacttccgcatgtcctgggccagccaacacataagaaagtaagagaaatcatacctccaatccaaagtggggaaatcttcctgttgatcaagattatatctggaacaacaaataatgagggcaagaggggaggacataggcttattaagtagcgtaaatactctagatgagtataagaataggcttttcaggagttctgtcatggcttactagtaactaagctcaactagtatccaaggggacatgggttcaatccctggccccactcagtgggttaaggatccggtgttgccatgagctgtgactcggatctggcattgctgcagctatggcgttcacttaatgccgctagcg

SEQ ID NO: 533522 - DNA, 690 bp, Homo sapiens
gcagtgtttccttatttagtgtttggtgaggtgatttttgtctgagatggtcttgatgcctgtggatgttcaccaatgtttgggcattgaagatttacatatttattctaatcttcacagtctgggctgatgtgtacccatctttcttgagaaagctttccaagaattcaaagggaattgagtgttatgaaataagtttttggtcactgcagccatatgtgcattagggaacactccaagcccagtaacactgttactttgcagatttgtagaagtaccagccttggcaatcttgggtaatatctggaagaatagtctggattgccagagaggagtctcttgttttttccccctactttctcacaaacgaatgaagtctcactctccatgctaagctccctggagtttgtggagggatgacaaaagcactcctgtggccaccacctctaggattgtgctgggtcacacccaagggtagcacaatactaggccttgcccaagcctgtggtggctgctgcctggctactgctgatgcttattcaaggaccaagggctctttagtcagcatgtggtgaattctgaaaggacatggaccttctcttcaggcagtggcttctcttcttgcccaagcaggtctagtgtcatcttggaactggtattggggtttcggactctgcttatgcttatttt

SEQ ID NO: 533523 - DNA, 361 bp, Homo sapiens
tatggtggcaggtgcttgtaatcccagctactcgggaggctgaggcagaagaatcgcttgaacctggaaggtggaggttgcagtgagccgagattacaccactgcactccagcctggtgacaaagcgagactctgtctcaaaaggaaaaagaagaaaaaagaaaaagtgtccgttcatgtcctttgtaagactccactctctagtaaccgtgttcctgcccttctcaattcctaaggtaatcgccttaactcagatccctgagaaatccccacagcaggcagagatttggtctcctgacagtagctttgggattccattaagcaaatatgattgggggccagccccttctttctctttctt

SEQ ID NO: 533524 - DNA, 553 bp, Homo sapiens
agcgcgcaataaccctcattaaagggaacaaaagctggagctccaccgcggtgccggccgctctagaactagtgaatcccccgggctgcaggaattcgattcccttccccacagtgagccactgccccacttcagagggtaagagccaaaagcctcattgtgaaaggcactggacttggaccagggacaccatcagggccttggttttctcacgcataaaatggagagtggattaatcgccaaagattcttctgatctgacattttgaaattgtgagagaaactagatgactgtaaacttggtcacaggcctggttctggcagttctttgcggacttttttctagcattatgccaaataaacatgcagtctcagtgtgctctcgcatgtatgaatatctagtcctttctgtggttctcagccaagacataaaaactaggactcagagcacatacaaaaccagttatgtttcggaaagagggaaaagagtccccgagcccggatcttgtgctgcttttctcactgtgggggaaggggggatcctctatcagccc

SEQ ID NO: 533525 - DNA, 172 bp, Homo sapiens
ctatccacccataaggcacctggggcttttcagcccccccgtggtgtaacaaatggaggaggaggagggggtgagaacccctttcctccagccctgtgccccactccttttatgtgtgtacagtgtccccaggcatcccccctttttcattaaaaacccagtttcctggtca

SEQ ID NO: 533526 - DNA, 657 bp, Homo sapiens
ggaagcctgcaaccaggacgctctccaggaggcgggcacattcaggcacaccctctggaagcgggtccaaggtgctgtcacccctctgctggcgagcatgatatcattcatcgacagagacggcaacctagagttactgaccaggccagatactccgccctgggcaagagatctttggatgtttattttcagtgacacgatgcttctgaacattcctcttgtgatgaataatgaaagacataaaggtgagatggcctacatcgtggtgcagaaccacatgaacctttccgagaacgcttccaacaacgtccctttcagctggaaaatcaaggactatctggaggagctgtgggtccaggctcagtacatcacagacgcagaaggactgcccaagaagttcgtggacatctttcagcagactcctctgggcaggtttcttgcccagctccatggagagccgcagcaggaacttcttcagtgttacttgaaggatttcattctcttgaccatgcgtgtgtcaacggaggaggaattaaagtttctgcagatggctctgtggtcctgcactaggaaactgaaagcggcgtcagaagcgcccgaggaagaggtttccttaccgtgggtgcacctgccaaccatcgtcggaccggcccgatc

SEQ ID NO: 533527 - DNA, 751 bp, Homo sapiens
  misc_feature (216)..(216): n is a, c, g, or t
agctcggtaccgtgcttcaactccactctgtgaatggagagcttctggggctggttccaagtgggagatttcttcacaaggcacataccttagctgaattcagagatgttaaggacacatctcgctgacgcttctcacatcctagacaatgaaagtttaggtcgcaagcctgggacacaagtatacatgcagctaacagccggggcctctggtggnccggtgggaggggcaccgctcagccacgccctgctgtccgtctccccagaccctggacgcatttgccgcaatggcctgcacggagatgctgacaagaaacaccctgaagcccagtccccaggcgtggctacagttggtgaagaatctttccatgccgctggagctcatctgctccgatgagcacatgcaaggcagcgggagcctggcccaggctgtcatcagggaagtcagagcccagtggagtcggattttctccaccgcactcttcgtggagcacgtgctcctaggaaccgagagccgcgtccccgagttacaggggctggtgaccgagcacgtcttcttactagacaagtgtcttcgagagaactctgacgtgaagacgcacgggccttttgaggccgtgatgcgcactctctgtgaatgcaaggagacagccagcaagaccctcagcaggtttgggattcagccgtgctccatctgcctgggagatgcaaaggaccccgtctaggagcgtaatcggtacgagctcgatcga

SEQ ID NO: 533528 - DNA, 112 bp, Homo sapiens
cggcacgaggccaccacccctggatccgccgccccttctttcctttccactcccccagccgcctctttgaccagttcttcggagaggcggctgggggagtggaaaaaaaaaa

SEQ ID NO: 533529 - DNA, 441 bp, Homo sapiens
gactctacaggatccggcacgtggtgtgatcaacctacccaaagactactgcagcactgacttggatctggacactgagtttgagatcctcttgccacgccgacggggcctgggcctctgtgctaccgctctcgtcagctacttgattcgcctacacaatgaaattgtctacgccgtggaaaaactctccaaggaaaacaacagctattccgtggatgccgccgaggtcactgaactgcatgtcatcagttatgaagtggagcgggacctgactccactgattctctccaactgccagtaccaggtggaggagggcagagagaccgtgcaggagttcgatctggagaagattcagcggcagatcgtcagccgcttcctccagggcaagccccggctgagcctcaagggaaccaacgagcccgctacgagccaccccacgag

SEQ ID NO: 533530 - DNA, 3186 bp, Homo sapiens
cgggacgctcctcacttcctagatgggatggcggccgggaagaggcgctcctcatttcctagatgggatggcggccgggcagagatgctcctcactttcctccagccgcgagaccccctccccttccgcctcgcggcgcttcctcgctccgcggtcttctctctccacccccgacaccgcggggctccccccgcccgcccacggcgggccccggctgcccgatccccctcgcttcccgcgctctccagcggggccccagccccggccccctctctccctcccttctctctaattccccttccggacgctgccatcatgttgaagcctcagccgctacaacagccctcccagccccagcagccgccccccacgcaacaggccgtggcccgtcggccccccgggggcaccagccctcccaacggcggcctcccggggccgctggccacctctgcggctcctcccgggcctccagcggccgcctccccctgcctggggcctgtggccgctgccgggagcgggctccgccggggagccgaaggcatcttggcgccgcagccgccgccgccgcagcaacaccaggagaggccgggggcagccgccatcggcagcgccaggggacagagcacaggaaagggacccccacagtcacctgtgtttgaaggcgtctacaacaattccagaatgctgcatttccttacagctgttgtgggctccacttgtgatgtaaaggtgaaaaatggtaccacttatgagggtatcttcaagacgctaagctcaaagtttgaactagccgtggatgctgtgcaccggaaagcatctgagccagcaggtggccctcgtcgggaggacattgtggacaccatggtgtttaagccaagtgatgtcatgcttgttcacttccgaaatgttgacttcaactatgctactaaagacaagttcaccgattcagccattgccatgaactcgaaagtgaatggggaacacaaagagaaggtgcttcagcgctgggaggggggtgacagcaacagcgacgactatgacctcgagtctgacatgtccaatggatgggaccccaatgaaatgttcaagttcaatgaggagaactacggtgtgaagactacctatgatagcagtctttcttcttatacggtgcccttagaaaaggacaactcagaagagtttcgtcagcgagagctgcgtgcggcccagttggctcgagagattgaatcaagcccccagtaccgcctacggatcgccatggagaacgacgatgggcgcactgaagaggagaagcacagtgcagtccagcggcagggctcagggcgggagagccccagcttggcatccagggaggggaagtatatccctctgcctcaacgagtccgggaaggtccccggggaggagttcgatgcagcagctctcggggcggtcggcctggccttagctctttgccacctcgtggccctcaccatctggacaacagcagccctggcccaggttctgaggcccgtggtatcaatggaggcccttcccgcatgtccccaaaggcacagcggcctctgagaggtgccaagactctgtcttcgcccagtaataggccttctggagaaacttctgttccacctcctcctgcagtgggccggatgtatcccccgcgttctcccaagtctgctgcccctgccccaatctcagcttcctgtccagagcctcccatcggctcggcagtgccaacctcttcagcctccatccctgtgacctcatcagtctcagatcctggagtgggctccatttctccagcttctccaaagatctccctggcccccacagatgtaaaagaactctctaccaaggaacctgggagaactctggagccccaggagctggctcggatagctgggaaagtccctggtcttcagaatgaacagaaacgattccaactggaagaactgagaaagtttggggcccagtttaagcttcagcccagtagctcccctgagaacagcctggatccttttcctccccggatcttaaaggaggagcccaaaggaaaggagaaagaggttgatggtctgttgacttcagagcccatggggtctcccgtctcctccaagacagagtccgtatcggataaggaggacaaaccacccctggcaccatcaggaggcactgaggggccagagcagcccccaccaccttgtccaagccaaactggcagccccccggtgggcctcatcaagggagaagacaaagatgagggccctgttgctgaacaagtaaagaaatcaacgttgaaccctaatgctaaggagttcaatcctacaaagcctctgctgtctgtgaataaatccaccagtaccccaacttctccggggccccggactcattcaactccctccatcccggtgctgacagcaggccagagtgggctatacagcccccagtacatctcctacatacctcagatccacatgggaccagctgtgcaggcacctcagatgtatccatatcctgtatccaattcagtgcctgggcagcagggcaagtaccggggagcaaaaggctcccttcctccgcagcgctcggaccaacaccagccagcctcagccccgccgatgatgcaggccgccgcggctgctggcccgcctctggtggctgccacgccctattcttcctacatcccctacaaccctcagcagttcccaggccagccagccatgatgcagcccatggcccactacccctcacagccggtgtttgcccccatgcttcagagcaacccacgcatgctgacgtcgggcagccatccccaggccatcgtgtcatcctctacccctcagtacccttctgcagagcagcctaccccccaagccctttatgccactgttcaccagtcctacccacaccatgccacacagctccatgcccaccagccgcagccggctaccacgcctactggaagccagccgcagtcccagcatgcggcccccagtcctgtccagcatcaggcggggcaggccccacacttgggcagtggacagccacagcagaatctgtaccagccccggccccctctctccctcccttctctctaattccccttccggacgctgccatcatgttgaagcctcagccgctacaacagccctcccagccccagcagccgccccccacgcaacaggccgtgg

SEQ ID NO: 533531 - DNA, 465 bp, Homo sapiens
cccgagtttagacgggtgctgcactccactgacagtagttagacatcaaggaagaaaattaacaaacatattcaggacctgaactcaacattggaccaaatggatctaatagacctctacagaactctccaccctaacccaagagaatatacattcttctcactgccacatggcaaatactctaaaattgaccacataattggacataaaacaatcctcagcaaatgcggaagaaccaaaataatatgaaacatactctaggactatagcgcaataaaaatataagtcaagattttaaaaattgctcaaaaccatgcaattacatagaaattaaacaacctgctcctgaatgacttttgggtaaatcatgaaattaaggcagaaatcaagaagttccttgaaactaatgagaacagagatacaacttgctaaaatttctggaacacacaaaacagcattaacagg

SEQ ID NO: 533532 - DNA, 6278 bp, Homo sapiens
  misc_feature (436)..(436): n is a, c, g, or t
tgatctagaggtcccatgcgcgacgcttccatcaacgtccctttcagctggaaaatcaaggactatctggaggagctgtgggtccaggctcagtacatcacagacgcagaaggactgcccaagaagttcgtggacatctttcagcagactcctctgggcaggtttcttgcccagctccatggagagccgcagcaggaacttcttcagtgttacttgaaggatttcattctcttgaccatgcgtgtgtcaacggaggaggaattaaagtttctgcagatggctctgtggtcctgcactaggaaactgaaagcggcgtcagaagcgcccgaggaagaggtttccttaccgtgggtgcaccttgcctaccagcgtttcagaagccgtctgcagaacttttccagaatcctgaccatctaccctcaggttctccacagcntgatggaagcccgttggaaccatgagctggctggatgtgagatgaccctggacgcatttgccgcaatggcctgcacggagatgctgacaagaaacaccctgaagcccagtccccaggcgtggctacagttggtgaagaatctttccatgccgctggagctcatctgctccgatgagcacatgcaaggcagcgggagcctggcccaggctgtcatcagggaagtcagagcccagtggagtcggattttctccaccgcactcttcgtggagcacgtgctcctaggaaccgagagccgcgtccccgagttacaggggctggtgaccgagcacgtcttcttactagacaagtgtcttcgagagaactctgacgtgaagacgcacgggccttttgaggccgtgatgcgcactctctgtgaatgcaaggagacagccagcaagaccctcagcaggtttgggattcagccgtgctccatctgcctgggagatgcaaaggaccccgtctgtctgccctgcgaccacgtgcactgcctgcgctgcctcagggcctggtttgcctcagagcagatgatatgcccctactgtttaactgccttgccagacgaattctctccagctgtttcccaagcgcacagggaagccattgaaaagcatgcccgcttccggcagatgtgcaacagtttcttcgtagacctggtgtccaccatttgcttcaaggacaacgctccgcctgagaaggaagtgattgagagcctgctctctctcctcttcgtccaaaaggggcgcttaagagatgctgcccagagacactgtgaacacacaaaatctctctctccattcaatgatgttgtggataagactcctgtcatccgctcagtgatactgaaactgcttttgaagtacagctttcatgatgtaaaagattatattcaggaatatttgaccctgttaaaaaagaaagcattcataactgaagataaaactgaactgtacatgctcttcatcaactgcctggaggattcaatacttgagaagaccagtgcttactccagaaatgatgaactgaaccacctagaagaggaaggtcgtttccttaaggcatattctccagcaagccggggccgagagcctgccaacgaggcctcggttgaatacctgcaagaggtggcccggatccgcctctgcctcgacagagctgcagatttcctctcggagcctgagggaggcccagagatggccaaggagaagcagtgctacctgcagcaagtcaagcagttctgtatccgggtggagaacgactggcaccgggtgtacctggtgcggaagctcagcagccagcgggggatggagttcgtgcagggcctctccaagcccggccgcccgcaccagtgggtgtttcccaaggacgttgtcaagcagcaggggctgcggcaggaccacccaggccagatggataggtacctggtgtacggcgatgaatacaaggctctccgtgatgctgtggccaaagctgtcctcgagtgcaagccactgggcattaagactgctctgaaggcctgcaagaccccccaaagccagcagtcagcctacttcctgttaacactgtttagagaggtggctattttgtacagatcccacaatgcaagcctccaccccacgccagagcaatgtgaagctgtgagcaaattcattggcgaatgcaagatcctttcacctcctgatatcagccgttttgcaacatcgctcgtggacaattctgtgccattgttgagggcggggcctagtgacagcaaccttgatggaacggtgacagaaatggccattcatgctgcagccgtccttctgtgtggacagaatgaactcttggagcccctaaagaatctggccttctccccagccaccatggcgcatgcttttcttccaaccatgcctgaagacttgctggctcaagctcggaggtggaagggtctggagcgagtccactggtacacttgtcccaacggccatccttgctccgtgggagagtgtggcaggccgatggaacagagcatctgcattgactgccatgcgccgattggaggcattgaccacaaacctcgggacggctttcatctggtcaaagacaaggcagacagaacgcagaccggccatgtgctgggcaacccgcagcggagagacgtggtgacatgtgaccgagggctgcccccagtggtcttcctccttatccggctactcactcacttggctctgcttctgggagcgtcccagagttcccaggctctgataaacatcattaagcctccagtgagggatccaaaaggctttctgcagcagcacatcctgaaggacctggagcagttggccaagatgctgggacacagtgccgacgagaccatcggcgtggtccacctcgtcctgcgcaggcttctccaagagcagcaccagctctctagcagaaggcttttaaattttgacacagaattgtcaactaaagaaatgaggaacaactgggaaaaggaaatcgcagctgtgatttctcctgaactggagcatctagataaaacccttcccaccatgaataatctcatcagccaagataagcgtatcagctctaaccctgtggccaaaataatatatggtgacccagtgaccttcctgccccacctgccccggaaaagtgtggtccattgctctaagatttggagctgcaggaaaagaattacagttgagtacctccagcacattgtggaacagaaaaatggcaaagaaagagtgcccatcctctggcatttcctgcagaaggaagcagagctgaggctggtaaagttcctgcctgagattttggccttgcaaagggatctagtgaagcagttccagaacgtccagcaagttgaatacagctccatcagaggcttcctcagcaagcacagctcagatgggttgaggcagctgcttcacaacaggatcacagtctttctgtccacatggaacaaactgaggagatcgcttgagacgaacggtgagatcaacctacccaaagactactgcagcactgacttggatctggacactgagtttgagatcctcttgccacgccgacggggcctgggcctctgtgctaccgctctcgtcagctacttgattcgcctacacaatgaaattgtctacgccgtggaaaaactctccaaggaaaacaacagctattccgtggatgccgccgaggtcactgaactgcatgtcatcagttatgaagtggagcgggacctgactccactgattctctccaactgccagtaccaggtggaggagggcagagagaccgtgcaggagttcgatctggagaagattcagcggcagatcgtcagccgcttcctccagggcaagccccggctgagcctcaagggaatacccactctggtgtacagacacgactggaactatgaacatctctttatggacatcaagaacaaaatggcacaggactccctccccagctcggtcattagtgccatcagtggacagctgcagtcctacagcgatgcctgtgaagtgctgtctgtcgtagaagtcactctggggtttctgagcacagctggtggggatccaaacatgcagctgaatgtgtatactcaagacatcctgcaaatgggtgatcagacgattcacgtgttaaaggccttaaacagatgccagttaaaacacaccattgccctctggcagttcctgtctgctcataagtctgaacagctgctgcggctgcacaaagagccatttggggaaatcagttcaaggtacaaagcggatctgagcccggaaaatgctaagctcctcagcacattcctaaatcagactggcctagacgccttcctgctagagctgcacgaaatgataatcttgaaactaaagaacccccaaacccaaaccgaggagcgcttccgccctcagtggagcctgagagacactctcgtaagttacatgcaaactaaagaaagtgaaattcttcctgaaatggcatctcagttcccagaagagatactgctcgccagctgtgtctcagtgtggaaaacagctgctgtgctgaaatggaatcgagaaatgagatagaattatttcctcagctatctttggatgactttggagagaagactcctctctcctcgtctgcggcgtggacttgatcatggactggtgcctttgcattcagaaggagagctgtcagcgtagcaccgaattcaagaccaaggcgtgctacctgagctgacagctttttgaaagccgagctgtttctgaaccatgtacatacatgttctgaaactttctcatcattttatgagtactgttcattgagagatgacaatgaagattagatgaaattggaaataaaccaacattgtttacattccaggagacttgtagctcagccacacacgcagtaatgacctgtgcccgttcgcctctggcactgcccacccctctttttttttttcttctaattctgtactcacaaaagagaatctcattttcttctttcttccattcccttaaattctgagtactgtacatatatttctgggttcccacgatgatgtgaaaaactaccagactgttttttgtcttctcacaaagacaagaaaaatcagggcattttgtgagtgccttaagatcaaactaacaagatctgaccctctcccctcacagtgagccactgccccacttcagagggtaagagccaaaagcctcattgtgaaaggcactggacttggaccagggacaccatcagggccttggttttctcacgcataaaatggagagtggattaatcgccaaagattcttctgatctgacattttgaaattgtgagagaaactagatgactgtaaacttggtcacaggcctggttctggcagttctttgcggacttttttctagcattatgccaaataaacatgcagtctcagtgtgctctcgcatgtatgaatatctagtcctttctgtggttctcagccaagacataaaaactaggactcagagcacatacaaaaccagttatgtttcggaaagagggaaaagagtccccgagcccggatcttgtgctgcttttctcactgacgtgttgccttttttctttacaaaatctgctttgatacttaggacctctctggactaatttctcttcctagacagctcagcacagctattgatatgttagaggcagtatccttaatattcattctaaatgagttaacgacttaacttgaaattgggcctaaggagtgagaactacaaaaatacaaaatgcttgtccaggactcagccatgcacaccttgagcagcgccggcaggaggcacggaaggaactgtgctccgttctcctcactgtcatggtgccaccagtgtctgatgaagggcagagtgacccagactgcaggcagtaactgacttcacacagtccctggcatttagtcatctgtgattgttttatcactctggactgtgcagagccacctgccaccgagatctgcattccgactgcctatgaacgggtgtgggggccgggggctggcttgctgaagtcttcaacttgcactcggagctcctttgatacctcagagctggctgtcaggtggcagctcacacccagactcactggccacacctcagcagggggggagtcgagtgtcagtctctttctgtgaaggctttttttttcctttggcctgggaatttttcccatttttatgaaggggttttaaattgtttcattttgtgtgctgtgcttcaaagccttaactgtcaaatcttgcattatcttgtttgtacagaaatatactggcctagcagaggca

SEQ ID NO: 533533 - DNA, 512 bp, Homo sapiens
  misc_feature (211)..(211): n is a, c, g, or t
  misc_feature (218)..(218): n is a, c, g, or t
  misc_feature (274)..(274): n is a, c, g, or t
  misc_feature (277)..(277): n is a, c, g, or t
  misc_feature (280)..(280): n is a, c, g, or t
  misc_feature (339)..(339): n is a, c, g, or t
  misc_feature (355)..(357): n is a, c, g, or t
  misc_feature (385)..(385): n is a, c, g, or t
  misc_feature (396)..(396): n is a, c, g, or t
  misc_feature (399)..(399): n is a, c, g, or t
  misc_feature (416)..(416): n is a, c, g, or t
  misc_feature (431)..(431): n is a, c, g, or t
  misc_feature (450)..(450): n is a, c, g, or t
  misc_feature (474)..(474): n is a, c, g, or t
gcctttgagatgtgattggatcgtaagctgtgccttcattcatgggttaatggattaatgggttatcacaggaatgggactggtggctttataagaagaggaaaagagaactgagctagcatgcccagcccacagagagcctccactagagtgatgctaagtggaaatgtgaggtgcagctgccacagagggcccccaccagggaaatgtntagtgtntagtggatccaggccacaggagagagtgccttgtggagcgctgggagcaggactgnccnccnccaggaccccagaactgtggatcatggcagctgcagcgccccctgggaaagtttaggcnccagctgcaacccctnnnagcagccacgtagctgcacccagcgccncaggcacgggntanctgagcttgggggcccnatccctgctccatgngtcctgagcagcacacgantcgagatatctcttcccacaatantttctctcccagacctttcagcatcgcttcattccctc

SEQ ID NO: 533534 - DNA, 172 bp, Homo sapiens
tatggtcacgacaagtgaaggggagtatatctctgcaacgaactgaatgcccgacccttagacgtttcatgtgtagtgtgctccaacgacaaggttacggaggacggcttccgctggaatggcacacgtacacttgattacacacaagactcacacttggtatccagagtct

SEQ ID NO: 533535 - DNA, 6549 bp, Homo sapiens
  misc_feature (707)..(707): n is a, c, g, or t
ggaagcctgcaaccaggacgctctccaggaggcgggcacattcaggcacaccctctggaagcgggtccaaggtgctgtcacccctctgctggcgagcatgatatcattcatcgacagagacggcaacctagagttactgaccaggccagatactccgccctgggcaagagatctttggatgtttattttcagtgacacgatgcttctgaacattcctcttgtgatgaataatgaaagacataaaggtgagatggcctacatcgtggtgcagaaccacatgaacctttccgagaacgcttccaacaacgtccctttcagctggaaaatcaaggactatctggaggagctgtgggtccaggctcagtacatcacagacgcagaaggactgcccaagaagttcgtggacatctttcagcagactcctctgggcaggtttcttgcccagctccatggagagccgcagcaggaacttcttcagtgttacttgaaggatttcattctcttgaccatgcgtgtgtcaacggaggaggaattaaagtttctgcagatggctctgtggtcctgcactaggaaactgaaagcggcgtcagaagcgcccgaggaagaggtttccttaccgtgggtgcaccttgcctaccagcgtttcagaagccgtctgcagaacttttccagaatcctgaccatctaccctcaggttctccacagcntgatggaagcccgttggaaccatgagctggctggatgtgagatgaccctggacgcatttgccgcaatggcctgcacggagatgctgacaagaaacaccctgaagcccagtccccaggcgtggctacagttggtgaagaatctttccatgccgctggagctcatctgctccgatgagcacatgcaaggcagcgggagcctggcccaggctgtcatcagggaagtcagagcccagtggagtcggattttctccaccgcactcttcgtggagcacgtgctcctaggaaccgagagccgcgtccccgagttacaggggctggtgaccgagcacgtcttcttactagacaagtgtcttcgagagaactctgacgtgaagacgcacgggccttttgaggccgtgatgcgcactctctgtgaatgcaaggagacagccagcaagaccctcagcaggtttgggattcagccgtgctccatctgcctgggagatgcaaaggaccccgtctgtctgccctgcgaccacgtgcactgcctgcgctgcctcagggcctggtttgcctcagagcagatgatatgcccctactgtttaactgccttgccagacgaattctctccagctgtttcccaagcgcacagggaagccattgaaaagcatgcccgcttccggcagatgtgcaacagtttcttcgtagacctggtgtccaccatttgcttcaaggacaacgctccgcctgagaaggaagtgattgagagcctgctctctctcctcttcgtccaaaaggggcgcttaagagatgctgcccagagacactgtgaacacacaaaatctctctctccattcaatgatgttgtggataagactcctgtcatccgctcagtgatactgaaactgcttttgaagtacagctttcatgatgtaaaagattatattcaggaatatttgaccctgttaaaaaagaaagcattcataactgaagataaaactgaactgtacatgctcttcatcaactgcctggaggattcaatacttgagaagaccagtgcttactccagaaatgatgaactgaaccacctagaagaggaaggtcgtttccttaaggcatattctccagcaagccggggccgagagcctgccaacgaggcctcggttgaatacctgcaagaggtggcccggatccgcctctgcctcgacagagctgcagatttcctctcggagcctgagggaggcccagagatggccaaggagaagcagtgctacctgcagcaagtcaagcagttctgtatccgggtggagaacgactggcaccgggtgtacctggtgcggaagctcagcagccagcgggggatggagttcgtgcagggcctctccaagcccggccgcccgcaccagtgggtgtttcccaaggacgttgtcaagcagcaggggctgcggcaggaccacccaggccagatggataggtacctggtgtacggcgatgaatacaaggctctccgtgatgctgtggccaaagctgtcctcgagtgcaagccactgggcattaagactgctctgaaggcctgcaagaccccccaaagccagcagtcagcctacttcctgttaacactgtttagagaggtggctattttgtacagatcccacaatgcaagcctccaccccacgccagagcaatgtgaagctgtgagcaaattcattggcgaatgcaagatcctttcacctcctgatatcagccgttttgcaacatcgctcgtggacaattctgtgccattgttgagggcggggcctagtgacagcaaccttgatggaacggtgacagaaatggccattcatgctgcagccgtccttctgtgtggacagaatgaactcttggagcccctaaagaatctggccttctccccagccaccatggcgcatgcttttcttccaaccatgcctgaagacttgctggctcaagctcggaggtggaagggtctggagcgagtccactggtacacttgtcccaacggccatccttgctccgtgggagagtgtggcaggccgatggaacagagcatctgcattgactgccatgcgccgattggaggcattgaccacaaacctcgggacggctttcatctggtcaaagacaaggcagacagaacgcagaccggccatgtgctgggcaacccgcagcggagagacgtggtgacatgtgaccgagggctgcccccagtggtcttcctccttatccggctactcactcacttggctctgcttctgggagcgtcccagagttcccaggctctgataaacatcattaagcctccagtgagggatccaaaaggctttctgcagcagcacatcctgaaggacctggagcagttggccaagatgctgggacacagtgccgacgagaccatcggcgtggtccacctcgtcctgcgcaggcttctccaagagcagcaccagctctctagcagaaggcttttaaattttgacacagaattgtcaactaaagaaatgaggaacaactgggaaaaggaaatcgcagctgtgatttctcctgaactggagcatctagataaaacccttcccaccatgaataatctcatcagccaagataagcgtatcagctctaaccctgtggccaaaataatatatggtgacccagtgaccttcctgccccacctgccccggaaaagtgtggtccattgctctaagatttggagctgcaggaaaagaattacagttgagtacctccagcacattgtggaacagaaaaatggcaaagaaagagtgcccatcctctggcatttcctgcagaaggaagcagagctgaggctggtaaagttcctgcctgagattttggccttgcaaagggatctagtgaagcagttccagaacgtccagcaagttgaatacagctccatcagaggcttcctcagcaagcacagctcagatgggttgaggcagctgcttcacaacaggatcacagtctttctgtccacatggaacaaactgaggagatcgcttgagacgaacggtgagatcaacctacccaaagactactgcagcactgacttggatctggacactgagtttgagatcctcttgccacgccgacggggcctgggcctctgtgctaccgctctcgtcagctacttgattcgcctacacaatgaaattgtctacgccgtggaaaaactctccaaggaaaacaacagctattccgtggatgccgccgaggtcactgaactgcatgtcatcagttatgaagtggagcgggacctgactccactgattctctccaactgccagtaccaggtggaggagggcagagagaccgtgcaggagttcgatctggagaagattcagcggcagatcgtcagccgcttcctccagggcaagccccggctgagcctcaagggaatacccactctggtgtacagacacgactggaactatgaacatctctttatggacatcaagaacaaaatggcacaggactccctccccagctcggtcattagtgccatcagtggacagctgcagtcctacagcgatgcctgtgaagtgctgtctgtcgtagaagtcactctggggtttctgagcacagctggtggggatccaaacatgcagctgaatgtgtatactcaagacatcctgcaaatgggtgatcagacgattcacgtgttaaaggccttaaacagatgccagttaaaacacaccattgccctctggcagttcctgtctgctcataagtctgaacagctgctgcggctgcacaaagagccatttggggaaatcagttcaaggtacaaagcggatctgagcccggaaaatgctaagctcctcagcacattcctaaatcagactggcctagacgccttcctgctagagctgcacgaaatgataatcttgaaactaaagaacccccaaacccaaaccgaggagcgcttccgccctcagtggagcctgagagacactctcgtaagttacatgcaaactaaagaaagtgaaattcttcctgaaatggcatctcagttcccagaagagatactgctcgccagctgtgtctcagtgtggaaaacagctgctgtgctgaaatggaatcgagaaatgagatagaattatttcctcagctatctttggatgactttggagagaagactcctctctcctcgtctgcggcgtggacttgatcatggactggtgcctttgcattcagaaggagagctgtcagcgtagcaccgaattcaagaccaaggcgtgctacctgagctgacagctttttgaaagccgagctgtttctgaaccatgtacatacatgttctgaaactttctcatcattttatgagtactgttcattgagagatgacaatgaagattagatgaaattggaaataaaccaacattgtttacattccaggagacttgtagctcagccacacacgcagtaatgacctgtgcccgttcgcctctggcactgcccacccctctttttttttttcttctaattctgtactcacaaaagagaatctcattttcttctttcttccattcccttaaattctgagtactgtacatatatttctgggttcccacgatgatgtgaaaaactaccagactgttttttgtcttctcacaaagacaagaaaaatcagggcattttgtgagtgccttaagatcaaactaacaagatctgaccctctcccctcacagtgagccactgccccacttcagagggtaagagccaaaagcctcattgtgaaaggcactggacttggaccagggacaccatcagggccttggttttctcacgcataaaatggagagtggattaatcgccaaagattcttctgatctgacattttgaaattgtgagagaaactagatgactgtaaacttggtcacaggcctggttctggcagttctttgcggacttttttctagcattatgccaaataaacatgcagtctcagtgtgctctcgcatgtatgaatatctagtcctttctgtggttctcagccaagacataaaaactaggactcagagcacatacaaaaccagttatgtttcggaaagagggaaaagagtccccgagcccggatcttgtgctgcttttctcactgacgtgttgccttttttctttacaaaatctgctttgatacttaggacctctctggactaatttctcttcctagacagctcagcacagctattgatatgttagaggcagtatccttaatattcattctaaatgagttaacgacttaacttgaaattgggcctaaggagtgagaactacaaaaatacaaaatgcttgtccaggactcagccatgcacaccttgagcagcgccggcaggaggcacggaaggaactgtgctccgttctcctcactgtcatggtgccaccagtgtctgatgaagggcagagtgacccagactgcaggcagtaactgacttcacacagtccctggcatttagtcatctgtgattgttttatcactctggactgtgcagagccacctgccaccgagatctgcattccgactgcctatgaacgggtgtgggggccgggggctggcttgctgaagtcttcaacttgcactcggagctcctttgatacctcagagctggctgtcaggtggcagctcacacccagactcactggccacacctcagcagggggggagtcgagtgtcagtctctttctgtgaaggctttttttttcctttggcctgggaatttttcccatttttatgaaggggttttaaattgtttcattttgtgtgctgtgcttcaaagccttaactgtcaaatcttgcattatcttgtttgtacagaaatatactggcctagcagaggca

SEQ ID NO: 533536 - DNA, 3369 bp, Homo sapiens
cgggacgctcctcacttcctagatgggatggcggccgggaagaggcgctcctcatttcctagatgggatggcggccgggcagagatgctcctcactttcctccagccgcgagaccccctccccttccgcctcgcggcgcttcctcgctccgcggtcttctctctccacccccgacaccgcggggctccccccgcccgcccacggcgggccccggctgcccgatccccctcgcttcccgcgctctccagcggggccccagccccggccccctctctccctcccttctctctaattccccttccggacgctgccatcatgttgaagcctcagccgctacaacagccctcccagccccagcagccgccccccacgcaacaggccgtggcccgtcggccccccgggggcaccagccctcccaacggcggcctcccggggccgctggccacctctgcggctcctcccgggcctccagcggccgcctccccctgcctggggcctgtggccgctgccgggagcgggctccgccggggagccgaaggcatcttggcgccgcagccgccgccgccgcagcaacaccaggagaggccgggggcagccgccatcggcagcgccaggggacagagcacaggaaagggacccccacagtcacctgtgtttgaaggcgtctacaacaattccagaatgctgcatttccttacagctgttgtgggctccacttgtgatgtaaaggtgaaaaatggtaccacttatgagggtatcttcaagacgctaagctcaaagtttgaactagccgtggatgctgtgcaccggaaagcatctgagccagcaggtggccctcgtcgggaggacattgtggacaccatggtgtttaagccaagtgatgtcatgcttgttcacttccgaaatgttgacttcaactatgctactaaagacaagttcaccgattcagccattgccatgaactcgaaagtgaatggggaacacaaagagaaggtgcttcagcgctgggaggggggtgacagcaacagcgacgactatgacctcgagtctgacatgtccaatggatgggaccccaatgaaatgttcaagttcaatgaggagaactacggtgtgaagactacctatgatagcagtctttcttcttatacggtgcccttagaaaaggacaactcagaagagtttcgtcagcgagagctgcgtgcggcccagttggctcgagagattgaatcaagcccccagtaccgcctacggatcgccatggagaacgacgatgggcgcactgaagaggagaagcacagtgcagtccagcggcagggctcagggcgggagagccccagcttggcatccagggaggggaagtatatccctctgcctcaacgagtccgggaaggtccccggggaggagttcgatgcagcagctctcggggcggtcggcctggccttagctctttgccacctcgtggccctcaccatctggacaacagcagccctggcccaggttctgaggcccgtggtatcaatggaggcccttcccgcatgtccccaaaggcacagcggcctctgagaggtgccaagactctgtcttcgcccagtaataggccttctggagaaacttctgttccacctcctcctgcagtgggccggatgtatcccccgcgttctcccaagtctgctgcccctgccccaatctcagtacccttctgcagagcagcctaccccccaagccctttatgccactgttcaccagtcctacccacaccatgccacacagctccatgcccaccagccgcagccggctaccacgcctactggaagccagccgcagtcccagcatgcggcccccagtcctgtccagcatcaggcggggcaggccccacacttgggcagtggacagccacagcagaatctgtaccacccaggggccctgacaggcacgccgccctctctgccaccgggaccttctgcccagtcccctcagagcagcttcccccagccagccgctgtgtatgccatccaccaccagcagctgccccacggcttcaccaacatggcccatgttacccaggcccatgtccaaactggaatcacagcagccccgccccctcaccctggggctccccacccgccccaggtgatgctgctgcacccaccccagagtcatggggggcccccccaaggcgcggtgccccagagtggggtgcctgcactctcagcttccacaccctcaccctacccctacatcggacacccccaaggtgagcagcctggccaggcgcctggatttccaggaggagccgatgacaggattcgtgagttctcattagctgggggaatttggcatggaagagctgaggggctgcaggtggggcaggatgcacgggttctgggtggggagtgaggggtcttggaggcagggctgtcccacagggcgcccgccgacctgcacctgtctgtgaagtatgtagggtgggcagaagccacagtcgccgccgccaggggcttgctcctggctctgtcctttgcttccctccgtcctcgctcagttgtgatccagcagcccccctccccactgcctccccagctctcagtgaccccgactgtctcctgacttagccgaggtaaggtcagtgcagcagacagggccagactggggtgtggggggctgagctgggcacatgagtgagggctctggcttactgggaaacagcgattgacctgtgcttctgacagcccccgagacaccttgaggaggccgctccttcccagacacacccccacgcccccactggacggcattggaggaagggacagctgcttgggttctaatgctcctgctctcttctctttcccctccaaccagttcaatctcatccctcccagcagctccccttccaccccccggggaactgaagattgtcctggccgcgacctgagacctccatgagtggagggaagagtgatctatgtctcttcccccagcagctcggaccactcccagccccccatccccccgttccccaggggagctggggaattcctgccaagcaccttgaatgggaggggcctcacagagggcagggccagggtccagcaggggtggggggttcctgctctgcccctgcccgtccccacccagtcttgccctcccatcctctcatctattcccccgctggagacggaagatcttttattttctattatttataacttcagacttgggccccctgttctttctttcccattaacttgagtgacctgtgtgagagacagacagatgccccacgaggatggctggacaaggacttttactttttattacataaaaatattaaaaaataaataaaaaaaataaaattttaaactaactta

SEQ ID NO: 533537 - DNA, 600 bp, Homo sapiens
  misc_feature (211)..(211): n is a, c, g, or t
  misc_feature (218)..(218): n is a, c, g, or t
  misc_feature (274)..(274): n is a, c, g, or t
  misc_feature (277)..(277): n is a, c, g, or t
  misc_feature (280)..(280): n is a, c, g, or t
  misc_feature (339)..(339): n is a, c, g, or t
  misc_feature (355)..(357): n is a, c, g, or t
  misc_feature (385)..(385): n is a, c, g, or t
  misc_feature (396)..(396): n is a, c, g, or t
  misc_feature (399)..(399): n is a, c, g, or t
  misc_feature (416)..(416): n is a, c, g, or t
  misc_feature (431)..(431): n is a, c, g, or t
gcctttgagatgtgattggatcgtaagctgtgccttcattcatgggttaatggattaatgggttatcacaggaatgggactggtggctttataagaagaggaaaagagaactgagctagcatgcccagcccacagagagcctccactagagtgatgctaagtggaaatgtgaggtgcagctgccacagagggcccccaccagggaaatgtntagtgtntagtggatccaggccacaggagagagtgccttgtggagcgctgggagcaggactgnccnccnccaggaccccagaactgtggatcatggcagctgcagcgccccctgggaaagtttaggcnccagctgcaacccctnnnagcagccacgtagctgcacccagcgccncaggcacgggntanctgagcttgggggcccnatccctgctccatgngtcctgagcagcccccgaagtcaaaaaagattatttttttcccccagataccttttttttcccatgaccctttaacagcatttggttcattcccctccccttcccagggtgatttgaggtaaactttgaagtaaaataaaagctgggtttgagcatcatttgtatttca

SEQ ID NO: 533538 - DNA, 6063 bp, Homo sapiens
  misc_feature (216)..(216): n is a, c, g, or t
agctcggtaccgtgcttcaactccactctgtgaatggagagcttctggggctggttccaagtgggagatttcttcacaaggcacataccttagctgaattcagagatgttaaggacacatctcgctgacgcttctcacatcctagacaatgaaagtttaggtcgcaagcctgggacacaagtatacatgcagctaacagccggggcctctggtggnccggtgggaggggcaccgctcagccacgccctgctgtccgtctccccagaccctggacgcatttgccgcaatggcctgcacggagatgctgacaagaaacaccctgaagcccagtccccaggcgtggctacagttggtgaagaatctttccatgccgctggagctcatctgctccgatgagcacatgcaaggcagcgggagcctggcccaggctgtcatcagggaagtcagagcccagtggagtcggattttctccaccgcactcttcgtggagcacgtgctcctaggaaccgagagccgcgtccccgagttacaggggctggtgaccgagcacgtcttcttactagacaagtgtcttcgagagaactctgacgtgaagacgcacgggccttttgaggccgtgatgcgcactctctgtgaatgcaaggagacagccagcaagaccctcagcaggtttgggattcagccgtgctccatctgcctgggagatgcaaaggaccccgtctgtctgccctgcgaccacgtgcactgcctgcgctgcctcagggcctggtttgcctcagagcagatgatatgcccctactgtttaactgccttgccagacgaattctctccagctgtttcccaagcgcacagggaagccattgaaaagcatgcccgcttccggcagatgtgcaacagtttcttcgtagacctggtgtccaccatttgcttcaaggacaacgctccgcctgagaaggaagtgattgagagcctgctctctctcctcttcgtccaaaaggggcgcttaagagatgctgcccagagacactgtgaacacacaaaatctctctctccattcaatgatgttgtggataagactcctgtcatccgctcagtgatactgaaactgcttttgaagtacagctttcatgatgtaaaagattatattcaggaatatttgaccctgttaaaaaagaaagcattcataactgaagataaaactgaactgtacatgctcttcatcaactgcctggaggattcaatacttgagaagaccagtgcttactccagaaatgatgaactgaaccacctagaagaggaaggtcgtttccttaaggcatattctccagcaagccggggccgagagcctgccaacgaggcctcggttgaatacctgcaagaggtggcccggatccgcctctgcctcgacagagctgcagatttcctctcggagcctgagggaggcccagagatggccaaggagaagcagtgctacctgcagcaagtcaagcagttctgtatccgggtggagaacgactggcaccgggtgtacctggtgcggaagctcagcagccagcgggggatggagttcgtgcagggcctctccaagcccggccgcccgcaccagtgggtgtttcccaaggacgttgtcaagcagcaggggctgcggcaggaccacccaggccagatggataggtacctggtgtacggcgatgaatacaaggctctccgtgatgctgtggccaaagctgtcctcgagtgcaagccactgggcattaagactgctctgaaggcctgcaagaccccccaaagccagcagtcagcctacttcctgttaacactgtttagagaggtggctattttgtacagatcccacaatgcaagcctccaccccacgccagagcaatgtgaagctgtgagcaaattcattggcgaatgcaagatcctttcacctcctgatatcagccgttttgcaacatcgctcgtggacaattctgtgccattgttgagggcggggcctagtgacagcaaccttgatggaacggtgacagaaatggccattcatgctgcagccgtccttctgtgtggacagaatgaactcttggagcccctaaagaatctggccttctccccagccaccatggcgcatgcttttcttccaaccatgcctgaagacttgctggctcaagctcggaggtggaagggtctggagcgagtccactggtacacttgtcccaacggccatccttgctccgtgggagagtgtggcaggccgatggaacagagcatctgcattgactgccatgcgccgattggaggcattgaccacaaacctcgggacggctttcatctggtcaaagacaaggcagacagaacgcagaccggccatgtgctgggcaacccgcagcggagagacgtggtgacatgtgaccgagggctgcccccagtggtcttcctccttatccggctactcactcacttggctctgcttctgggagcgtcccagagttcccaggctctgataaacatcattaagcctccagtgagggatccaaaaggctttctgcagcagcacatcctgaaggacctggagcagttggccaagatgctgggacacagtgccgacgagaccatcggcgtggtccacctcgtcctgcgcaggcttctccaagagcagcaccagctctctagcagaaggcttttaaattttgacacagaattgtcaactaaagaaatgaggaacaactgggaaaaggaaatcgcagctgtgatttctcctgaactggagcatctagataaaacccttcccaccatgaataatctcatcagccaagataagcgtatcagctctaaccctgtggccaaaataatatatggtgacccagtgaccttcctgccccacctgccccggaaaagtgtggtccattgctctaagatttggagctgcaggaaaagaattacagttgagtacctccagcacattgtggaacagaaaaatggcaaagaaagagtgcccatcctctggcatttcctgcagaaggaagcagagctgaggctggtaaagttcctgcctgagattttggccttgcaaagggatctagtgaagcagttccagaacgtccagcaagttgaatacagctccatcagaggcttcctcagcaagcacagctcagatgggttgaggcagctgcttcacaacaggatcacagtctttctgtccacatggaacaaactgaggagatcgcttgagacgaacggtgagatcaacctacccaaagactactgcagcactgacttggatctggacactgagtttgagatcctcttgccacgccgacggggcctgggcctctgtgctaccgctctcgtcagctacttgattcgcctacacaatgaaattgtctacgccgtggaaaaactctccaaggaaaacaacagctattccgtggatgccgccgaggtcactgaactgcatgtcatcagttatgaagtggagcgggacctgactccactgattctctccaactgccagtaccaggtggaggagggcagagagaccgtgcaggagttcgatctggagaagattcagcggcagatcgtcagccgcttcctccagggcaagccccggctgagcctcaagggaatacccactctggtgtacagacacgactggaactatgaacatctctttatggacatcaagaacaaaatggcacaggactccctccccagctcggtcattagtgccatcagtggacagctgcagtcctacagcgatgcctgtgaagtgctgtctgtcgtagaagtcactctggggtttctgagcacagctggtggggatccaaacatgcagctgaatgtgtatactcaagacatcctgcaaatgggtgatcagacgattcacgtgttaaaggccttaaacagatgccagttaaaacacaccattgccctctggcagttcctgtctgctcataagtctgaacagctgctgcggctgcacaaagagccatttggggaaatcagttcaaggtacaaagcggatctgagcccggaaaatgctaagctcctcagcacattcctaaatcagactggcctagacgccttcctgctagagctgcacgaaatgataatcttgaaactaaagaacccccaaacccaaaccgaggagcgcttccgccctcagtggagcctgagagacactctcgtaagttacatgcaaactaaagaaagtgaaattcttcctgaaatggcatctcagttcccagaagagatactgctcgccagctgtgtctcagtgtggaaaacagctgctgtgctgaaatggaatcgagaaatgagatagaattatttcctcagctatctttggatgactttggagagaagactcctctctcctcgtctgcggcgtggacttgatcatggactggtgcctttgcattcagaaggagagctgtcagcgtagcaccgaattcaagaccaaggcgtgctacctgagctgacagctttttgaaagccgagctgtttctgaaccatgtacatacatgttctgaaactttctcatcattttatgagtactgttcattgagagatgacaatgaagattagatgaaattggaaataaaccaacattgtttacattccaggagacttgtagctcagccacacacgcagtaatgacctgtgcccgttcgcctctggcactgcccacccctctttttttttttcttctaattctgtactcacaaaagagaatctcattttcttctttcttccattcccttaaattctgagtactgtacatatatttctgggttcccacgatgatgtgaaaaactaccagactgttttttgtcttctcacaaagacaagaaaaatcagggcattttgtgagtgccttaagatcaaactaacaagatctgaccctctcccctcacagtgagccactgccccacttcagagggtaagagccaaaagcctcattgtgaaaggcactggacttggaccagggacaccatcagggccttggttttctcacgcataaaatggagagtggattaatcgccaaagattcttctgatctgacattttgaaattgtgagagaaactagatgactgtaaacttggtcacaggcctggttctggcagttctttgcggacttttttctagcattatgccaaataaacatgcagtctcagtgtgctctcgcatgtatgaatatctagtcctttctgtggttctcagccaagacataaaaactaggactcagagcacatacaaaaccagttatgtttcggaaagagggaaaagagtccccgagcccggatcttgtgctgcttttctcactgacgtgttgccttttttctttacaaaatctgctttgatacttaggacctctctggactaatttctcttcctagacagctcagcacagctattgatatgttagaggcagtatccttaatattcattctaaatgagttaacgacttaacttgaaattgggcctaaggagtgagaactacaaaaatacaaaatgcttgtccaggactcagccatgcacaccttgagcagcgccggcaggaggcacggaaggaactgtgctccgttctcctcactgtcatggtgccaccagtgtctgatgaagggcagagtgacccagactgcaggcagtaactgacttcacacagtccctggcatttagtcatctgtgattgttttatcactctggactgtgcagagccacctgccaccgagatctgcattccgactgcctatgaacgggtgtgggggccgggggctggcttgctgaagtcttcaacttgcactcggagctcctttgatacctcagagctggctgtcaggtggcagctcacacccagactcactggccacacctcagcagggggggagtcgagtgtcagtctctttctgtgaaggctttttttttcctttggcctgggaatttttcccatttttatgaaggggttttaaattgtttcattttgtgtgctgtgcttcaaagccttaactgtcaaatcttgcattatcttgtttgtacagaaatatactggcctagcagaggca

SEQ ID NO: 533539 - DNA, 2036 bp, Homo sapiens
gatacacgggactcattgaaagagatctttgggacagggtctcaagccactccctccctcttctaggattttctcgcatccaattgtcctccctggttgggcagaataaatccaccagtaccccaacttctccggggccccggactcattcaactccctccatcccggtgctgacagcaggccagagtgggctatacagcccccagtacatctcctacatacctcagatccacatgggaccagctgtgcaggcacctcagatgtatccatatcctgtatccaattcagtgcctgggcagcagggcaagtaccggggagcaaaaggctcccttcctccgcagcgctcggaccaacaccagccagcctcagccccgccgatgatgcaggccgccgcggctgctggcccgcctctggtggctgccacgccctattcttcctacatcccctacaaccctcagcagttcccaggccagccagccatgatgcagcccatggcccactacccctcacagccggtgtttgcccccatgcttcagagcaacccacgcatgctgacgtcgggcagccatccccaggccatcgtgtcatcctctacccctcagtacccttctgcagagcagcctaccccccaagccctttatgccactgttcaccagtcctacccacaccatgccacacagctccatgcccaccagccgcagccggctaccacgcctactggaagccagccgcagtcccagcatgcggcccccagtcctgtccagcatcaggcggggcaggccccacacttgggcagtggacagccacagcagaatctgtaccacccaggggccctgacaggcacgccgccctctctgccaccgggaccttctgcccagtcccctcagagcagcttcccccagccagccgctgtgtatgccatccaccaccagcagctgccccacggcttcaccaacatggcccatgttacccaggcccatgtccaaactggaatcacagcagccccgccccctcaccctggggctccccacccgccccaggtgatgctgctgcacccaccccagagtcatggggggcccccccaaggcgcggtgccccagagtggggtgcctgcactctcagcttccacaccctcaccctacccctacatcggacacccccaaggtgagcagcctggccaggcgcctggatttccaggaggagccgatgacaggattcgtgagttctcattagctgggggaatttggcatggaagagctgaggggctgcaggtggggcaggatgcacgggttctgggtggggagtgaggggtcttggaggcagggctgtcccacagggcgcccgccgacctgcacctgtctgtgaagtatgtagggtgggcagaagccacagtcgccgccgccaggggcttgctcctggctctgtcctttgcttccctccgtcctcgctcagttgtgatccagcagcccccctccccactgcctccccagctctcagtgaccccgactgtctcctgacttagccgagttcaatctcatccctcccagcagctccccttccaccccccggggaactgaagattgtcctggccgcgacctgagacctccatgagtggagggaagagtgatctatgtctcttcccccagcagctcggaccactcccagccccccatccccccgttccccaggggagctggggaattcctgccaagcaccttgaatgggaggggcctcacagagggcagggccagggtccagcaggggtggggggttcctgctctgcccctgcccgtccccacccagtcttgccctcccatcctctcatctattcccccgctggagacggaagatcttttattttctattatttataacttcagacttgggccccctgttctttctttcccattaacttgagtgacctgtgtgagagacagacagatgccccacgaggatggctggacaaggacttttactttttattacataaaaatattaaaaaataaataaaaaaaataaaattttaaactaactta

SEQ ID NO: 533540 - DNA, 1751 bp, Homo sapiens
tggaaaaacccccgaggggcccttttttttttaggtgggcccttataaaaaccccagagggggaaaagcccttatagagggggaaacacggggggagggggaattgaggggagggggggagagggtaaagagagggggaaaagaggaaaaccccgaaaacaaaagcccccctcaacaccccactttcgggggacccaggaagaagacaatagtgaggccctctcgggtgtatcacccacaagaggaggtcttcgcgcggggtccgcggggggtgttcacagagagcagagaggacacaaagaacacacctcgagggagagagagggccggcggcccctctctaaagaagagagggccgcccatatgggagagggagaacgcaccacagagagagacacagagtgtgttcgcgcggtggccccacaagagagagagggagaggggggcgctctccctctctccaccctcccccgcgagaggcccagaaaataaaatccaagcgcgcggagaggcgcgagagggagtgagggggtgacacccactcatctcccgagaagaggcgcaatatacacgaggagagagagagctcactcacacgcgcggctgctctctctatagagagaagatgtgctcctaccacgagagggcggggggagcagcactattgtaactctcacaacgggggggagagaggagagacacgccgcgaaaaactaattgagcgggcgcgggggggagaacccaacaaaagaaatcatctgtgtgggaaaaaaaagagggggttctccacgagaggaaacgacagctgcggtgatgagtaaaacagacaacactgatgtgtgacgcacacacccggcagagagtagactcaacataaaaaaacaatgcagacgaggggggggaggagaaaaaacaacacactctactactcaacagttgaggagagcaccgacgcccccaacagaggaaaggagggcggaagagtagacacacacaagagaggaagcgaagggccagaggattatgttgggagggcacccaaaaagaagatgagcccagtatcaagcagaaaccaacaacacacgcagtcagactcaagagtagtaggagacaaagaaactattcacaacagaagagagagggaagccatccactcaacactcaccatgcaagaggaagaatcaccaccctaaggagggagagagggaggagagaggcgcccctccacaaaaacaatccatcccaagaaaaaagggggcggccgggggaggcgaaagaaataagagacgatcctccctcctcaggaggaagaagagggaggagaccacgcttcacccgaggagggagagcaaactaaatagatgtcgtcgggccggccgaccatggttagagagggggtggagtactaacttaaagtacgacaagagcggagagggaggtgtagtagtccccccgtgaaaagagcacgcgagtattagcaatccgcaagaaaagtagtttcgagaataggaggaagaaaatctccccgaaggggggggagaaaaaagtatgctcccaccccagagggggcgcacggagaagaaggagcgcaatccagtagtggcacccagagggggagcaccaacatggcgagggagagaagacggggcgggcagccagaacaaatgcgaggtgggcacaccaatgatggaagcgacgaggagaggagcccaccaggcatcctactgatgagctaacaggagagagcagac

SEQ ID NO: 533541 - DNA, 353 bp, Homo sapiens
cccagctcattcttctgctgaaaagaggcaggagaacagtgagaacagggtggtggtccccaagggaagaatgatcaatggagacagtttcatgatgccattcatgaaattcatcagaatttcatgatgccccattgggtgactatcagggttttaagttattcttgagagtttctcgaacgcttttctgtctttgttttctaaaagactttgatgatggcagtgggagctcagattcatgttggagttaccattctggtttgccaaggtagtggaggaatgtggaaagacgtcgctgcactttagtcctgtacttctgacctgtactcaaaggcctttcccttcctaccctg

SEQ ID NO: 533542 - DNA, 3480 bp, Homo sapiens
gaccattgtgaggacaatgttaatttaaaataataacaataatagcaagaagaagtccggccccatgacaagaaaatctgctcccacctcagggcttttaaattttgacacagaattgtcaactaaagaaatgaggaacaactgggaaaaggaaatcgcagctgtgatttctcctgaactggagcatctagataaaacccttcccaccatgaataatctcatcagccaagataagcgtatcagctctaaccctgtggccaaaataatatatggtgacccagtgaccttcctgccccacctgccccggaaaagtgtggtccattgctctaagatttggagctgcaggaaaagaattacagttgagtacctccagcacattgtggaacagaaaaatggcaaagaaagagtgcccatcctctggcatttcctgcagaaggaagcagagctgaggctggtaaagttcctgcctgagattttggccttgcaaagggatctagtgaagcagttccagaacgtccagcaagttgaatacagctccatcagaggcttcctcagcaagcacagctcagatgggttgaggcagctgcttcacaacaggatcacagtctttctgtccacatggaacaaactgaggagatcgcttgagacgaacggtgagatcaacctacccaaagactactgcagcactgacttggatctggacactgagtttgagatcctcttgccacgccgacggggcctgggcctctgtgctaccgctctcgtcagctacttgattcgcctacacaatgaaattgtctacgccgtggaaaaactctccaaggaaaacaacagctattccgtggatgccgccgaggtcactgaactgcatgtcatcagttatgaagtggagcgggacctgactccactgattctctccaactgccagtaccaggtggaggagggcagagagaccgtgcaggagttcgatctggagaagattcagcggcagatcgtcagccgcttcctccagggcaagccccggctgagcctcaagggaatacccactctggtgtacagacacgactggaactatgaacatctctttatggacatcaagaacaaaatggcacaggactccctccccagctcggtcattagtgccatcagtggacagctgcagtcctacagcgatgcctgtgaagtgctgtctgtcgtagaagtcactctggggtttctgagcacagctggtggggatccaaacatgcagctgaatgtgtatactcaagacatcctgcaaatgggtgatcagacgattcacgtgttaaaggccttaaacagatgccagttaaaacacaccattgccctctggcagttcctgtctgctcataagtctgaacagctgctgcggctgcacaaagagccatttggggaaatcagttcaaggtacaaagcggatctgagcccggaaaatgctaagctcctcagcacattcctaaatcagactggcctagacgccttcctgctagagctgcacgaaatgataatcttgaaactaaagaacccccaaacccaaaccgaggagcgcttccgccctcagtggagcctgagagacactctcgtaagttacatgcaaactaaagaaagtgaaattcttcctgaaatggcatctcagttcccagaagagatactgctcgccagctgtgtctcagtgtggaaaacagctgctgtgctgaaatggaatcgagaaatgagatagaattatttcctcagctatctttggatgactttggagagaagactcctctctcctcgtctgcggcgtggacttgatcatggactggtgcctttgcattcagaaggagagctgtcagcgtagcaccgaattcaagaccaaggcgtgctacctgagctgacagctttttgaaagccgagctgtttctgaaccatgtacatacatgttctgaaactttctcatcattttatgagtactgttcattgagagatgacaatgaagattagatgaaattggaaataaaccaacattgtttacattccaggagacttgtagctcagccacacacgcagtaatgacctgtgcccgttcgcctctggcactgcccacccctctttttttttttcttctaattctgtactcacaaaagagaatctcattttcttctttcttccattcccttaaattctgagtactgtacatatatttctgggttcccacgatgatgtgaaaaactaccagactgttttttgtcttctcacaaagacaagaaaaatcagggcattttgtgagtgccttaagatcaaactaacaagatctgaccctctcccctcacagtgagccactgccccacttcagagggtaagagccaaaagcctcattgtgaaaggcactggacttggaccagggacaccatcagggccttggttttctcacgcataaaatggagagtggattaatcgccaaagattcttctgatctgacattttgaaattgtgagagaaactagatgactgtaaacttggtcacaggcctggttctggcagttctttgcggacttttttctagcattatgccaaataaacatgcagtctcagtgtgctctcgcatgtatgaatatctagtcctttctgtggttctcagccaagacataaaaactaggactcagagcacatacaaaaccagttatgtttcggaaagagggaaaagagtccccgagcccggatcttgtgctgcttttctcactgacgtgttgccttttttctttacaaaatctgctttgatacttaggacctctctggactaatttctcttcctagacagctcagcacagctattgatatgttagaggcagtatccttaatattcattctaaatgagttaacgacttaacttgaaattgggcctaaggagtgagaactacaaaaatacaaaatgcttgtccaggactcagccatgcacaccttgagcagcgccggcaggaggcacggaaggaactgtgctccgttctcctcactgtcatggtgccaccagtgtctgatgaagggcagagtgacccagactgcaggcagtaactgacttcacacagtccctggcatttagtcatctgtgattgttttatcactctggactgtgcagagccacctgccaccgagatctgcattccgactgcctatgaacgggtgtgggggccgggggctggcttgctgaagtcttcaacttgcactcggagctcctttgatacctcagagctggctgtcaggtggcagctcacacccagactcactggccacacctcagcagggggggagtcgagtgtcagtctctttctgtgaaggctttttttttcctttggcctgggaatttttcccatttttatgaaggggttttaaattgtttcattttgtgtgctgtgcttcaaagccttaactgtcaaatcttgcattatcttgtttgtacagaaatatactggcctagcagaggca

SEQ ID NO: 533543 - DNA, 2607 bp, Homo sapiens
cgggacgctcctcacttcctagatgggatggcggccgggaagaggcgctcctcatttcctagatgggatggcggccgggcagagatgctcctcactttcctccagccgcgagaccccctccccttccgcctcgcggcgcttcctcgctccgcggtcttctctctccacccccgacaccgcggggctccccccgcccgcccacggcgggccccggctgcccgatccccctcgcttcccgcgctctccagcggggccccagccccggccccctctctccctcccttctctctaattccccttccggacgctgccatcatgttgaagcctcagccgctacaacagccctcccagccccagcagccgccccccacgcaacaggccgtggcccgtcggccccccgggggcaccagccctcccaacggcggcctcccggggccgctggccacctctgcggctcctcccgggcctccagcggccgcctccccctgcctggggcctgtggccgctgccgggagcgggctccgccggggagccgaaggcatcttggcgccgcagccgccgccgccgcagcaacaccaggagaggccgggggcagccgccatcggcagcgccaggggacagagcacaggaaagggacccccacagtcacctgtgtttgaaggcgtctacaacaattccagaatgctgcatttccttacagctgttgtgggctccacttgtgatgtaaaggtgaaaaatggtaccacttatgagggtatcttcaagacgctaagctcaaagtttgaactagccgtggatgctgtgcaccggaaagcatctgagccagcaggtggccctcgtcgggaggacattgtggacaccatggtgtttaagccaagtgatgtcatgcttgttcacttccgaaatgttgacttcaactatgctactaaagacaagttcaccgattcagccattgccatgaactcgaaagtgaatggggaacacaaagagaaggtgcttcagcgctgggaggggggtgacagcaacagcgacgactatgacctcgagtctgacatgtccaatggatgggaccccaatgaaatgttcaagttcaatgaggagaactacggtgtgaagactacctatgatagcagtctttcttcttatacggtgcccttagaaaaggacaactcagaagagtttcgtcagcgagagctgcgtgcggcccagttggctcgagagattgaatcaagcccccagtaccgcctacggatcgccatggagaacgacgatgggcgcactgaagaggagaagcacagtgcagtccagcggcagggctcagggcgggagagccccagcttggcatccagggaggggaagtatatccctctgcctcaacgagtccgggaaggtccccggggaggagttcgatgcagcagctctcggggcggtcggcctggccttagctctttgccacctcgtggccctcaccatctggacaacagcagccctggcccaggttctgaggcccgtggtatcaatggaggcccttcccgcatgtccccaaaggcacagcggcctctgagaggtgccaagactctgtcttcgcccagtaataggccttctggagaaacttctgttccacctcctcctgcagtgggccggatgtatcccccgcgttctcccaagtctgctgcccctgccccaatctcagcttcctgtccagagcctcccatcggctcggcagtgccaacctcttcagcctccatccctgtgacctcatcagtctcagatcctggagtgggctccatttctccagcttctccaaagatctccctggcccccacagatgtaaaagaactctctaccaaggaacctgggagaactctggagccccaggagctggctcggatagctgggaaagtccctggtcttcagaatgaacagaaacgattccaactggaagaactgagaaagtttggggcccagtttaagcttcagcccagtagctcccctgagaacagcctggatccttttcctccccggatcttaaaggaggagcccaaaggaaaggagaaagaggttgatggtctgttgacttcagagcccatggggtctcccgtctcctccaagacagagtccgtatcggataaggaggacaaaccacccctggcaccatcaggaggcactgaggggccagagcagcccccaccaccttgtccaagccaaactggcagccccccggtgggcctcatcaagggagaagacaaagatgagggccctgttgctgaacaagtaaagaaatcaacgttgaaccctaatgctaaggagttcaatcctacaaagcctctgctgtctgtgaataaatccaccagtaccccaacttctccggggccccggactcattcaactccctccatcccggtgctgacagcaggccagagtgggctatacagcccccagtacatctcctacatacctcagatccacatgggaccagctgtgcaggcacctcagatgtatccatatcctgtatccaattcagtgcctgggcagcagggcaagtacctgagaacagcctggatccttttcctccccggatcaattaaaggagagcccaaagggatc

SEQ ID NO: 533544 - DNA, 347 bp, Homo sapiens
accctggcggacttttgattgttcgcgtgatactcaagaccatggactgtaccgcttttatcatcacaacaacttgatacgctactggactgcttattagagtcacatagatttgcccatagcgtttaattccaacaacgaacagaggactgccctgtggaaagcaggattcaaaggcaaatccaagcccaaccttctgaagcaggagaccagcagcctggcctgtgggctgcgcattctcttccggatgtacatggatgagagccgcgttagtgcctgggaggaggtccagcagaggcttttgaatgtctgcagtgaagcactaagttacttcctcactctaacat

SEQ ID NO: 533545 - DNA, 7809 bp, Homo sapiens
  misc_feature (436)..(436): n is a, c, g, or t
tgatctagaggtcccatgcgcgacgcttccatcaacgtccctttcagctggaaaatcaaggactatctggaggagctgtgggtccaggctcagtacatcacagacgcagaaggactgcccaagaagttcgtggacatctttcagcagactcctctgggcaggtttcttgcccagctccatggagagccgcagcaggaacttcttcagtgttacttgaaggatttcattctcttgaccatgcgtgtgtcaacggaggaggaattaaagtttctgcagatggctctgtggtcctgcactaggaaactgaaagcggcgtcagaagcgcccgaggaagaggtttccttaccgtgggtgcaccttgcctaccagcgtttcagaagccgtctgcagaacttttccagaatcctgaccatctaccctcaggttctccacagcntgatggaagcccgttggaaccatgagctggctggatgtgagatgaccctggacgcatttgccgcaatggcctgcacggagatgctgacaagaaacaccctgaagcccagtccccaggcgtggctacagttggtgaagaatctttccatgccgctggagctcatctgctccgatgagcacatgcaaggcagcgggagcctggcccaggctgtcatcagggaagtcagagcccagtggagtcggattttctccaccgcactcttcgtggagcacgtgctcctaggaaccgagagccgcgtccccgagttacaggggctggtgaccgagcacgtcttcttactagacaagtgtcttcgagagaactctgacgtgaagacgcacgggccttttgaggccgtgatgcgcactctctgtgaatgcaaggagacagccagcaagaccctcagcaggtttgggattcagccgtgctccatctgcctgggagatgcaaaggaccccgtctgtctgccctgcgaccacgtgcactgcctgcgctgcctcagggcctggtttgcctcagagcagatgatatgcccctactgtttaactgccttgccagacgaattctctccagctgtttcccaagcgcacagggaagccattgaaaagcatgcccgcttccggcagatgtgcaacagtttcttcgtagacctggtgtccaccatttgcttcaaggacaacgctccgcctgagaaggaagtgattgagagcctgctctctctcctcttcgtccaaaaggggcgcttaagagatgctgcccagagacactgtgaacacacaaaatctctctctccattcaatgatgttgtggataagactcctgtcatccgctcagtgatactgaaactgcttttgaagtacagctttcatgatgtaaaagattatattcaggaatatttgaccctgttaaaaaagaaagcattcataactgaagataaaactgaactgtacatgctcttcatcaactgcctggaggattcaatacttgagaagaccagtgcttactccagaaatgatgaactgaaccacctagaagaggaaggtcgtttccttaaggcatattctccagcaagccggggccgagagcctgccaacgaggcctcggttgaatacctgcaagaggtggcccggatccgcctctgcctcgacagagctgcagatttcctctcggagcctgagggaggcccagagatggccaaggagaagcagtgctacctgcagcaagtcaagcagttctgtatccgggtggagaacgactggcaccgggtgtacctggtgcggaagctcagcagccagcgggggatggagttcgtgcagggcctctccaagcccggccgcccgcaccagtgggtgtttcccaaggacgttgtcaagcagcaggggctgcggcaggaccacccaggccagatggataggtacctggtgtacggcgatgaatacaaggctctccgtgatgctgtggccaaagctgtcctcgagtgcaagccactgggcattaagactgctctgaaggcctgcaagaccccccaaagccagcagtcagcctacttcctgttaacactgtttagagaggtggctattttgtacagatcccacaatgcaagcctccaccccacgccagagcaatgtgaagctgtgagcaaattcattggcgaatgcaagatcctttcacctcctgatatcagccgttttgcaacatcgctcgtggacaattctgtgccattgttgagggcggggcctagtgacagcaaccttgatggaacggtgacagaaatggccattcatgctgcagccgtccttctgtgtggacagaatgaactcttggagcccctaaagaatctggccttctccccagccaccatggcgcatgcttttcttccaaccatgcctgaagacttgctggctcaagctcggaggtggaagggtctggagcgagtccactggtacacttgtcccaacggccatccttgctccgtgggagagtgtggcaggccgatggaacagagcatctgcattgactgccatgcgccgattggaggcattgaccacaaacctcgggacggctttcatctggtcaaagacaaggcagacagaacgcagaccggccatgtgctgggcaacccgcagcggagagacgtggtgacatgtgaccgagggctgcccccagtggtcttcctccttatccggctactcactcacttggctctgcttctgggagcgtcccagagttcccaggctctgataaacatcattaagcctccagtgagggatccaaaaggctttctgcagcagcacatcctgaaggacctggagcagttggccaagatgctgggacacagtgccgacgagaccatcggcgtggtccacctcgtcctgcgcaggcttctccaagagcagcaccagctctctagcagaaggcttttaaattttgacacagaattgtcaactaaagaaatgaggaacaactgggaaaaggaaatcgcagctgtgatttctcctgaactggagcatctagataaaacccttcccaccatgaataatctcatcagccaagataagcgtatcagctctaaccctgtggccaaaataatatatggtgacccagtgaccttcctgccccacctgccccggaaaagtgtggtccattgctctaagatttggagctgcaggaaaagaattacagttgagtacctccagcacattgtggaacagaaaaatggcaaagaaagagtgcccatcctctggcatttcctgcagaaggaagcagagctgaggctggtaaagttcctgcctgagattttggccttgcaaagggatctagtgaagcagttccagaacgtccagcaagttgaatacagctccatcagaggcttcctcagcaagcacagctcagatgggttgaggcagctgcttcacaacaggatcacagtctttctgtccacatggaacaaactgaggagatcgcttgagacgaacggtgagatcaacctacccaaagactactgcagcactgacttggatctggacactgagtttgagatcctcttgccacgccgacggggcctgggcctctgtgctaccgctctcgtcagctacttgattcgcctacacaatgaaattgtctacgccgtggaaaaactctccaaggaaaacaacagctattccgtggatgccgccgaggtcactgaactgcatgtcatcagttatgaagtggagcgggacctgactccactgattctctccaactgccagtaccaggtggaggagggcagagagaccgtgcaggagttcgatctggagaagattcagcggcagatcgtcagccgcttcctccagggcaagccccggctgagcctcaagggaatacccactctggtgtacagacacgactggaactatgaacatctctttatggacatcaagaacaaaatggcacaggtgatcccgataaacctgatcctgtgcacggggctttctgccttctcagtgtgtttccctccgtgttaggcctactccagccttgccccgggtgtttgctgtgagcccacagtttctgcggcctcccttacagagagcaagcaagacagcaaatcagcaagttttcttgtagagtaaaagcagattgacatcttgtgggtttgattcttaggaatgatgttgatgcatggccatgcctgctgaagcgggaagtccatggaaccgatttgttcctgctctccgcatgcgggtactgataggtagacctgtgtgtctccatggcctccaggaactgcctgcacaccgtgcgcccaagtgtcagctgttagagagttggccccccgcatgtggcttgggcagtgaaggggctcggctctcttaccaggtggtgagatgccagaaacccagcccacagacatccctctcctgcttttcatttcccaggactccctccccagctcggtcattagtgccatcagtggacagctgcagtcctacagcgatgcctgtgaagtgctgtctgtcgtagaagtcactctggggtttctgagcacagctggtggggatccaaacatgcagctgaatgtgtatactcaagacatcctgcaaatgggtgatcagacgattcacgtgttaaaggccttaaacagatgccagttaaaacacaccattgccctctggcagttcctgtctgctcataagtctgaacagctgctgcggctgcacaaagagccatttggggaaatcagttcaaggtacaaagcggatctgagcccggaaaatgctaagctcctcagcacattcctaaatcagactggcctagacgccttcctgctagagctgcacgaaatgataatcttgaaactaaagaacccccaaacccaaaccgaggagcgcttccgccctcagtggagcctgagagacactctcgtaagttacatgcaaactaaagaaagtgaaattcttcctgaaatggcatctcagttcccagaagagatactgctcgccagctgtgtctcagtgtggaaaacagctgctgtgctgaaatggaatcgagaaatgagatagaattatttcctcagctatctttggatgactttggagagaagactcctctctcctcgtctgcggcgtggacttgatcatggactggtgcctttgcattcagaaggagagctgtcagcgtagcaccgaattcaagaccaaggcgtgctacctgagctgacagctttttgaaagccgagctgtttctgaaccatgtacatacatgttctgaaactttctcatcattttatgagtactgttcattgagagatgacaatgaagattagatgaaattggaaataaaccaacattgtttacattccaggagacttgtagctcagccacacacgcagtaatgacctgtgcccgttcgcctctggcactgcccacccctctttttttttttcttctaattctgtactcacaaaagagaatctcattttcttctttcttccattcccttaaattctgagtactgtacatatatttctgggttcccacgatgatgtgaaaaactaccagactgttttttgtcttctcacaaagacaagaaaaatcagggcattttgtgagtgccttaagatcaaactaacaagatctgaccctctcccctcacagtgagccactgccccacttcagagggtaagagccaaaagcctcattgtgaaaggcactggacttggaccagggacaccatcagggccttggttttctcacgcataaaatggagagtggattaatcgccaaagattcttctgatctgacattttgaaattgtgagagaaactagatgactgtaaacttggtcacaggcctggttctggcagttctttgcggacttttttctagcattatgccaaataaacatgcagtctcagtgtgctctcgcatgtatgaatatctagtcctttctgtggttctcagccaagacataaaaactaggactcagagcacatacaaaaccagttatgtttcggaaagagggaaaagagtccccgagcccggatcttgtgctgcttttctcactgacgtgttgccttttttctttacaaaatctgctttgatacttaggacctctctggactaatttctcttcctagacagctcagcacagctattgatatgttagaggcagtatccttaatattcattctaaatgagttaacgacttaacttgaaattgggcctaaggagtgagaactacaaaaatacaaaatgcttgtccaggactcagccatgcacaccttgagcagcgccggcaggaggcacggaaggaactgtgctccgttctcctcactgtcatggtgccaccagtgtctgatgaagggcagagtgacccagactgcaggcagtaactgacttcacacagtccctggcatttagtcatctgtgattgttttatcactctggactgtgcagagccacctgccaccgagatctgcattccgactgcctatgaacgggtgtgggggccgggggctggcttgctgaagtcttcaacttgcactcggagctcctttgatacctcagagctggctgtcaggtggcagctcacacccagactcactggccacacctcagcagggggggagtcgagtgtcagtctctttctgtgaaggctttttttttcctttggcctgggaatttttcccatttttatgaaggggttttaaattgtttcattttgtgtgctgtgcttcaaagccttaactgtcaaatcttgcattatcttgtttgtacagaaatatactggcctagcagaggcaaaaaaaaaaaatgaattttattttacttgtcacacctgtcttaataaactggagttttgctgctaaagaactcttctctctgggggcagagcttctatttatggcacatagacatcagctaggcttttgggaatcgtttgtgttctttgtggaaatgtcctttagaagcacccatgaagtagtgtgttcagactgtgcacacagaaaacaggctctgccttcacatgtgagacggtggacttttcctctggacaaaatgacagcatcctggcgactccacagtggagctgagcgccactccctgtagccgatctgggactgaaacgcttacacctctgcctcagaaggagtcccccatgccctgcctgaaatgacttcactggacacagcggggctgcagctaacggggtacaggtaggagctaactaacttcacccctgagtccacttgcggggtaagagataaacagtaacccttccaggagcccactgacgttggagtgctaaaaatgccccttcagggggaaaactgcattttctcttccaaaaaggaaaggttcttccaggcgagaaacctgtggtctagaaccacagcaagaagaggaggcatgctggcctgcaccggaagactcactttgtctgccctgcgccagcctcacctcaccctgcagttcccgtttccgccatggatgcctcatcaccaaccctgaccttccccctcccaaccctttattcatcctcactcccactcatacccgcctccctggacagttccctgctgcagagttctttctgctttcagccctaccttggtggtgatttacctgaaaatcttcacaactgatcattatctccttctctttgagacctgactgaaaaaattaggtgtgcacacctgtaatcccagctacctgggaggctgaggtatgaggattgcttgagcctgggagtttgaggctgcagtgagctatgattgcaccactgcactccaacctgggtgacagagtgagaccctgtctcaaaaaaaaataaaataacataaggacctt

SEQ ID NO: 533546 - DNA, 2377 bp, Homo sapiens
  misc_feature (222)..(222): n is a, c, g, or t
  misc_feature (258)..(258): n is a, c, g, or t
tcggagcaagctggggaacaacagagggctggcgcaccatctcggtgatccggttcctcaacaagcaagatctggctcgcggagaaagtcctggctggggaaatcgaagattggaggactactttccgagaatttggctcgctacactaactccgtgaggatgctactcccggagcccgggaaaggacccagcgcgtgacccggggccaatgtacttcattncgagaggagtttctggaggatcagcacggccagtgngagatgggcgtcactactggctaccctcatttcacctgcgcgggggacacggagaacatccgccgggtgtccaacgacggccgtgacatcattcagcgcatgcaccttcgtcagtacgagcggctcagacgtctgagcagcggggcaagtaccggggagcaaaaggctcccttcctccgcagcgctcggaccaacaccagccagcctcagccccgccgatgatgcaggccgccgcggctgctggcccgcctctggtggctgccacgccctattcttcctacatcccctacaaccctcagcagttcccaggccagccagccatgatgcagcccatggcccactacccctcacagccggtgtttgcccccatgcttcagagcaacccacgcatgctgacgtcgggcagccatccccaggccatcgtgtcatcctctacccctcagtacccttctgcagagcagcctaccccccaagccctttatgccactgttcaccagtcctacccacaccatgccacacagctccatgcccaccagccgcagccggctaccacgcctactggaagccagccgcagtcccagcatgcggcccccagtcctgtccagcatcaggcggggcaggccccacacttgggcagtggacagccacagcagaatctgtaccacccaggggccctgacaggcacgccgccctctctgccaccgggaccttctgcccagtcccctcagagcagcttcccccagccagccgctgtgtatgccatccaccaccagcagctgccccacggcttcaccaacatggcccatgttacccaggcccatgtccaaactggaatcacagcagccccgccccctcaccctggggctccccacccgccccaggtgatgctgctgcacccaccccagagtcatggggggcccccccaaggcgcggtgccccagagtggggtgcctgcactctcagcttccacaccctcaccctacccctacatcggacacccccaaggtgagcagcctggccaggcgcctggatttccaggaggagccgatgacaggattcgtgagttctcattagctgggggaatttggcatggaagagctgaggggctgcaggtggggcaggatgcacgggttctgggtggggagtgaggggtcttggaggcagggctgtcccacagggcgcccgccgacctgcacctgtctgtgaagtatgtagggtgggcagaagccacagtcgccgccgccaggggcttgctcctggctctgtcctttgcttccctccgtcctcgctcagttgtgatccagcagcccccctccccactgcctccccagctctcagtgaccccgactgtctcctgacttagccgaggtaaggtcagtgcagcagacagggccagactggggtgtggggggctgagctgggcacatgagtgagggctctggcttactgggaaacagcgattgacctgtgcttctgacagcccccgagacaccttgaggaggccgctccttcccagacacacccccacgcccccactggacggcattggaggaagggacagctgcttgggttctaatgctcctgctctcttctctttcccctccaaccagttcaatctcatccctcccagcagctccccttccaccccccggggaactgaagattgtcctggccgcgacctgagacctccatgagtggagggaagagtgatctatgtctcttcccccagcagctcggaccactcccagccccccatccccccgttccccaggggagctggggaattcctgccaagcaccttgaatgggaggggcctcacagagggcagggccagggtccagcaggggtggggggttcctgctctgcccctgcccgtccccacccagtcttgccctcccatcctctcatctattcccccgctggagacggaagatcttttattttctattatttataacttcagacttgggccccctgttctttctttcccattaacttgagtgacctgtgtgagagacagacagatgccccacgaggatggctggacaaggacttttactttttattacataaaaatattaaaaaataaataaaaaaaataaaattttaaactaactta

SEQ ID NO: 533547 - DNA, 3130 bp, Homo sapiens
agtgatctaaggatccgatcacgtgcattgtggaacagaaaaatggcaaagaaagagtgcccatcctctggcatttcctgcagaaggaagcagagctgaggctggtaaagttcctgcctgagattttggccttgcaaagggatctagtgaagcagttccagaacgtccagcaagttgaatacagctccatcagaggcttcctcagcaagcacagctcagatgggttgaggcagctgcttcacaacaggatcacagtctttctgtccacatggaacaaactgaggagatcgcttgagacgaacggtgagatcaacctacccaaagactactgcagcactgacttggatctggacactgagtttgagatcctcttgccacgccgacggggcctgggcctctgtgctaccgctctcgtcagctacttgattcgcctacacaatgaaattgtctacgccgtggaaaaactctccaaggaaaacaacagctattccgtggatgccgccgaggtcactgaactgcatgtcatcagttatgaagtggagcgggacctgactccactgattctctccaactgccagtaccaggtggaggagggcagagagaccgtgcaggagttcgatctggagaagattcagcggcagatcgtcagccgcttcctccagggcaagccccggctgagcctcaagggaatacccactctggtgtacagacacgactggaactatgaacatctctttatggacatcaagaacaaaatggcacaggactccctccccagctcggtcattagtgccatcagtggacagctgcagtcctacagcgatgcctgtgaagtgctgtctgtcgtagaagtcactctggggtttctgagcacagctggtggggatccaaacatgcagctgaatgtgtatactcaagacatcctgcaaatgggtgatcagacgattcacgtgttaaaggccttaaacagatgccagttaaaacacaccattgccctctggcagttcctgtctgctcataagtctgaacagctgctgcggctgcacaaagagccatttggggaaatcagttcaaggtacaaagcggatctgagcccggaaaatgctaagctcctcagcacattcctaaatcagactggcctagacgccttcctgctagagctgcacgaaatgataatcttgaaactaaagaacccccaaacccaaaccgaggagcgcttccgccctcagtggagcctgagagacactctcgtaagttacatgcaaactaaagaaagtgaaattcttcctgaaatggcatctcagttcccagaagagatactgctcgccagctgtgtctcagtgtggaaaacagctgctgtgctgaaatggaatcgagaaatgagatagaattatttcctcagctatctttggatgactttggagagaagactcctctctcctcgtctgcggcgtggacttgatcatggactggtgcctttgcattcagaaggagagctgtcagcgtagcaccgaattcaagaccaaggcgtgctacctgagctgacagctttttgaaagccgagctgtttctgaaccatgtacatacatgttctgaaactttctcatcattttatgagtactgttcattgagagatgacaatgaagattagatgaaattggaaataaaccaacattgtttacattccaggagacttgtagctcagccacacacgcagtaatgacctgtgcccgttcgcctctggcactgcccacccctctttttttttttcttctaattctgtactcacaaaagagaatctcattttcttctttcttccattcccttaaattctgagtactgtacatatatttctgggttcccacgatgatgtgaaaaactaccagactgttttttgtcttctcacaaagacaagaaaaatcagggcattttgtgagtgccttaagatcaaactaacaagatctgaccctctcccctcacagtgagccactgccccacttcagagggtaagagccaaaagcctcattgtgaaaggcactggacttggaccagggacaccatcagggccttggttttctcacgcataaaatggagagtggattaatcgccaaagattcttctgatctgacattttgaaattgtgagagaaactagatgactgtaaacttggtcacaggcctggttctggcagttctttgcggacttttttctagcattatgccaaataaacatgcagtctcagtgtgctctcgcatgtatgaatatctagtcctttctgtggttctcagccaagacataaaaactaggactcagagcacatacaaaaccagttatgtttcggaaagagggaaaagagtccccgagcccggatcttgtgctgcttttctcactgacgtgttgccttttttctttacaaaatctgctttgatacttaggacctctctggactaatttctcttcctagacagctcagcacagctattgatatgttagaggcagtatccttaatattcattctaaatgagttaacgacttaacttgaaattgggcctaaggagtgagaactacaaaaatacaaaatgcttgtccaggactcagccatgcacaccttgagcagcgccggcaggaggcacggaaggaactgtgctccgttctcctcactgtcatggtgccaccagtgtctgatgaagggcagagtgacccagactgcaggcagtaactgacttcacacagtccctggcatttagtcatctgtgattgttttatcactctggactgtgcagagccacctgccaccgagatctgcattccgactgcctatgaacgggtgtgggggccgggggctggcttgctgaagtcttcaacttgcactcggagctcctttgatacctcagagctggctgtcaggtggcagctcacacccagactcactggccacacctcagcagggggggagtcgagtgtcagtctctttctgtgaaggctttttttttcctttggcctgggaatttttcccatttttatgaaggggttttaaattgtttcattttgtgtgctgtgcttcaaagccttaactgtcaaatcttgcattatcttgtttgtacagaaatatactggcctagcagaggca

SEQ ID NO: 533548 - DNA, 1906 bp, Homo sapiens
  misc_feature (1865)..(1865): n is a, c, g, or t
  misc_feature (1868)..(1868): n is a, c, g, or t
  misc_feature (1873)..(1873): n is a, c, g, or t
cgggacgctcctcacttcctagatgggatggcggccgggaagaggcgctcctcatttcctagatgggatggcggccgggcagagatgctcctcactttcctccagccgcgagaccccctccccttccgcctcgcggcgcttcctcgctccgcggtcttctctctccacccccgacaccgcggggctccccccgcccgcccacggcgggccccggctgcccgatccccctcgcttcccgcgctctccagcggggccccagccccggccccctctctccctcccttctctctaattccccttccggacgctgccatcatgttgaagcctcagccgctacaacagccctcccagccccagcagccgccccccacgcaacaggccgtggcccgtcggccccccgggggcaccagccctcccaacggcggcctcccggggccgctggccacctctgcggctcctcccgggcctccagcggccgcctccccctgcctggggcctgtggccgctgccgggagcgggctccgccggggagccgaaggcatcttggcgccgcagccgccgccgccgcagcaacaccaggagaggccgggggcagccgccatcggcagcgccaggggacagagcacaggaaagggacccccacagtcacctgtgtttgaaggcgtctacaacaattccagaatgctgcatttccttacagctgttgtgggctccacttgtgatgtaaaggtgaaaaatggtaccacttatgagggtatcttcaagacgctaagctcaaagtttgaactagccgtggatgctgtgcaccggaaagcatctgagccagcaggtggccctcgtcgggaggacattgtggacaccatggtgtttaagccaagtgatgtcatgcttgttcacttccgaaatgttgacttcaactatgctactaaagacaagttcaccgattcagccattgccatgaactcgaaagtgaatggggaacacaaagagaaggtgcttcagcgctgggaggggggtgacagcaacagcgacgactatgacctcgagtctgacatgtccaatggatgggaccccaatgaaatgttcaagttcaatgaggagaactacggtgtgaagactacctatgatagcagtctttcttcttatacggtgcccttagaaaaggacaactcagaagagtttcgtcagcgagagctgcgtgcggcccagttggctcgagagattgaatcaagcccccagtaccgcctacggatcgccatggagaacgacgatgggcgcactgaagaggagaagcacagtgcagtccagcggcagggctcagggcgggagagccccagcttggcatccagggaggggaagtatatccctctgcctcaacgagtccgggaaggtccccggggaggagttcgatgcagcagctctcggggcggtcggcctggccttagctctttgccacctcgtggccctcaccatctggacaacagcagccctggcccaggttctgaggcccgtggtatcaatggaggcccttcccgcatgtccccaaaggcacagcggcctctgagaggtgccaagactctgtcttcgcccagtaataggccttctggagaaacttctgttccacctcctcctgcagtgggccggatgtatcccccgcgttctcccaagtctgctgcccctgccccaatctcagtacccttctgcagagcagcctaccccccaagccctttatgccactgttcaccagtcctacccacacatgccacacagtccatgccaccagcgcgagcgggtacacgctatggaagcagcggagtccagcatgggccccagtctgtcagctcaggggggaggcccacttgggnggnagccnggatttggtgccccggcctaagggccggctttg

SEQ ID NO: 533549 - DNA, 1672 bp, Homo sapiens
cgggacgctcctcacttcctagatgggatggcggccgggaagaggcgctcctcatttcctagatgggatggcggccgggcagagatgctcctcactttcctccagccgcgagaccccctccccttccgcctcgcggcgcttcctcgctccgcggtcttctctctccacccccgacaccgcggggctccccccgcccgcccacggcgggccccggctgcccgatccccctcgcttcccgcgctctccagcggggccccagccccggccccctctctccctcccttctctctaattccccttccggacgctgccatcatgttgaagcctcagccgctacaacagccctcccagccccagcagccgccccccacgcaacaggccgtggcccgtcggccccccgggggcaccagccctcccaacggcggcctcccggggccgctggccacctctgcggctcctcccgggcctccagcggccgcctccccctgcctggggcctgtggccgctgccgggagcgggctccgccggggagccgaaggcatcttggcgccgcagccgccgccgccgcagcaacaccaggagaggccgggggcagccgccatcggcagcgccaggggacagagcacaggaaagggacccccacagtcacctgtgtttgaaggcgtctacaacaattccagaatgctgcatttccttacagctgttgtgggctccacttgtgatgtaaaggtgaaaaatggtaccacttatgagggtatcttcaagacgctaagctcaaagtttgaactagccgtggatgctgtgcaccggaaagcatctgagccagcaggtggccctcgtcgggaggacattgtggacaccatggtgtttaagccaagtgatgtcatgcttgttcacttccgaaatgttgacttcaactatgctactaaagacaagttcaccgattcagccattgccatgaactcgaaagtgaatggggaacacaaagagaaggtgcttcagcgctgggaggggggtgacagcaacagcgacgactatgacctcgagtctgacatgtccaatggatgggaccccaatgaaatgttcaagttcaatgaggagaactacggtgtgaagactacctatgatagcagtctttcttcttatacggtgcccttagaaaaggacaactcagaagagtttcgtcagcgagagctgcgtgcggcccagttggctcgagagattgaatcaagcccccagtaccgcctacggatcgccatggagaacgacgatgggcgcactgaagaggagaagcacagtgcagtccagcggcagggctcagggcgggagagccccagcttggcatccagggaggggaagtatatccctctgcctcaacgagtccgggaaggtccccggggaggagttcgatgcagcagctctcggggcggtcggcctggccttagctctttgccacctcgtggccctcaccatctggacaacagcagccctggcccaggttctgaggcccgtggtatcaatggaggtgagttatgaggtgactttgaggaagagggcagggaaggggatgccaaggaggtgggagggtaattggaggggtttgggtgtgttggaatgacgctgcatcggtgggaatgtaataggtcgtctgcctcctgacattttcttctca

SEQ ID NO: 533550 - DNA, 268 bp, Homo sapiens
  misc_feature (129)..(129): n is a, c, g, or t
tggccggcgcacagcttctcaagtagctgggattataggcaagtgccagcacacctggttaattttttcatttttttgtagagatagggtctcactctattgcccaggctggtctccgaactccctggngctgaagtgatccacctgccttggcctccgaaggtgccgggaacacaggcatgagccaccgtgctgggcccaataatttttttttttttttttggggcatagagtcgtgggcccgggtcactcccgagggcggggaggt

SEQ ID NO: 533551 - DNA, 947 bp, Homo sapiens
cgggacgctcctcacttcctagatgggatggcggccgggaagaggcgctcctcatttcctagatgggatggcggccgggcagagatgctcctcactttcctccagccgcgagaccccctccccttccgcctcgcggcgcttcctcgctccgcggtcttctctctccacccccgacaccgcggggctccccccgcccgcccacggcgggccccggctgcccgatccccctcgcttcccgcgctctccagcggggccccagccccggccccctctctccctcccttctctctaattccccttccggacgctgccatcatgttgaagcctcagccgctacaacagccctcccagccccagcagccgccccccacgcaacaggccgtggcccgtcggccccccgggggcaccagccctcccaacggcggcctcccggggccgctggccacctctgcggctcctcccgggcctccagcggccgcctccccctgcctggggcctgtggccgctgccgggagcgggctccgccggggagccgaaggcatcttggcgccgcagccgccgccgccgcagcaacaccaggagaggccgggggcagccgccatcggcagcgccaggggacagagcacaggaaagggacccccacagtcacctgtgtttgaaggcgtctacaacaattccagaatgctgcatttccttacagctgttgtggtaagttggtacttaacccccgggttgtttaaggaacgtaatgcatctactttctggagacactcttcttatttttcccactctgccagggctccacttgtgatgtaaaggtgaaaaatggtaccacttatgagggtatcttcaagacgctaagctcaaaggtcagtgtactcaaatttaattatttttggagttgcagaggaggaggagaatgaaatagccattgaaggtgtcaattt

SEQ ID NO: 533552 - DNA, 249 bp, Homo sapiens
  misc_feature (20)..(20): n is a, c, g, or t
  misc_feature (106)..(107): n is a, c, g, or t
  misc_feature (119)..(119): n is a, c, g, or t
  misc_feature (121)..(121): n is a, c, g, or t
  misc_feature (129)..(129): n is a, c, g, or t
  misc_feature (133)..(133): n is a, c, g, or t
  misc_feature (168)..(168): n is a, c, g, or t
  misc_feature (223)..(223): n is a, c, g, or t
  misc_feature (228)..(228): n is a, c, g, or t
  misc_feature (237)..(238): n is a, c, g, or t
  misc_feature (245)..(245): n is a, c, g, or t
  misc_feature (247)..(247): n is a, c, g, or t
gtaaattttttgttgttttnctaacgggtcccttttggactctgcagccagccacaggaactttttcttcccttctgttacagagaaggtagctagtatagatgcnncacctactgggngntcttccanagcncagggtaatctgctgctcagttcctcttgcaaatnttcaacaagacggtaaattattttgtgaagtttaatttttactcctttttttgcngctgnatgttggtnnaacttgncncg

SEQ ID NO: 533553 - DNA, 154 bp, Homo sapiens
cgtgctcagccatctcaagccgcgtctgcaccccgacgatttaccgctgctcaagcgtgcgctggtgtaacacctgaaaggccgcagcgaggattacctggtggagtaccgggtgcgccatggcgattgtgctattgaaacttctaaaactagg

SEQ ID NO: 533554 - DNA, 161 bp, Homo sapiens
cggtaaaactaagccctcgttattgccaattgtcacgccatcataatgcacctggttcattagcgcaacattttcctgatccatcgtggcatcagtgagcggatgtaggcgatcgatggcatcgcaataatcaaacggataatgcgtcgttggggctgctt

SEQ ID NO: 533555 - DNA, 1218 bp, Homo sapiens
  misc_feature (746)..(746): n is a, c, g, or t
tctcgcgtttcaggttggtggtgtgttgtgcgccgcactttcgcggtgggtcactcatcgtcttctccgaccactaatgtaacgtgggcgtacccccacgcctgttgttccccccccccgtaggtgtgcctcaccggggttttaccagcagttggtggccccccccacattattttttcggggggacccccacggcagtggtaccacacggtggtacttccccgggggggacccctcccccggtccccctcctcccctctttcacaagggaggccttttgacacctctttttcaaagaagacattctgggggaacaaacaagaagatggtctgtgcgacacaccagtctttgggagggaatcccgtgtgtccccacagaaccaaggccaagattcttgccttcccttggagagaaaggatcccctggcctgggggaaaattcgaaagggactttggagggaacttacttttcccgagaattttcgcctcccgtcaccctactccctgagggatgcctactctcccgggccccggtaaggggggacccccccgcgtgtgaacccggggccccagatactttcacttcgcgagatggaaattttctcgaggattcacggccctcgccccgtggaagatttgggccgttcaactaactgggttacccctccacttgtcacccttgcgcctcgtgggagaccctcgaggagaacactctccgcccgctgtggttttccagacgagctgcnccgtggagcactccactttcacgcgcaatgccacccttctgtccagtaccgagacctgctcttatagaagggagaccccccaaaatttatatttaacgcccttatagccaccaattaattataaaatgtaaacagtaattggtaccagaccaggttatatccccccccatagggcatgagtttaccaagccacctttccccttcccccgagtgagttttgcggagaaccccccttttccccttcagcttgcgttagaatgttcccaaatttatgaaagcttaaaggcggcctaccagaaaaaggaaaaaaggcccaccaaaagttccctctcactttccagtaaaaataaattaaaccagccagccagccaacaccaaattaaatgtaaattaaagaaaccaaatgtaaattaatattttgttgtgcagccatttaaaaaaatccaaaattaaaattaaatgtgagccaaga

SEQ ID NO: 533556 - DNA, 692 bp, Homo sapiens
ggtatggtccacgtgagctgatctcctctctggagcaccggggcagcaggagggagccaagacaatgcaaattccagtgaacattcccgtgcctgtgctccggctgccccggggccctgatggcttcagccgtggtttgcccctgatggacgcagagcccccttgaggccagaggttcctgaaatccaggagtgtcctgactatgctcaagaatccctggaatcccaggagtcagcgggcacgagccggccacttcgggagcgttgacctccgcaggcctgcgtgggccaatggatgggtcatgcaggtgagacttcacgttgcaatcgagggtgtgcgtgtgtgtcgcccacttgtggagccaccgacctgggatgtggacaactttctacgtgtcacagatgcagcattcccaataggtgtgcaaagccagaggcgctgactccgaggtgtagtatgacattattgttcactatacacttcaagccgagttagaagactactggtgttcacattgtgtctgctgtgagggctacagtgacctgtatcccaggggaacgtcgcccaatggttcccacgagctcagggaacctcgtggggcccgccagtgggaggtttaatgacgcgtcccttggacagtttttggagtcccaacgcctttaaccggcaacgctctggaagattccgtgaga

SEQ ID NO: 533557 - DNA, 204 bp, Homo sapiens
ttactagggagtacttcccctaccctaacggcaagccaagctcaaatgtatctccgagctcaaatgctgattctcacacccgctaccactgtggctgctgtacagtctgacattcctgttgtctcatcctaatcttcatcttcctgtcagtctgcagctactcatatcaacctctacactgctcctacacctgcagtcgacgcg

SEQ ID NO: 533558 - DNA, 229 bp, Homo sapiens
agactccgatctccaacccctgaccgtctcggtacccacacttccacatgctgactgtccttgtctatgcccaaaagaaatgaaaactagtactcaagcaaatacacacacaaatgttcacatggcactattcacaatagccaaaaggtagaaggagcccaaaagtacatcaacagatgaatagattaacaaaaatgagccgggcacagtggctcactcttgtaatccc

SEQ ID NO: 533559 - DNA, 709 bp, Homo sapiens
  misc_feature (478)..(478): n is a, c, g, or t
tgttcctgacccacaggggaagctgtcctcagttgtagccgtcttgactggatgagtcctggcagtctttctaggcgaaccaagaatgtttgtgtgagggaaggtgtttgctgttgctttactgctgtctgtatgtgccagtgctggaacataatttggaagattctgaataattacttacttattctcaaagaaaatctttgaaagaatcatgaggtcaagtcaagaacatgaaaatttatattttagtacagtataaagaacatttgactctggtaattttatctgcattttctcctgacttttttttccctctatataattttaaataaatcagcctccctaactttcacttgtctcttcttttaaacatgaatacttaaccacgtaattaatatccgaagtcccttccaactctaaaaagctatcattctagattagaacttatatcaataaagatatgaccaatcagatttantcatccaaacatacctgtttaacttctattatagacttatctccatataatatgatatataccttcccaataactctttttttgtttcctttcagaacattttgcacataacgaaatcacatcatagagatgttaccacctaaccctttcttatcccttgcctttctttacccccaccttttactctttcatatcccatttatatcatataccatttacatataaaataaa

SEQ ID NO: 533560 - DNA, 116 bp, Homo sapiens
atcgatgaaggtctgtttttgtccccgattgtaatgcaaaatccttgctccagtaaataaaaaagaatatagaattctttttttttttaaagaaggaatcactttcctatacatct

SEQ ID NO: 533561 - DNA, 442 bp, Homo sapiens
atgcttaaggctcatggtgctccatatctctctgatgtgtttatcatccaaatctctactgtggattgaagcccatggacagagtgtggctcagggctgagagccaaggcacctgaccctcagattcctggattgaagagcccaggcacctgatcctcagattcctgggttcatgtctggatcttctctttccttgatatgggatgttgggcaaaattcttgaagttttgatattcaattctccctagcttcaatttttaaaatatttttttcatattatatctttgatcattatgtcctatgctcactccctatctccagaagagggtaaaagaggtttaatttgtaaaaggattagcaactgtatttaactggtaattatcaactgtgttgagttgtaaccccaggcacagtgtctataataaagtaagattattaaaat

SEQ ID NO: 533562 - DNA, 674 bp, Homo sapiens
ggcggaaggggtgcccgggacgaagccatggccctggaggcggcgggagggccgccggaggaaacgctgtcactgtggaaacgggagcaagctcggctgaaggcccacgtcgtagaccgggacaccgaggcgtggcagcgagaccccgccttctcgggtctgcagagggtcgggggcgttgacgtgtccttcgtgaaaggggacagtgtccgcgcttgtgcttccctggtggtgctcagcttccctgagctcgaggtccttcttgtggatggaaacggggtactccaccaccgaggctttggggtggcctgccaccttggcgtccttacagacctgccgtgtgttggggtggccaagaaacttctgcaggtggatgggctggagaacaacgccctgcacaaggagaaggtaccacagcctccaggcccccctcccgccaagacctgcctggagctgccacccacactcttcctacctcaccttcccctgcatcttcctcctctgggaccccatgttggcactgggagtgagacactcacaatggagggagctgttgacacccccagctgtttcactggatggcagattctgagagcagagactgtgtctctcattcctcctagctctcaggtgcctgcatggagaagttgcttaataaaaatctgttgagttga

SEQ ID NO: 533563 - DNA, 451 bp, Homo sapiens
cctcacctgtgcgagtgggggcagtgcctgcagactagtgctccaggagactgggggcaactgtactgaatcccaacagaaattgtgacaatttaattctcggccgggtgcaggggctcacacctgtaatcccagcactttgggaggttgaggcgggcagatcacctgaggtcaggagttcgagaccaacctggccaacatggtgaaaccccatctctactaaaaaaaaaaatacaaaaattagctggccgcgatggcaggcacctgtaatctcagctactcaggaggctgaggctggagaatcacttgaacctgggaggcagaggttgcagtgagctgagatcgtgccactgcactccagcctgggcaacagaataagactctgtctcaactacaataaaataatttctataatttaggaggaaaatggagtagagtatttttatttttt

SEQ ID NO: 533564 - DNA, 114 bp, Homo sapiens
  misc_feature (37)..(37): n is a, c, g, or t
ggccaatgatcccccctctgatgccatgcctcccgangcccttccagaatgacggacccgccgtcgcagcaccggtaggtcgctcgcccacagccttcaaccctgatgtagagt

SEQ ID NO: 533565 - DNA, 176 bp, Homo sapiens
atcgagtcttaccagttctggtccccactcccggctgtcaccatattgatgccgaacttagtgcggacaccagatcggcatagcgcactacagcccagaacgcctggactcaagcgatcctccagcctcagctcccgagtagctgggactacaggcacgcgccaacgcgccgggct

SEQ ID NO: 533566 - DNA, 447 bp, Homo sapiens
ggctcggtactggggtaccctatcttacaccttatacaaaaattactcaagatggattaaagatttaaacatagacctaaaaccataaaaaccctagaagaaaacctaggcaataccattcaggacataggcatgggcaaggacttcatgactaaaacaccaaaagcaatggcaacaaaagccaaaattgacaaatgggatctgattaaactaaagagcttctgcacagcaaaagaaactaccatcagagtgaacaggcaacctacagaatggaagaaaatttttgcaatctatccatcttacaaagagctaatatccagaatttaaaggaacttaaacaaatttacaaaaaaaaaaatcaaacaaccccatcaaaaagtgggcgaaggatatgaacacacacttctcaaaaaaaataagatatttatgcttccatttctttagagg

SEQ ID NO: 533567 - DNA, 888 bp, Homo sapiens
ggcgcagcgactcatcctatcgataaggttcagttagccaaggtggaggatgggaaaagaatggaactgtcccagctactcaatgagatcagggcaaactatgaaaagatcctcaccagaaatcagatagagacggtgctctcaacaaggatccagctagaagaagacattagcaaaaaatggggacaaggtagtagaagagggctgagagggctgatcaagcagaactcaaggaggcccgacgccagtggcaccacctgcaagtggaaatggaatctctccatgctgtggaaaggggccttgaaaatccctacatgccagcgagcagcattaccagatgccagtgaaggacctagagactgtgatggaccggactagaaaaagagctacaggaagtaaggcgcggatcgaaaagcagttcaagagcacgagatgcttctcaacacgaagatgaggtggaacaagaaatagcaattatcgccacctcctagaaaaggaagaatcagatatcatggtgtgtatccaaggtgggaaaaaaggacaaaaggcctaccacaagtagagtgggtttgggtttaccatcagcattattactgaaatatcttttactacaaaagtccccacaacagtttgagactgccatgtcgaaccgtcaccaaccaggcatctaaatgggagtttcggtaggggagcctgagtcattggcctattcagaccgacacagggtgagtattaagatgggggtctgcttaaggaacctcgatgggaaagttgtcctcgatgactcctttagagcctggtgggggtgtggctaccaggacccaatgagcggtagaaaaagggtcctaacccagacagaattggtgatgggggggaccccagaatttg

SEQ ID NO: 533568 - DNA, 435 bp, Homo sapiens
catagctgactcctgagcataaaacgccgcctggcagattcggagatcgtgctgaaggctggatcgtggacttgaagcccaccattaacggccatctggggtgctctttctgcactcccatgaaagagcctcggcatgctctgctggaaaaagcttattcaaagcttctagggtgttatgaggcccttggaggtttgaccatcactgaattattgtgccttcacgacacattggctgaaactgttgacatgcagaaaggaagatacactgagcttgttgaggagaagtacaagctattcggagaactgtacaaaacatttaccaaaggtggtctgatctgctgttccattgagtctcccaatcaggaggagcaagaagttgaaactgattggggtctgctgaagggccatacctataccatgactgatattcgca

SEQ ID NO: 533569 - DNA, 827 bp, Homo sapiens
ttttggggccccgcctgggggcctcttgcgacaaccggtccgagggtcccgtttccccctgtggggcccccccccgccggcgaatggtccggcgcgttacagacacacgttgtctgggttccttttcccccgccttagtggctcttgtgaccgcgtgaacccctgtttcccggggtcatggccgtgtgtcatcgtcgtgcggtttcgggctctcctcatgattctccctaaccttgcggggggcccccgggcttgttttttctcggccgtctcgaaggcccttgcatccgtcagtgggggctaacccccggggcccttctgaatcggcccccggttcgcctgagaggataaaaagccttcacgcccgtcccccgtatgtgaggattcttccccccttcggtgtttagcccgccgcggagcccgcccctgttttgttaggatgttccctgggagagatcccctctttctcagcagggtggtgtgggccgggctgttgttcccaacatacggggggagcccccctggcgcactctcgcccggctgcgtggttggcgcccggcgaatggagggtgcgtgcgacggcgcctattcttctggtgagcgggcctccgctcccccagggcccgcggtaggatagggcgcctctgtggaatcgcccccggttgttttgtcagggccgcgcccgctgcgccattcgttaagggcggttctgggcggctagcgctacgacgcctccccccgcctcctaggcccggtttctctacaactgttcttccccacgccctgggccccaggggaaaaaaaacttttgtgaccacaccaaaaca

SEQ ID NO: 533570 - DNA, 395 bp, Homo sapiens
  misc_feature (27)..(27): n is a, c, g, or t
aaaataaaaacagtatctgccttctgntcatttaatgatgactgcaatctgtacctgcaaatggcgcttcagtacctgtgttcagtgatccacatttgtgcttggactggaatgaaaaaataccgcttaattgccaagacaactgcaaatgagttcaatacgacttctcggtgcttgttggccatcttgactcaatgttgggatacactaccagagaagatttttttgttgatgtgctgttcaaagtgaattctgaaggaaaaggttgctcacctctgtttcagagcatacccttttaaacctttttagacttgtcctcttctagaattcattataaccccaaagtgtaaaaactatttggaagtgcccccaccagcgccggggatcctcgtagt

SEQ ID NO: 533571 - DNA, 144 bp, Homo sapiens
  misc_feature (81)..(81): n is a, c, g, or t
  misc_feature (85)..(85): n is a, c, g, or t
  misc_feature (90)..(91): n is a, c, g, or t
  misc_feature (97)..(98): n is a, c, g, or t
  misc_feature (106)..(106): n is a, c, g, or t
  misc_feature (112)..(112): n is a, c, g, or t
  misc_feature (114)..(114): n is a, c, g, or t
  misc_feature (116)..(116): n is a, c, g, or t
  misc_feature (118)..(118): n is a, c, g, or t
agcggccgcggctgcggcgatcggccttgtgatctactacttggccttcagtgcgaagagccacatccaggcctgaggcgncacnccagnnctgccnngcttcctncaatancntncnaaggacctaggactacaaaagaaaaa

SEQ ID NO: 533572 - DNA, 239 bp, Homo sapiens
tgccaaagcgagtacccaatctactcagaaggctgaggcttgaggatcgtatttgagcctgggacgtccaggctgcatagagccatgattgcgccactgcacgtctagacattgggcatagagtgagactcttagctaattctctgcacttgttttaggccttataagactttataactttggctgggcacagtggctcacgcctgttatcccagcactttgggtactacgctttggca

SEQ ID NO: 533573 - DNA, 334 bp, Homo sapiens
cgctcactcttgaccgtctccccgtggccgccaatctgggaggtggtctgcaggtctggagaccctcggatggggaagagtcactgtgactggccctgttcccttctttctacttttcttctcggggactgaaagcccccttgactgacagaggccctggctgagtcggtaggcggtgggctggggggtcgtgggttgctctgtgtcacttccagctcccagaagaggctccgtctccctaatgctgaggctctggggctgggaccccaggaacccagctttgcctgtccaggccccgttctctccagttcactcacgacgtcctgcgccggga

SEQ ID NO: 533574 - DNA, 184 bp, Homo sapiens
gcgtatcatatctatgaccaagaggatttctttcttatttggagatacgagtctcacattgtcaccctgcgctggactgcagtgacataaacacggcttgctatagccttgagctgccaggctcaagtgatcctcctgccttaaccccttcaagtagctacaggtgctcaccaccatgcccagc

SEQ ID NO: 533575 - DNA, 194 bp, Homo sapiens
tgacaggtacaacaggcgcggattcatgatacacggacaccgcgtgctcgaccctgagctctgttccgaactcggtggtgcagtggactgtgggatcccaccaggacatcaccgaagacagctttaccctcttctggttgctggagacccggatagatcgtggtggtggggactggagaccgaacctcataacg

SEQ ID NO: 533576 - DNA, 416 bp, Homo sapiens
ggagcccgtatatgctgtctcactcctatagtgattgagccatacaaggtgttgatctcggatcttacgcagctggatcaggtcaggtttgatactattcttttttttatctatatctcggttgtccaaagcttgtttcttcaaatcctgctctagacgcatattgctatcatgaatctcacccagacgtgatttcattttatcacaattcatcataattcgttcgatctccttcttattaccccccctctgcgaaaacgctcaatatattctttgctataattgtgtctctgttgttttgaccctgctcttcaaatattttaattggttccataaaaagcttctattgcagtcctcttcatctagtatttcctgggatgttctagtatattcttcatacagggaatacaggggac

SEQ ID NO: 533577 - DNA, 189 bp, Homo sapiens
aatcgagactccgttagtagtggcgagcgaacgcggaccaggccagtgatacatcaaagacaatcggaaccagtcaggaaagctgggcctcagagggtgatagccccgtacgagtaatgcgatgatgtatccacgagtaaggcgggacacgtgtaatcctgtctgaacacggggggaccaccctccaag

SEQ ID NO: 533578 - DNA, 418 bp, Homo sapiens
gccagtgacgctgttgccgtgacctttgcagatcaaatttttggagtattcaattggataattccagtagcggttgcattctcttgctttggtgggctcaacgcctccatcgtggctgcttccaggcttttatttgtgggctcgagagaaggccacctccctgacgccatctgtatggttcatgttgaacggttcacaccagtgccttctctactcttcaatggtgtgttgtccctggtctacctgtgcgtggaggacatcttccagctcattaactactatagcttcagctactggttctttgtgggcctttctattgtgggtcagctttatctacgctggaaggaccccgaccggcctcgcctctcaagctcagcttttccttcccatcatcttctgcctcttgcaccatcttcct

SEQ ID NO: 533579 - DNA, 829 bp, Homo sapiens
  misc_feature (74)..(74): n is a, c, g, or t
  misc_feature (76)..(76): n is a, c, g, or t
  misc_feature (114)..(114): n is a, c, g, or t
cttgaaattgcatcgatgtaatcagtatgaagaccgcatgccatcccaagattatgtcctcacttataactatnanggaaaaggggctgggggtgggtctgtgggctgctgcantgaaaagcaggaagaagatggccttgactttttaaataatttggaacccaaatttattacattagcagaagcatgcacaaagagataatggcacagtgctacaattaggtctttgtcaaacattctgggaggggggaaaataatatgggaaagttcaatatcaacatgtatgtatatgatgatttttttctcaattttgaattatgctactcaccaatttatatttttaaagcaggggtggtgcttatcttttccaaaaaggggaaaatgtgaaaacagacaactgggaaatctcaaactccagcactgggattaaggggtctaaagcgtctgctcttttttttttttacggatattttagtaataaatatgctgggataatattagtgcaacaataggtaagttatgggaatatcacattattatgggttgagtttaaggggtggggtaaaaaatgaacaggaggtattggggatcactatgggaagaaggtgtggaaaaaaacatggaagacgggttaatgaagagggggggggttcataaaaaatgggagctagccctacggggttacaaattattggattgggggggaagggggggaaggcccatgaagaccatttttcttgggaagtgggtggaaaaaaagaaaaaagtgggctggggggctaggggggagttggggggcgtcctttaggaggggaatatgggccgggag

SEQ ID NO: 533580 - DNA, 515 bp, Homo sapiens
agcggggctggactgggtgagaggacagaggtggctcgatgggcggccgaaggccggggatcatggcgggaaggcgggcccagccaggttcagccccgccgaccgcgtcacgcggcatcgcgtgactttcccgcagcactgccgtccaccgggatgctgagcgcccaccgtctcacccgcaagcccccatcatgccaggctgcagagacatgccgatgggacaacatgaccggacatgtgcaccggagcgaacgagcgcagcccagcgcgaaaaggggagcaccgccatgcaccagcttgagaggtggtgcacagggataagccgccagagacccagcaccaccgagagcggagtcccgcaagagcagcggagaaaaggacgataccagacggaaccccggccagacgggcaacagaacaacggggaccaccaggaccaaggacagatagccgtccaggcacctcacgagggtgacaggcaacacagagcaggcaaacccggccggaggaggaga

SEQ ID NO: 533581 - DNA, 221 bp, Homo sapiens
ggaacctcccttcgggtaactgggttcctcttgggtaaattggaaaaatgggggtgggcgtgggcaaattctcacacatgttttcatgtctttgcaaagtgacccattttgatgccttcttgataaagtggtaaacattttgtagctttctaaaaactttgtattcatccggtatcaatgaaaaataaagaaaatgaaagtgtgggtccaaaaaaacccca

SEQ ID NO: 533582 - DNA, 249 bp, Homo sapiens
  misc_feature (18)..(18): n is a, c, g, or t
aaaggggccccccctttnaaattagaaggggggtttttttttgggcaaaccggggcccccccccccgggccggttcctttttttggattatttggcggggccccagggggggggggggccccccccccccccgcggggtgggggtgaaagggggggacccccaaggtgggggttttttttttttttttttgcccgccctttttcccccccccccccggggggggggggaattttttcctttggttccca

SEQ ID NO: 533583 - DNA, 361 bp, Homo sapiens
gtggttcaaacagggcaacaagggccccccttcacctctccggcgccccttgtgttttggaaaacaggtttcgagaaacccaaagttttcgccttggaaatttcccctcaggggcttgggttgcccgtcccaaaaaggtttcccccgggagagttttttagggggaaggggccccccctggttctcagtttcagcctggcccccccccctcctttgggcttttacccttttttcccagggggcccccccctttttggggtctccaggtttttttttcccccccccccccccccccccctgggtttttttttggtaatgttgggggggaattaattaataaagtgttttttttcccctttta

SEQ ID NO: 533584 - DNA, 709 bp, Homo sapiens
gttttactgtgtgcagctatctacatagcacttcgagttgaccccatgaacatttcactatacgttggtctatcacctctctatccatttgagcatcctgctaacgatgccttattatactttattttcttgatgcattgcaaagtagactagcacacatcggtctgttacgtactaaatatctcaccttgcataataaattacaggtggatagaaagggacatctacattcagaataaagctgccatggagctctggttgtgggccacatgctctaagcatatccggattatcatactccttcatacccgtaatctcgtaattcgcaaacgctgttcctgacacataagatatgaatgttcacatgtatactgacagatactagaggagacttttggaagaggtatcgtttgccacactgactaactgcttgactattgtgcacgccacccacaggcttgagctctacattctctcgaactgtaatcctatcctgacatgtttacttctgtcagctagagacatatgcgtacaatgcaacctgtgcggggttgcatgacacgctgggcccattccacaggatcgttgagattcactagaacagttgggtacttcgccaccttcatagagttgcacatgaactactcggacctaacatctggactcagtatcctcacagggatattatgttggagcgctaggcatcact

SEQ ID NO: 533585 - DNA, 411 bp, Homo sapiens
tagtattaagtgtgcagattcaagtttgtgtttctctctatattttaataagaatgacatttggcccagtaggtgaatctcctctatgatactatcaaaagcatgttgtaagagttgtcagtgaatgggtttactttttccttttcatacctttttgtagagatagatttttaaaaaatgctttccttgaaagcaaagtaattaaaggagttaaattggtggggaggagtggcaggaacgtggtgggaatactcagatattaatgaaaggtatattaaactctgcagggaaaatggagactattaagtagtctcatgtcccagcactttttggaaggctgaggtgggcagatcacctaaggtcaagagtttgagaccagcctggccaacatggtgaaaccctgtctctatc

SEQ ID NO: 533586 - DNA, 599 bp, Homo sapiens
  misc_feature (409)..(409): n is a, c, g, or t
gatgaagagcgagccctggacggcgcctctctgaacgagtgtgggcgcgatgcacgatgacgacctcaggcgccgcgtctttccgagcctggtgccaggatctcggggcgcgtccaacaaggtacttggtggagtatcgtgcggtaaagatgtcctctgaaggggaccatcgtgaactccgcgcatcacacctggaacaagggctaggttgtcacattctatgcacgacttgcgacggacagtcgcggctgatattctactttcttgctagtgaaggcgaaccatgtgaccgcttctgcgggaaccgtcggacagaacgactttgatccagtccctctccgcttgacgcgacctcgttggagtttacaacagacgcgtggtttgcaccgccaacgtttgcacgccaatnctggtggcacgagtggttactacggattgccatgcaaaggtatcgaaacgggccagtggggtatcccggtaagctggcgttttgcctttcctttgtgaattgccaagtgtatagccaccaaaggcactaggacctcaggattggaaggaagcatttgccactggcatagagtcgaaccggaggtctatct

SEQ ID NO: 533587 - DNA, 125 bp, Homo sapiens
cagaggatcctggtgactctgctctatgctgggacaatggcaccaggtcacttacatgtcatctttagctactgacaaccttgtcccacaagcagaagcacagaggggtcactaacaacttggtg

SEQ ID NO: 533588 - DNA, 937 bp, Homo sapiens
tcggccccagaaaagggtgtgttcacccccaaggggaaggtgtgtcgaaagtgcgggccaacacggctctggggcggaaaccaacctcgcgctggggggagactcccaccggttcgggggctaatgttcgcacacgccgtgtgtgtaggaaaaacaagtgccgccagggcgacaggcaatacaatgccgttggggtacagaatcggaacccacattgtggggaggggtcggccagacaccgaccacgacatggcttggggccgccgccacaccacacccgcgtgccaccatgtcgggccacccacttacggggcgacaactatttgggggcagacagcgtgcgtgggctccactaatgccgcgagggtggaggcctcaatcactgttgtccgtgcagcccacggcaaacccacggaggggtatctggcgggcggccaccccaaagcggccaacatggttcggccaccgcgtccagacagagttggtgaacagcggcgagcaccaaggggtccacccagcgggggggcagggcccccacaagaagtgccactcggcagagtcactaacgccgggcaccacacacgagcgttgcggcaggtcgcactcaccgcgcacataggggcgcaaaaggcgccctggccgctgcctctcacaaagagaaagacaatctcctccaggaccaacaacacctcccggtgtggcgggcccaccaatgcttcgggatggtctctgtgcaggctctccattcagacacacggtcataagtctctatcccctcctattggaggaacttgcaacacgctgcctccgcgcgcaggcgtatgtagatctaagatttagtacattgacccccaccgcgctgctatgagagagcttaaacgagccttcttgtggtcggcaaccccagcggaacaaaattttttcttcccacaagaca

SEQ ID NO: 533589 - DNA, 306 bp, Homo sapiens
tcagctaagactcacaggctagctgaacaactggatgtccacaggcgtgatagatattgatatatagatcactgatagatagatagatagatgatgactacaggtgattgattatgggaattgacttacataattcatggaggctgacaagatcccacagtagtgccacctgtaacttgtagacctcgggccgccattttccttggctcatttccttgtctgatatgcctcagaacctgagtggctgctttgtacagtgtccctctgtctgattgcctgatgaacctggtcgttgtgatgtccaag

SEQ ID NO: 533590 - DNA, 875 bp, Homo sapiens
gctctcgcactctgttcttccgccgctccgtcgtcgcgtttctctgccggtcagcaatggaagacgagatcgccggctggtcattgacaatggctccggcattgtgcaaatgctggttttgctggggacgacgctcaccgagccgtgtttccttccatcggtctgggtcgccccagacatgcatggcagtcatggtgggcatgtggccacgaaggatcgtcctacggtggtgcgactgaggtcccacgagcaagcagtggcgatcctgtaccctgaaaggtaccctcatgtgagcgatggctatcggtcagccgaactgcggacgatgatggcagcaagatcgtggctaccacgaccttgctacaagcgagctgcgcgtggccccgtgaggagcacccagtgctgactgacgcgaggctcccgcgctgaaccgccaaggtcgcaacaggagagacaggatgacctcaggattatgttctgaagacctatcaatacgcaccggtacactgttacggtggtcaatccaaggcgcgctgcatgtcgcctctacagccttctgggcagcaccagctggcattgtcatggacctctggagaccggggtcaacacagaacggtgccccatctacgaggggctacgccctcccccacaagccatccatgcgtcatggaccctggcttggcccgggaccctgacgcagactaccctcatgacagagtcctcacctgagcagagagctaccagcattcagacaaccagcggaccgagccgggaaaattcgatgcggcggacatcaacggaagaaagcttggtgctacagatcgaccatgggacattcgaggcaaggagatgggccaccgtccgcattcctccta

SEQ ID NO: 533591 - DNA, 165 bp, Homo sapiens
caagttattagaaaaaacaagaaaaaaaaaaaaaggaatacttccaacctacaattttcctcagccaatttctcttggggcttgatgtcccaaaccttcccccaacttaccccaaaggttatattaaaccctttcctaaaactggcttggattgtatgttccttt

SEQ ID NO: 533592 - DNA, 161 bp, Homo sapiens
aaccgagtaatcggattacacgcacgatgctcatgttgtcgagggaacttgtacaggcaggcatgcaccgagtggtgaatacactgtctaaccagtgctccagtcttaacgactattgtgagcaggtcatgcacggatgctcactgtgtcgcacggaagct

SEQ ID NO: 533593 - DNA, 908 bp, Homo sapiens
gccgagttgcgatgctgtacttctctttgtttcgggcggtcgcgctctgactagagcatgtgggcacggcgtggtcaccgatggccattcggactcagtacagatacgcagcccatagtctgattgtggaagcagacagggggtggacaggccaggagagcctgtcggacagtgtatcctgagaatgtgggtatttcgctgcatgaggggaggaatggtaggaggctagatggtgggtgggctggacgactcagtggggctcgagagaacctttcgtggagcctgagacatgagcatggaaggctctggggatcctggtctgaatcaataatgtagcgtcgaggatgtgtttacttctgggtaacgagatagcgtagtgagggtgagctagaagaggtgagtggactgtagatatgtgtaaggctcgatgatgggtagcgagcgtggggctcgtctcgcggtaggctctgtgtttggacacttgggactcccattgttaggaagggtggagcgtaggttgcacattgtcccaggacaccattaagtgctcgtggtcgcccccagaagcaaagactcgtgccctgttttaccacgggctctcttcgtgtcacctcatagacactggtactcgtgggggcgctcggagcatgtcctagagggagtgtagtcatctgcttccagggatttgatagtctaggagggtggagcggaatagtaaagcaagggtgcatgattatgctgacgtctattgcctatttatgctttatggcgctggattggcatcatggggttagaaaacaggtaggaatttgactggtctgaaattgcttgatatcagctgaatgaatattggttcagggttatggagggtgaatggatgggccgggttatagaggtgtgggaaccaa

SEQ ID NO: 533594 - DNA, 155 bp, Homo sapiens
cgctttatatcatccagggtctagttctttctatgaccaaaaacacaacacaggatagaaagcaaaccaagaagttgtaaagctaacctgcccacctcaccccttgtgatatcgtggtaccggtagctcgagattcgtaattcatggctcactag

SEQ ID NO: 533595 - DNA, 1213 bp, Homo sapiens
gcgactgcggtgcatggctggccctgggacatcttgcgtggggaggcagcggcggacccaggccctggtgtactccctgtcgcgataccgcggaatgcccggcttcccggaccctagctttccagcgcccggaatccgttccactgtcagtgtctcatggaccaaagcaaccgtacagtgcaggaatggcatgtagctatccagaagacgccaccgcgatatgggcagatagaaaggcggccacgagcagtcgagagaaaacgaagaacgagataagaagcaagaacgcggggacagcagggcccgatctgctgggtccacagagtggtacggccgaagacacgggccctgcgagcaggaaaaccgtacggacccccaggaaagcaaaaggtatcccccgtacaggcgacgtggagggggccccaagcgccagcaacaacaaggtagggcggccaaaggcaactcgaggactcggcgatgctaggctggcacggcacaaccatgggcaagacctaggggccttccaatgcacgcgcgaacgcacaaacccccaactctccgggagatgactagggagagacgacagccaagggcatcactgcgagcacggcaaagttccggaaagccaactccgacacgcctagagaaaggaaagcggcccgcctatggcccccccgaggacaccgaacgccgccacgccacatagcaaagttgtctaactatccacaatatgtgtcacgggggccacggaaccgtacgtaaaggggggacacttctagcgatcatgcggcagaactggccctcgcacacactgggccccgattgcaacgcggcgcccccttagcagggtggcgacacttccttccacagacaggcattggtcctagcccttcacattttccacggggcccacaaatagggagctagggcgcaaaaatacactgttggcattaagcagaaaattgtcggccagtgacaccaaacccccaacgggaaacaaactgcgaccaagcgaaagttcaccaacccagcagcggcacacatccacttgcgccaaacggcggcaccaccacatatcggaccagatcccatacagtgttaacttcgcggtgcacagggaaacgcggcccccatcaccacggccgccaactcgattctatttgtcgggaacccgacagtctgcgccccgcgtcggcaaacattggtaacaacg

SEQ ID NO: 533596 - DNA, 96 bp, Homo sapiens
  misc_feature (50)..(50): n is a, c, g, or t
cttctattgtactctttcagcccaagactccggattgtaaccaaaatgtntcccagtttgccccatgatctttacctcagtttatatgttataaaa

SEQ ID NO: 533597 - DNA, 105 bp, Homo sapiens
ggagacgggtctcatgcattgtgtagacttttccttgtttgttcctggctgggtcacggcagtgctgcgcgtggtggtggcactgatgagcctgggggaacaggc

SEQ ID NO: 533598 - DNA, 94 bp, Homo sapiens
aagggaagagaagggaaaggaagaaggaaggaaggagaaaaaagaaaaggaaagaaaaaaagaaaaggaaggaaagaaaaaaagaaaaggaagg

SEQ ID NO: 533599 - DNA, 439 bp, Homo sapiens
tgccaaagcgagtacccaagtagtgaacatagtccccgatagatagtttttcagcccttcccctcttccttcctcttcctttttggagttgccagtgtctgtgttctcatctttgtgtttgtgtgcacccagtgtttagctgccattgtgagaacatgcggtatttgtttttctatttgtgcattaattcgctagggataacggcctccagctgcatccatgttgttgcaaaggacatgattttgtttttttatggctgtataatattccatagggtatatgtctactatattttctttatctgatccacttgatggtcaccaaggttgattccatgtctttgctattgtaaatggtgctgcaataaacatatgaatataggtgtctttttgatagaacaatcattacggattgggtactacgctttggcagggtaccg

SEQ ID NO: 533600 - DNA, 432 bp, Homo sapiens
cacgagggtggctcccacctgtagtcccagctactcaggaagctgaggtgggaaggatgtgacatgaggggttctgctggctgctgtggtccatggcaggggggcagccctggtttcatgaactcagaacccagcctctgggggatggaagcactctccactgggcacgtgtggtccctgcagcctgtagcttcaaagcacggtgactggttccaagcccagtatggtggagaaggagactacggcaggaaccagggggattcgggggtggaggagggaagccgcagggcagttggtgggtacatcagatcctgtggacatggtgtgcagacccggaaccccggcagaggagcaaggattccttgcaccaagaggatggtggcccttggcctcctggtgcagagcatcagtcccacgctgggagtgtggaga

SEQ ID NO: 533601 - DNA, 368 bp, Homo sapiens
  misc_feature (21)..(21): n is a, c, g, or t
  misc_feature (111)..(111): n is a, c, g, or t
  misc_feature (113)..(115): n is a, c, g, or t
  misc_feature (117)..(117): n is a, c, g, or t
  misc_feature (128)..(128): n is a, c, g, or t
  misc_feature (133)..(133): n is a, c, g, or t
  misc_feature (137)..(137): n is a, c, g, or t
  misc_feature (145)..(145): n is a, c, g, or t
  misc_feature (167)..(167): n is a, c, g, or t
  misc_feature (172)..(172): n is a, c, g, or t
  misc_feature (176)..(176): n is a, c, g, or t
  misc_feature (180)..(180): n is a, c, g, or t
  misc_feature (193)..(193): n is a, c, g, or t
  misc_feature (197)..(197): n is a, c, g, or t
  misc_feature (204)..(204): n is a, c, g, or t
  misc_feature (207)..(207): n is a, c, g, or t
  misc_feature (212)..(212): n is a, c, g, or t
  misc_feature (220)..(220): n is a, c, g, or t
  misc_feature (224)..(224): n is a, c, g, or t
  misc_feature (243)..(243): n is a, c, g, or t
  misc_feature (248)..(248): n is a, c, g, or t
  misc_feature (256)..(256): n is a, c, g, or t
  misc_feature (262)..(262): n is a, c, g, or t
  misc_feature (267)..(267): n is a, c, g, or t
  misc_feature (283)..(284): n is a, c, g, or t
  misc_feature (296)..(296): n is a, c, g, or t
  misc_feature (298)..(299): n is a, c, g, or t
  misc_feature (302)..(302): n is a, c, g, or t
  misc_feature (306)..(306): n is a, c, g, or t
  misc_feature (308)..(308): n is a, c, g, or t
  misc_feature (312)..(312): n is a, c, g, or t
  misc_feature (320)..(320): n is a, c, g, or t
  misc_feature (332)..(333): n is a, c, g, or t
  misc_feature (342)..(342): n is a, c, g, or t
  misc_feature (348)..(348): n is a, c, g, or t
taaaagtatatttcctaaaanaaatatcagcagtggtagagaccagaaaaagtaagtgtgtgtgttctaaacagtgattccaactcaatgtgttcagagaaaacactttgnannntntttgtgttttntgttnctgntgatagtntactgtcgtttcctcagccttnttctntttntttnttttagctttacngagnttaggtntcnagttntgagaatntccntggttttcaggggctaaanttttntgccattnttttgntcttnccgggctcagaaggtnntgtcaggtgggntnngtntttntntttnagagctgnagaaagggtctnngctgcggantcagtngagaaagccttggtctcagt

SEQ ID NO: 533602 - DNA, 247 bp, Homo sapiens
  misc_feature (54)..(54): n is a, c, g, or t
  misc_feature (239)..(239): n is a, c, g, or t
gccgctgaggtagtaggacctcttaaggacagaagtttgagaccagcctgggcnatatagtgagaccctgctctaaaaataaaataaaatttaaaaattcaccagtcatggtggtacacctgtaatcctagctactccagaggttgaggtgggttgaagtaagaggatcacttgagaccaggagttatggcgaggtcttatcgcactacttcactccagcctaagcaccagaacaaaancctgcttc

SEQ ID NO: 533603 - DNA, 102 bp, Homo sapiens
gtggcataggtgaggaggacgcaggatgcttccaccccatccttctggaggtccagattacatgatgctgcagtactgcgggctctgggtacgggggctgga

SEQ ID NO: 533604 - DNA, 623 bp, Homo sapiens
acactgcagacgccatgccgacctacggggccccgaccctactgccttcgctcgacgccgctctccttcagatctccccagggacctgtttcatggatagggtccccattgacccgcgatgaaagtcgtcattccatccatcagctcagaaacactccaaggatctcggacgcccgtatacatggccattccacatcaatccagcaatacacccatcgatgcatcctggagtgatatccatatatataccaatttcgccaagcatccgcatagcttcatgtgacagagtcatacgacatatcatacaggcatgacgggccgattgtggacgcattatcgacaatcacacgaggttgccaggcgggacctcagagtggaaaacggaacatttggacttctgccgggcggcccatatggaatagcacacaactgatcttcggactacaccgagcgtaccacgtgggtcacaacggcgacaccaggacaggacaggacggattggttacagcgagtggccatggaccaaaacacacacacgaacggacacaaaaccaccgaaaacaaaggagaacaggcctcccacggaacagggagcataaaccccagacaggaacatggcgatc

SEQ ID NO: 533605 - DNA, 521 bp, Homo sapiens
ggaccgactctgcagtcacgatgggggaaggcttaaacgcagctggccaggtgtattttcaagtgtcaagatcccagtgatccctgacacccaccccttcctactcttacattcatgcgtctgtaagatagctgcctacaacaggtcagtagtgatgctcggatcagaaaaacaagatacaaaacaaacaacaaacacacttggtcccttcagaccagtaagatacacaaaccacctccacgacctccgaactcccccctccctccgtcttctctgaggagcacgtgcctcttccttgaccctgggccgggctggggcgggagcagcccagctgctctctggatgtcacaccactgttaactggcagtaacaaaaataattaaggtacatgctacacacacatccagctggaagccttgtaggcccctaagcctttgtttcatgctacagtaatgaagggtatgtgtccccaatgcacagtcaaccgcacacaactcaatgaacttcctgggaaacaatat

SEQ ID NO: 533606 - DNA, 217 bp, Homo sapiens
cgactctacggatccttattgctttgggacggcgctgtgctttggtacggcgaggcgggcggatcacgaggtcaggagatcgagaccatcctgactaacacggtgaaaccctgtctctactaaaaatacaaaaaattagctgggaatggtggcaggtgcctgtggtcccagctactcgggaggctgaggcaggagaatggcgtgaacccgggagggt

SEQ ID NO: 533607 - DNA, 543 bp, Homo sapiens
  misc_feature (22)..(22): n is a, c, g, or t
gtcatctctataatccctgtgntaaggcacagtagtcagactgagaagatgcttggaggcaaatattaattatggcacacactgtaaattactatatccatgagcatgttcctttgcttgctaacagaaaatcctgatttagcttggataaacaaagtgtccagtgtacaggtgatagactacagggttggttaaagccaggctggggcctatatgtaccttttagcctgatactagaaagagtttacagtagggactgtcctgtggtccacttactggataatgagacataaaggagaagtctgctgtgtcctatctaagaagatattcttcactggttaaaggcgagagcacacatcaagacaagccccctttgacatagcttcctccatcttgtagcctggagtctgaactaggtccatgaatggctagagctataaacagccatcctgtgatacatgaagctccaagggtaaaaagcagtaatatacaggaaggtggagctatggaacaactgataaaaggatctgggacacactaaca

SEQ ID NO: 533608 - DNA, 128 bp, Homo sapiens
gcctggctgcagggctgctcttcggcagtctaggcgcctcggtgcttaccaactgtatcaggatcccaggaacggtttgggtttactagccgctacatctgttacttgtgttgagggttattgggatt

SEQ ID NO: 533609 - DNA, 168 bp, Homo sapiens
tacccatggactggagatccttttcaatctggccataacatgtgcccacacatcttcacctgtggaaaatgtagcatttcaagcttaagatcagggctagattatcccttcttacacttacacaaatttatcacgttgctagccagcaagtctactcaagcattggct

SEQ ID NO: 533610 - DNA, 246 bp, Homo sapiens
ttcatcacatttagtcaaaaaaaaaaaaaaaaaatttctcttctcccggataatgggaagttctggaacgtaaaatatttttttcccagggggtcaaagggtccctaagtatatgatggcgagtggaaaaataggggacagaaatcaggtatgggcagttttcccatttccattggggtgtgaatttttaatataaagggcgggagacgtaaagcatgaagtggcaggtaacaaagggttccaggt

SEQ ID NO: 533611 - DNA, 368 bp, Homo sapiens
ccagctgaaaccggactacaagatctggtctagagtcacaaatcaggaagcagaggaatggagcggacggtcgtgatggataaatcgacaggagagcccgtcattagcgtgcaaaaccacaagcgggtccaaagagagagatgagtattgcctctgccatctcagggccagcgtgtatctcacgatggctccacggcccgtgtgatccgcattatgaaaacagcactgttttgcactcttaaaattagtaagttagtaggaggcgcgataatggtgtagatggcggatacagacacagacatgaatcctggtgctttctgcagagcagtgcccatccgtgttggcttcccttactggctcctgatcgg

SEQ ID NO: 533612 - DNA, 302 bp, Homo sapiens
gctcctggataccgtctttccttctattgaaaatctatcaatggctgggagcggtggatcacacctgtaatcccagcactttgggagaccgaggcaggtggatcaccttgaggtcaggagtacgagagcagcctggccaacgtggtgaggccctgtctctactaaaaatacaaaaattagctgggtgtggtggctgtgggccatgtaatctcagctactcaggaggttgaggcaggcgaatcgcatgaacctgggcggccggggttgcaatgggctgagatcatgctgctgacctccagcct

SEQ ID NO: 533613 - DNA, 530 bp, Homo sapiens
ccagttaagcggagagagaacagaatccatcatacaacgggctctctactatgatcttgatcatgcagcccagacattcatggtacctataaggatgctccttgatcacggtcaccgccccccagaacgaacctcaagagtgcctcccggatcgtactttgagaagaagctgcgcataaaatccagcttagtggctacctctggaaaagtcctatgggaccaggtcccatgagtcctgtacgggcaaccctcgcttggacctgccacgagatcacacaactgggatgcaggcgcagatgagtggggcggctcgccgggtccacaatggaaattcccgctgagatcagcattctccttctcggtgtggcgcacttcaaggggcagtgggtaacaaagtttggacgccagaaagacttccctcgaggatttctacttggatgaagagaggaccgtgagggtccccatgatgtcggaccctaaggctgttttacgctatggcttggattcagatctcagctgcaagattgccc

SEQ ID NO: 533614 - DNA, 248 bp, Homo sapiens
caacgatggtcctacagctgtcaagtggaaccctttgttactatactggatcagctgcaaagtagggtgtggggttttttgttgtttttttgtttgtttgttttttgcttttttgttttgagacggggtctcgctctgtcgcctaggctggagtgcagtgttgtgatcttggcccactgcaacctccacctcccaggttcaagcaattcccatgcctcagccacccgagtagctgaggaccatcgttg

SEQ ID NO: 533615 - DNA, 277 bp, Homo sapiens
ccatattgcccaggctggtttcaaactcctgaactcaagttgtggttttatttgttatctattctttctcttcagaattgataatctctttcaaaaaagtaagcaatttttataactcattttgtagctcatttaacccattttgtgcttggtgggggttatccagccactgatttctttctcacacaaacagcagctacctgaggcaggttataggacagtgtcttccctccaaatatatagatttgatgctaacattcagttttgcagagaagcc

SEQ ID NO: 533616 - DNA, 1929 bp, Homo sapiens
  misc_feature (754)..(754): n is a, c, g, or t
  misc_feature (758)..(758): n is a, c, g, or t
  misc_feature (1928)..(1929): n is a, c, g, or t
tggaccagcaggatcgcccagggcagggcaactggccagaaggaaatgagggaaggccgcgcgttgaggtttcggcatggggagaacacagcctccgcggtccacggacgccgctttgccacattttgagcgtttctggggaggacaacgcgcgcaggaagccgcaagtcatctcaactgacctccaaggctaccaggtttgagggctgagccgagtctgaaaaccccgacccgcctattggccggggactgtgggtccaccggccgcttggccccctcgctcggcgccggtccaggcgcagcgctcggggccccggcgacggtgagatgcggcgcggccagcttagctcggggtaggggccaccccagcctcgcccagccgccgggtccgcgacctcgggagggtccggtccttccctcggcccccgcgacgccgcgcccgggtgaggccctgggcttcttgccggtgaccacgcggccagcgtggcccccagcccaggacggctaccaaggcggcccagccccatccccgcccgcgggtcccggaaccgaagagctgggagcgggcgcttcctgacaacatgcggcggcgcccgggcgcctccccggtcccgggtgtctgcgtctccccgcgagccgtgggcaaagccggtgccgtccgacgacaggaggcgaaaggaacccaggaccagacccgcggggcgaacagtgctggaggaccatgcaccgaccacgcccgaagcagaaccaaggnccgncctgttgccgtggcgactgcgcgcggggtagacgcaggcgccgcaagccgtgagctctcagtgcaggcgcataggctgcggggttgaggcgcattgcgtgcgcgtgcgcgctgctcacacgcggacggttctgtgcgccgcaatggctgcccgcgagtatcggagaggcggagctctcagtcttttacaggaccgggtctcctgatgccgccggtggttcctcgaggcccccttccacgcatccgccgccgctgcttcatcaggacttcatttcggtgacgcagagctttggcgagagctacggcaacagcaagaactgccggcggctcttgtgctgcagggtgaggaccgcgccgggcggaccgaggcccggggtcgctgcgcccgccgccctcccagcctgcggctccgagcggggcctgggcgggcagactcgactccccccgacgccgccctctccacccttaccccgcaaaaaggggcaaatctgctttccgggccggggcagccgtggtcggcacgcctgcagcggtctcagcggcccaaattctgcggggcggtggtggtgggaggaagggttggagccccagcaggttgtctgggcttcgtttgattttcggcaaggtcctggcccaggccccagtccctcttggagcggaagcctctggacctgttgctcctaagaaagcaagcggcccctgacgcgttgctgtggcctggtttgaccctcgtagccagcccatgttctgtgaggcatgaagcgccacgcagacaccacgacaaagtgagatgaactaagacctcttcttgattctaagcagggaacgcacagctcaccctgtcacatgcagcgatcataagctgagaattaccctcttccttcccacagcgtctaatctttttttatgtttttgtggcaaggtctcgcttagtcgcccaggctggagcgcagtggcgatcatggcccactgcggcctcgacctcctgggctccagcgtgcgtctaatctagaaccaaatcctccttccttagatcatcccccaaatcacccaactacaggtgaaatcctgtaatagtttcctccgaacaccctgttgctgagacacctcaacgtctcaacctggtgtgtttgtacgtagagtaaaagacccaacttgtttaactcccccnn

SEQ ID NO: 533617 - DNA, 1878 bp, Homo sapiens
  misc_feature (754)..(754): n is a, c, g, or t
  misc_feature (758)..(758): n is a, c, g, or t
  misc_feature (1877)..(1878): n is a, c, g, or t
tggaccagcaggatcgcccagggcagggcaactggccagaaggaaatgagggaaggccgcgcgttgaggtttcggcatggggagaacacagcctccgcggtccacggacgccgctttgccacattttgagcgtttctggggaggacaacgcgcgcaggaagccgcaagtcatctcaactgacctccaaggctaccaggtttgagggctgagccgagtctgaaaaccccgacccgcctattggccggggactgtgggtccaccggccgcttggccccctcgctcggcgccggtccaggcgcagcgctcggggccccggcgacggtgagatgcggcgcggccagcttagctcggggtaggggccaccccagcctcgcccagccgccgggtccgcgacctcgggagggtccggtccttccctcggcccccgcgacgccgcgcccgggtgaggccctgggcttcttgccggtgaccacgcggccagcgtggcccccagcccaggacggctaccaaggcggcccagccccatccccgcccgcgggtcccggaaccgaagagctgggagcgggcgcttcctgacaacatgcggcggcgcccgggcgcctccccggtcccgggtgtctgcgtctccccgcgagccgtgggcaaagccggtgccgtccgacgacaggaggcgaaaggaacccaggaccagacccgcggggcgaacagtgctggaggaccatgcaccgaccacgcccgaagcagaaccaaggnccgncctgttgccgtggcgactgcgcgcggggtagacgcaggcgccgcaagccgtgagctctcagtgcaggcgcataggctgcggggttgaggcgcattgcgtgcgcgtgcgcgctgctcacacgcggacggttctgtgcgccgcaatggctgcccgcgagtatcggagaggcggagctctcagtcttttacaggaccgggtctcctgatgccgccggtggttcctcgaggcccccttccacgcatccgccgccgctgcttcatcaggacttcatttcggtgacgcagagctttggcgagagctacggcaacagcaagaactgccggcgggctgcgcccgccgccctcccagcctgcggctccgagcggggcctgggcgggcagactcgactccccccgacgccgccctctccacccttaccccgcaaaaaggggcaaatctgctttccgggccggggcagccgtggtcggcacgcctgcagcggtctcagcggcccaaattctgcggggcggtggtggtgggaggaagggttggagccccagcaggttgtctgggcttcgtttgattttcggcaaggtcctggcccaggccccagtccctcttggagcggaagcctctggacctgttgctcctaagaaagcaagcggcccctgacgcgttgctgtggcctggtttgaccctcgtagccagcccatgttctgtgaggcatgaagcgccacgcagacaccacgacaaagtgagatgaactaagacctcttcttgattctaagcagggaacgcacagctcaccctgtcacatgcagcgatcataagctgagaattaccctcttccttcccacagcgtctaatctttttttatgtttttgtggcaaggtctcgcttagtcgcccaggctggagcgcagtggcgatcatggcccactgcggcctcgacctcctgggctccagcgtgcgtctaatctagaaccaaatcctccttccttagatcatcccccaaatcacccaactacaggtgaaatcctgtaatagtttcctccgaacaccctgttgctgagacacctcaacgtctcaacctggtgtgtttgtacgtagagtaaaagacccaacttgtttaactcccccnn

SEQ ID NO: 533618 - DNA, 275 bp, Homo sapiens
ctatgatcgtgccactgcactccagcctgggcgacagagcgagactccatctcagaaaaaaaaaaaaaagggtaatatttaattggcccagctttttaaaggtttcctttagcagatttgtccagactcactagatggggttttattttaaaagaaaattaacacgtgctggcgggcccattgcagacaaatgatcttgatcagaggctttttcttgttttgggcccgcacctatgtgctggaaaactccacgctgccttcctttgggggggggc

SEQ ID NO: 533619 - DNA, 271 bp, Homo sapiens
ggaacatgacagggacctttccagagctcaaggatttcatggtagcattactaccaagattagatgcgcaccatgagcagcggtgggagggcccaggtagggcttacgtactgctaaatgttctccagagcatatattacaatctttcaaagtcgcacactagacttcagtggtttttcgagctatagggcatcaggtggtgggaacagcagatggacttgatccctctgtgtcttttagcttctggctggtagatcatgtcaacctgcag

SEQ ID NO: 533620 - DNA, 432 bp, Homo sapiens
cacacacatcaaagaacagggttatgcagctgtcacatggagacaccagagatgcacgaagaggaggaagtacagaatgtgtcaagactctatccatagggtgtaggtcaagttcactacactgcccgtgcacaggatacacatacatgtggtagttacacttaaagtcccttaagagaaggtcaatgggatggtccccagcacacaagggggcttttcatccaggtaaattatactagaatataattaaactgcttctcatatcgcatccaccagcgtgtccagagttggcttcataaagctgcatgcaggatatacttgagccagtctctcatccgtcgaggaacactgcctcacttcaaaagtccgcacaagtaggaatagatttgcaggctccaaaataatccagctggagttgatgcccctttaaga

SEQ ID NO: 533621 - DNA, 369 bp, Homo sapiens
acagcgtttcaccatgctagccaggctggtctcaaactcttgacctcagatgattcacctgccttggcctcccaaaatgctgcgattacaggtatgagccactgtgcccaaccaaagaatttaaaaattagatggttgcagtagtgtgtctctgtggtcccagctattcaggaggctatggcaggaggatcccttgagcctaggagtttgaggtggcagtgagctatgatagcatcactacactccagcctgggtgacagtgtaagaccctgtctctaaaaaatgaacgcgatgaagtggaggcacaacgcgatgaagtggaggcacaacgcgatgaagtggaggcacaacgcgatgaagtggaggcac

SEQ ID NO: 533622 - DNA, 112 bp, Homo sapiens
cagcgcggtatgtgctggaatgcggattgtcttgagaattttgagaattgagtcagtgagaagaactgcagagtcaaattacaccaacacagcaatgacctaaaatagatcg

SEQ ID NO: 533623 - DNA, 825 bp, Homo sapiens
cacttttgggttcccccctcttgacatttttcctaattgcttcctaagttcccgtaagacccccttttctgaacaaatccgcccaccaaaacgttacttattattatcaattttccaaacgctcctggggtattaagacacgcccgtttggacatatctcttgcccccctcatctatctttttgtctctcttttgctccctctccccatctccttacagccatcctcttttcgaaatgacaccacaacggggtgtcaacaagaatctactcctctccctttcgcgccctccaacatcctcattggcccccccccacgggttcgtgtgaccattcgggagtttccacccggctttcggccgggcgatttatattttctcacacattccctgacaagaagattctccccccactgttactttccctatggaacgccagggcgacacttccgtcatcccttgacagtgattacatcatcgggtgtggattacttcctcctcgatgtgtgtagcgccccctacatctcgattatattaaaattacacatctcaccccaaacatttttgcgacaacttcatgagagctgtctccccaccactttagagcgattttaaaacagaaagcccatttccccggacagtgtttaacccccaaccacttgttccaccgctgaccaccaccgcgggggttaatccgtccaattttttaaattttggggccaaccccccttttttacccctttttctaaaatttattctcccctaaaattttttaaaaggggcccttttttccccttaagccccccctttcccccttttgggacccca

SEQ ID NO: 533624 - DNA, 888 bp, Homo sapiens
  misc_feature (9)..(9): n is a, c, g, or t
  misc_feature (116)..(116): n is a, c, g, or t
  misc_feature (165)..(165): n is a, c, g, or t
  misc_feature (172)..(172): n is a, c, g, or t
  misc_feature (177)..(177): n is a, c, g, or t
  misc_feature (191)..(191): n is a, c, g, or t
  misc_feature (205)..(205): n is a, c, g, or t
  misc_feature (207)..(208): n is a, c, g, or t
  misc_feature (213)..(213): n is a, c, g, or t
  misc_feature (217)..(217): n is a, c, g, or t
  misc_feature (220)..(220): n is a, c, g, or t
  misc_feature (222)..(222): n is a, c, g, or t
  misc_feature (234)..(234): n is a, c, g, or t
  misc_feature (240)..(240): n is a, c, g, or t
  misc_feature (248)..(248): n is a, c, g, or t
  misc_feature (266)..(266): n is a, c, g, or t
  misc_feature (283)..(284): n is a, c, g, or t
  misc_feature (286)..(287): n is a, c, g, or t
  misc_feature (290)..(290): n is a, c, g, or t
  misc_feature (294)..(294): n is a, c, g, or t
  misc_feature (297)..(297): n is a, c, g, or t
  misc_feature (323)..(323): n is a, c, g, or t
  misc_feature (327)..(327): n is a, c, g, or t
  misc_feature (366)..(366): n is a, c, g, or t
  misc_feature (380)..(380): n is a, c, g, or t
  misc_feature (406)..(406): n is a, c, g, or t
  misc_feature (410)..(410): n is a, c, g, or t
  misc_feature (445)..(445): n is a, c, g, or t
  misc_feature (476)..(476): n is a, c, g, or t
  misc_feature (479)..(479): n is a, c, g, or t
  misc_feature (482)..(483): n is a, c, g, or t
  misc_feature (498)..(498): n is a, c, g, or t
  misc_feature (505)..(505): n is a, c, g, or t
  misc_feature (507)..(508): n is a, c, g, or t
  misc_feature (512)..(512): n is a, c, g, or t
  misc_feature (548)..(548): n is a, c, g, or t
  misc_feature (701)..(701): n is a, c, g, or t
  misc_feature (871)..(871): n is a, c, g, or t
gtatctctntctgccaagtattaagctatagctgagttcataaaaagggatgatttggccgtacggtcatctgccagattctgatgatgattcagaagtcagtgtggaagaagatnagttggagaggcaggcgctctttgacttatcatgctgctccctgaggcncaaaagnttcangtgtcagacttgtnaaatgtcatatatngnntagtngggnctngnccagcatttttnacttantccaggcnatggccagctggaccctntagatggtgctatctgnnanngcnaatnggngctccctccgggggtgcacatagganaggncgctcagcctttaccttcccggggctgtccgtgccagcngctccgcgtgttgnaggggcccgctcctgcttggtgaganagtnagcactgcagtgcctgcaggtaatgtttgcatctnggtgtcgttttcggccattctcacactgttntanagnnatacttgagaccagntattttntnnaganaagaggtttagttggctcacagttccacaggctgtncgggaagcatggtgctggcatctgctcagcttctggggatgcttcagaatcagtcacggtgaaggcagagtgggagcaggcatgtcacgtggccacagcagggacaaggggccggggtaggtgctgcacacttttttttccttttcttttttngagacggatctcgctctgtcgcccaggctggagtacagtggcgcgatctcggctcactgcaagctccgcctcctggtttcacgccattctcctgcctcagcctcccgagtagctgggactacaggcgcccgccaccacgcctggcaattttttctatttttagtagagangggggttcatcgtgtta

SEQ ID NO: 533625 - DNA, 295 bp, Homo sapiens
caaaaattagctggtggtggtggcacatgcctgtaatcccagctacttgggaggctgaggcaggagaatcgcttgaacctgggaggcagaggttgcggtgagctgagatcacaccattgcattccagcctaggcaacaagagcgaaaaactctgcctcagaaaaaaaaaaaaattacaaaaactagcctgatgaggtgggtgcctaatcccggctacttgggaggctggggcaggagaatcacttgaacccagggggcagaggttgcagatcacaccacttcattccagcgggta

SEQ ID NO: 533626 - DNA, 489 bp, Homo sapiens
aatggaataccagatatcatttctaatatcacagcatccctagaaaacagcatcaaatgtaggccgtctctagatacaggccagcatgactagtttaatatgtcaggtttttctacaaaaggagaatcacttctatacataaataaatactgacccgagtgccttatgatgagttctgtattgtttaaaatcatgcattaaagtagcaaaaatattttttagaaattcacaacagttgtctaggtttttcagtggcacattatttagtatgaaaaagtagtcagctggacatgagctacagcttgacagatagagtgcttgcctgtcacacgcaaaaccctgggattggtccccagcaccacatatactgggtgtggtgacacacgccttagtcatagcactctgaacacaggagcaaaagctcaatggtattcttggtgacatagggaatctgaagccaggctgggctacatgaaaccctgtttcaca

SEQ ID NO: 533627 - DNA, 191 bp, Homo sapiens
ccctgtggagggcaataaccctaaaattttccccatggggccaagtgaatgatttagttagtcccttgacatgctgaactattagtgtttttgggaagctggattttatataacctttttttgaaaaacccgatttatgaaattttataataaaattatcaataaagccctttcatttccataaaccttta

SEQ ID NO: 533628 - DNA, 118 bp, Homo sapiens
tgacatcattgatctctacacacgcgacatgtctggggatctgcgtgggcctagaatctgcgctcaacggaggtcgcagagatgctgaacaccattggtgctcagacgttccggagta

SEQ ID NO: 533629 - DNA, 859 bp, Homo sapiens
tggaagtcaaaagacccgttaattaagcacctccggtatggggaccccgggggggtgacctggggtgggggtcaaacctcccggtcatgtattcttccccgtgacctgaatctgggccagggctcaggaaagggaccagccaggggttcaggggcagaggagcagggcccgcacaaagcacgagcgcccacggggtactggtgagggggcacggggtaggcccccgggaagggctgctgcccccaaggaaggtgcctccagaccttcagctccagggacgagtcaaggacgggccagatggccgtgtggggctcagacgcagcgcctggaaggggacggggcctgagtgggcacccagagggtgtccgggtttgggacgcccttggtgggccagccctgccagcctctctggtcgttgtcagatgtctcggtcgcagcctttctctttgaagcgcgggtcttcacggctggatcctggccagctcagcgctagcgctggtgctcaaggtgagggtccttcccctcaaggatcagttgctacgtggtggatctctttactttgcgtgaaagtgggccgccctccagtggatcgtacacattctccggaggaagagggacggaggcggggcggtccgggaatacgtgaccccggaagtgtaagggcaccgaaaatcgctccggtcaaactcaaaatacatggggcgattacaacggcgtccctcagtggcaaacacagcgggcacaaattaacagcggtaatcccacaaaggggggccaaacctggccaggaaaacaggcaagaaaagacgggaatcgcctcaaaaacggggccaggaaaaacaggaaacaagaaacaaag

SEQ ID NO: 533630 - DNA, 382 bp, Homo sapiens
agcttagtttcagtgccagtagcttatgtctgtaccaaatgtatcaacttaattaaaaaatactttcatgctagaaaaatgctaaccttcatctgagactttagccaagtcataatctcatggctggtggagggtttgatgatattatgagaatgaccaaagcgtgacacagagacacgaaggtagaagatgctgtgttagaaaaaaatggtgccacaaaacttcagttggtcacaaacttgatatcagcgaagcatgtacagaccttaattaaatgatactttattgctagaaaaatgctaaccctcatctgagactttagcaagtcataatctcatggctggtggagggtctgaaatatgatgagaatgaccaaagcgtg

SEQ ID NO: 533631 - DNA, 222 bp, Homo sapiens
ccccgactagctcgactgatcacacacacacagacacacacacacacacacacacacacacacacacacacacacagagagagatagggaacaagtgtgttttgtgtggtgggggggaagtgatatgtgtggttggtaggaagaggtaccagtgacttccaaatgtgtgattctgtcttaagtgttctctatttaccaccggggggggcagtagtggggggg

SEQ ID NO: 533632 - DNA, 202 bp, Homo sapiens
ttgcgcttccacattaggtgcatagtaggtgcctgcagtaatgttagcggttaggcgtacggccagagctattgataataactagtatggggatatgtacaagcctataatcactgtgcccgctcataaggtgattgccatggctaggttatagatagttgggtggttggtgtatatgagtggcgccgtcgcctacgcaggt

SEQ ID NO: 533633 - DNA, 283 bp, Homo sapiens
catgagtcacctactatctcccttgggaataagcacataacaggctacagctctaagataagataggtgtaagtccttttaacatcgagctacttacccataataaccactttgcatccaacactcttcacccacctcccatacgcaaggcgatcgtggcatacttggcccaaagtaactggtggtcaggcatcttacaaacaagaccacttatacactgtctgtctagaggcagaagataacagcagcatctcgtctcttactcttgtaacctctacgtctc

SEQ ID NO: 533634 - DNA, 940 bp, Homo sapiens
ccacgacgtccgcaggtgcaggtgccacgccatgagtccccatgcaccccctcctgcggtgaggctggacgtcgcatcatctagtcctcatctgtccacactgagcgtacacatcagagaagacaggacacgtgaatccccgtcggaagatgctcatggatacgatatctcaggaggactacttgcacacaccggttcatgagccagggtcggtggttttgctcatctcgctcgtgcgttcggcgtcatccatggtagaatcactgagatctagcgctgtcggatcaaaggcgtctcagcgtgatagactatctgttggatcgctgtgaagaatacccgcacgatggggaaggcgccctggagtccagggcaaggcggtcccgtcccctcgggcactatgcacttctcttcacggggatcctcgttacgggagcacctatgttgagacgtgattgggaatagatggtcccgtccgttgaggaaactcttagatgctaataggggagaccggagctaatgatatacttggagggggtgcattgttactaggtggctccccagggactcacatgaggtagatggggggtcccttttgaggcagtcgatttaatatatcaaatgggcgatgacctgtatttaaaagacttttgggtgttctgtggggatccaaatggctaaataggggatttcaagggaaaggcgatacctgaaaattcgttttggctcggacaccgtcccgggatggtggttaccctgtagagaattggcagtcacttacgggtgaatattacatatttggcgggtggattattcggggtgaccttttccgaacaatttggtgacggatggaaacttttaggtgatggggatgatcaatgaggatttagtccgggggaaaaaaaagggtataaaaatggggggctcaccgaaaaagggaatg

SEQ ID NO: 533635 - DNA, 794 bp, Homo sapiens
cgacgggctcgtctggtccggacgtagcacctccgtgccgtcgccatgtcgcggtttttcaccaccggttcggacagcgagtccgatgtcgtccttgtgcggggaggagtctcgtctagcaaacctggtcggatgccaactatggctgaacagtcaatatgtttgcctgagcgatggatgaaggaatgataccagagagtatgttgttccgcagtgccaatggacaacgaggtttcgaggagctgaccaaccttatcctggaccatccgtaatgctcatgaagattcgtgatgtcgatccaagtgcctggaatcagttagatgctccgtgggaaatgcttctgggaaggccgaggaagcggttgtggaccgaatgataggtgtcccccgagtttctatactccgcggtcctgtgcctgacctagaggactatcttaatgagctttgggaacgataacggaacgggacaccgaagaagatgaacaagaatcaatgctcaaggtctctgaggctgcttgcgtcggaatatccgaactgtacaacccgtgatttcgagtccctaattgttacatgccgtactagtcagagccccgagcagtctgtggtgggatgctggggctgcctgcggggagtccgaaggtcttcgctgcggatgacgctgccgccggagtcagtgctgtgttttcttggaggtgaaccttcggcggctcctctgcggagagtggcggttcctcaagatggctgctcggctgggggccaagagtccggcatgtggccgctgtggccccgtgccat

SEQ ID NO: 533636 - DNA, 163 bp, Homo sapiens
ataacgaagagtttaacttagctatactaaccccaggttaggtcaattgcgtgccagccgaccgcggtcacacgattaacccatgtcaatagtaagccggcgcttaaggggtacctgagctcgaagttcgatacctcgtggtctatagcgtgtttccatgtgg

SEQ ID NO: 533637 - DNA, 390 bp, Homo sapiens
acagtggctcagtctgtaatcgtcagcggttgggtgaggccgaggcgggcagaccacctgaggtcaggagttcgagaccagcctggccaacatggtcaacgctgtccctagtaagggtacaaaaattagctgggtgtgggtgtgggtacctgtgttcccagttacttgggaggctgaggtgggaggatctttcgaacccaggagttcaggatcatagcagtgctgtgatggtgcctacgaatagccactgcataccaaccggggcaatatagcaagatcccatctctttaaaaaaacaaaacgggacgggacctatcttactcacggtattagtctgtgtcctctagagggacagacctattaggatccctgtctctaaaagggggagtt

SEQ ID NO: 533638 - DNA, 285 bp, Homo sapiens
ccagggtgtgagccatagcacccgggcctgcccccagtctggaccattctactaattcgaaagaacatctgggaatgtcacactcttggaatcatagtcgtagaatccttttttttgagacagagtctcacagttgtcgcccaggctgggcggtgcagatttatatatattttttataattttgttattttatttttttttaatttttatttattattttttttttttttttttttttatttttttattataagggggggggggggaggggggaagagaaacaaa

SEQ ID NO: 533639 - DNA, 369 bp, Homo sapiens
gtctggtattattactagttgttgtgaagacttttttacaaacagaaatctgctagtggagttaaaagtaacagtactcgcgtgcgggcatggtggctcacgcctgtaatcccaacatttgggaggcgaggtgggtggatcacctgaggtcaggagttcgagaccagcctagccaacatggtgaacaccgctctacactaaaaatacaaaaattagagttagtgtggtggtgtgggcctgtactcccagctacttgggaggctgaggcaggaggatggacctgggaggtcaaggctgcagtgagtggtgattgcaccactgaacctcagcctggacgacagagcaataccctgtctaaaaacgaaacta

SEQ ID NO: 533640 - DNA, 877 bp, Homo sapiens
agaccggtatttcctacggctccccgaccgcatttggacagtccgcactcgtgccactaagttgcgtccgcaatatgccgggtttctctttgccgcgtctctgtggctctccgtacccagtccaccggttctcagaaaacacggcgacactctttcctggaccccgcccgcccccaatcgaagttggcgagggcggacccaagctgttgttctagggggctgccccacaaacgctgcgcccggagtgctcccgcgtggtgaccactcgtcgtctgggtacccggcgacgcccccccgtggtgtggacccctgctaaacgcccttttttgtaataggcccctgctccccccggggtattaaaagaccgacgcagaattgcctcagagattattgcgccaccataagagggtgttgacagactcagcccacggggcccgtgggaatgaatccccccccgcccccagcgggtccatcaaacattcgtgcggcccgcttcattggtgggctatcaccttcagcgcgcagttatcggccgcacatcgcctatgacgcactaggggggccgatcctcgtgcccgccagaagggtgtctctgggcgggggcacctgtggcaccacagggtcatgtccccggacgatcctctgttcccgatgtcggatatcggcgaacattcgcccgcgccccctctgtggccacagagtcccagccactaggcacctgtcgttggctcccttccctcgccgccatcctccgtagtttgtggacgggcttgcccccccccccgagcatggtgaagaaccccgcacaacccgcaccgtggtttccaccggggctcgggataaacggaaaatgtttcagggaccgccccaacatgcg

SEQ ID NO: 533641 - DNA, 1034 bp, Homo sapiens
ccaggaaaaagggcccagcgcccacctatctccccctcggggctccttccccctcgcggcacacctccgctgtggacccccccccaccatcggcgacgccctaagtagccgcccctatgacgaaggagcgcccctcattctccctgcctcccttcacacaggcgctccagtctgatccaccgaccacccttaaggacgccgcctgaaccaaaccaacatatcacacgtctagacagcgtctacctggcaggacacacatggatgacccacccaatcacacgcatatcaaagagtccaaccctgcccaagacccctaagcaggggccctcgcaagccctcctaaaggaccctccggcctagccatgggaatttcactaccactcgcaaaacgctcctcataccttagccctaactaaacacaacacgctaaccatataccaaagatggcgcgatgtgacacgagtcagcacaccacgcaacggcccaccacacaccaccgtgtccgagaaaaggccttacgatagcgggataagtccctatttaattacctcagaagtttttttcttcgcaggatttttctgagccttttaccactaccagcctagcccctaccccccaattaggagggcactggcccccaacaggcatcaccccgctaaatcccctatgaagtcccactcctataacacatccgtattactcgcatcaggagtatcaatcacctgagctcaccatagtctaatagaaaacaacccgagaaccaaatatattcaagcaactgcgtcatgtacaatatttacttgggtctctattttaccctcctacaagcctcagagtagcttgcgagtctcccttcaccatttccgacggcatctacggctcaacatttgtttgtagccacaggcttcgcacggacttcacgtcacctaatggctcaactttcctcactatctgcttcatccgccaactaatatttcactttacatccaaacatcactttggcttcgaagccacatgacctgatactgacatta

SEQ ID NO: 533642 - DNA, 370 bp, Homo sapiens
gagacaaagtctcactctgttgcccaagctggagtgcagtggtgtcattgcagcctccacctctcgggttcaactgattctcctgcctcagcctcccgactagctgggactacaggcatgctccaccattcccggctgatttttttatttttagtagagatgggatttcactatgttggccaggctggtcttgaacacctggcctcaagtgatccacccgcctcggcctcccaaagtaaagtgctgggattgcagatgtgagctaccacatccggcctatatccagctaatttttaaaaataaatttttgtagagaggtggtctttctcccctcggccttccaacgtactaggattacaggcgtgagcca

SEQ ID NO: 533643 - DNA, 96 bp, Homo sapiens
  misc_feature (19)..(19): n is a, c, g, or t
  misc_feature (23)..(23): n is a, c, g, or t
tttttttgatttcaacganttangagctcgagaaccgtttggcaatatgtacgacgcggatgaggatatgcaatatgatgaggatgatgatgaaat

SEQ ID NO: 533644 - DNA, 791 bp, Homo sapiens
cacgatcttggctcactgcaacctccacctcccgggttcgagcaattctccttcttcagcctcccgagtagctgagattataggcgtgcaccaccacacctggctaatttttgtatttttagtagagacagggtttcaccatattggtcaggctggtcttgaactcctgacctcgtgatccacccacgctcagcaagtgctgggattacaggcgtgtgagccaccacgcccggccatgaaatatttttacttaaaaattgggaataagcttttcggtttttcgtgggtttttgtttttgttttttgttttttgtttttttttttttggagatggagtctgtgctcctgttgtgcaggctggagtgcagtggcacagtctgtggctcactgcaacctccacctccgtgggttcaagcaattctcctccttcagcctcccgagtagctgggattacaggcatgcaccagccacaccgtggtaatataagggtttagtaagagaccgggttcgcaaatttggggcggggggggttcaaaatccccgactccgagtgggacacccgcgctaaagcccccaagggtgagaataacaggatagaacacggggccgcagatataaattgggatccccatacaagtggggcatcgcgagatatatagagaacaacatctcagcggaaaacattatctagacatgcgcgacaaaatctgtcaccagcaattaggcacaccgtgtccaacctctctttcttttttctttttgtcttattactttctccaaaaaagagaaga

SEQ ID NO: 533645 - DNA, 108 bp, Homo sapiens
gtcatgctctttgtagcgtggtgcttctgttgctcacaggacaacttgcctttgatgattttcaagagagttgtgctatgatgtggcaaaagtatgcaggaagcaggc

SEQ ID NO: 533646 - DNA, 444 bp, Homo sapiens
ccagggacccccggaactggtttggatgggttctcttatgcttagtgaggtctgataactgcttaaagatgttgccacattcttcacccttgtctggcctttcttcaaaatgagtcctcttatgccaagaaaggctccacctggttctgaaaaccttcccacattcttaacatcggtagggtttctctccggtgtgaatcctcctgtgttcactgaggtgtgaggactgtgtataggctttcccacattcgtcacatttgtatggtttctcaccagtgtgaattatcttatgtttagtaaggtctgacaaccacttgaaaatgctgtcgcattcctcacatttgaaaggtttccctccaatctcatttctttggtgtttggaaggatttgggctgtggttaaaaccttggtaccatgtttcacatttggagagcttctctccag

SEQ ID NO: 533647 - DNA, 143 bp, Homo sapiens
ctggagcggagcgtccttgatcgcttcctccctgtgcactgatcttggccccctcttatttattttacatccttggcaccccacttgcactgaaagaggttttttttaaatagaagaaatgaggtttcttaaagcttaaaaaa

SEQ ID NO: 533648 - DNA, 145 bp, Homo sapiens
cttggccaattatcctcaagatctcctacaagaggagtaacttctatattaagatccggccgtgattagtatgagcaatttgagagcacaattggctttagagctcccaaaccaccggtcatcgcaagagactgcctcgccaaat

SEQ ID NO: 533649 - DNA, 301 bp, Homo sapiens
tcatcagtgctcccaggtcacctcccaagcctcctacaggctgggacacccaagatctgtgtttctctcaaccccattccagcatcttagcgagttctccccaaacacacaaagaacaaactgctgacctcaaagcagattaaccaagttttccctaattcaagccactgaaggcaaaggagtcagtgacagagaacaagggactgtgacaaggcaggagttgggtgagactgtgttaagaagagctacattttacaagaaccattcaggactccctttcaacctggtccacttaaaacaa

SEQ ID NO: 533650 - DNA, 282 bp, Homo sapiens
atgctttgaaaactgttggatgaaaaaaaaaaaaaaaaaaaaaaaaacagttctcaagagctaacaaagcaaataactggtgttaaatactaagaaaaattttaaaaaaattctcataaaataggaaaaagtcagtatttctcacttagcattttatatgtgatttatctgtgaccctaaatatatatagctaaaaaaaaatgttatgaatgggtatttcacatgcctctgtaaacatttacatattctgttcaggttactcccctccaataaaaacaaaac

SEQ ID NO: 533651 - DNA, 233 bp, Homo sapiens
  misc_feature (128)..(128): n is a, c, g, or t
  misc_feature (130)..(130): n is a, c, g, or t
  misc_feature (147)..(147): n is a, c, g, or t
  misc_feature (164)..(164): n is a, c, g, or t
  misc_feature (167)..(167): n is a, c, g, or t
  misc_feature (186)..(186): n is a, c, g, or t
ttgtaaatgggcacagaaattcagtacctgcttagacagcatcggtttggctgagctgagggatcataggagtgctttttatggtgttgaatttctttgaaaatttctttagaactctggagcccagntnccagggtggagtctttnttctcccactttctagntgnctgtccttcagcaagtacntaatttctgggcctaatttcctcatctgccaactttactgaaccggt

SEQ ID NO: 533652 - DNA, 612 bp, Homo sapiens
agcggacttaagccggcaggatgtcggaggtgcggctgccaccgctacgcgccctggacgacttggttctggggtcggcgcgtctcggcggctcccggatccatagcagacccgcgagcagatgagtgaccgagccgcgtctatcaactaacctccatctaacgtaccaaaccaaactaccgttctctgcttcggcatcggcctcgctctcgccgggttacgttgcggccctacttcattactgcctccctcgagcagcgcatggtatgtgtgcggtggccctctggcgatgcatggatgtgggcagtctgagacccgcgactagctgtgcgccgcgtgccgtcagtatgcgactcctgtcgatgtcctgccttggccgatagttgcttgccgtctggcctccgtggtgcttctgggtcgcgggcggcgcttgcgaccttcctgttcagcatcgccgggccggtgcttctgatcctggtgcacgcctcgttgctgcctgcgctaaccattaagaacaaggattgagaacgagagatcgagagcattggtctcaagcggacgccaatgggcctgctactagaggcactgggacaagagcaggaggctggatcc

SEQ ID NO: 533653 - DNA, 278 bp, Homo sapiens
tggcccaagggaaaaacaacccagtgaaaaaagggtttcccgtttttaaataaaaaaactccagttgaaaaaaaaaaaaaaatttcctgttccaaaaaatgttaacccccttttttgggttaaggaaaaatttttttatgggaaggggtttgtttttgttttttgtttttgttttttggttggattgggaaaaaactttatggggaacttccttatttagtttttagggggcaactttaaaaaaaaaaaaaaaggggtgagttagttaccccccccta

SEQ ID NO: 533654 - DNA, 424 bp, Homo sapiens
ttaaaaccagccctgtcgctctctagctgtacgtggcttaccacgaacttctactccactgggccggtgaccctagctgcttggattggtctggtggagggcgaggaacccttaccaccctccgggaaagagaggtcacaagaaaatcatacagagtgcaggacactatgtggtcacttggaccattacctcctccctccttggtgcaccaagtggccagtgagccagtacaaggcccacctgtcagcgccaggggattcagcaccccatcctcagccaggtgcagcatgcctgtgctgatgacaggacccagataaaggacagcacggttgtagcgtaatgaagtaaacacgaagaaggattttcatcctctccaaaaagcaccttggagatgtggaaaatacaatagttaaattattacctt

SEQ ID NO: 533655 - DNA, 841 bp, Homo sapiens
  misc_feature (841)..(841): n is a, c, g, or t
gtttttttgttatcttttatttgggcaagggaaatttattataaaataccctcagcgggcaacacaggcggtgcccaagccaacgtctcctgcaggccttcggagggccagggcctctgtggggtggcccccaggagctcacggctccgtgtgtgatggaggcacttccacaataaggaaattaccaacctctcatgtgaaaacaggcggggacttccagtggctcctttgggcccatgtgtacttgtgcggggctcctctctagagaggcctctttgtgaggttttcgaggcccagagggcgtgggggcgcgtgcagtgccccacctctccctgtgccgcgccccctccttcgttcctccgcgggaagaggggagtgtggggtggagtctcaagtgcggcgtgtgggttgagaagtgtgcacctagaaggggcgtgaaactccggctgcactcccttggagagacgccccggggggccacggccaaggggccaatcgggagggggggaaaaagggccagcgcaacggtggacacagtgtggcgcttgtggagaaaggcgcccaacgcaacggagcaaagagtggcagtgcattcggcccgggcacaggagagaaacaccggcggggaattcgccgaggtaggaccccgagggcccgtggggagggtggtaccaagaggcactcacgtgcgcgaacaccgtgggcgccgggaacccgaggagacaccctgcgggggggaaacaccggggaaaatgagtgggagacagatatacacaaaaagatccccacagggcacacctgtgaggaggagaccagtgtctggacgcccaagttccccgan

SEQ ID NO: 533656 - DNA, 270 bp, Homo sapiens
cacgaggcgagccctagcggcggctgtggatccgggggcggaagaggaagctgcacacccggtcccgtagggtccccggcgccaggccacgcggccgtcaccagcatgcaaggtaaacgcagagcactgaacttgaattttgcagatccacctttcaaatctacaggatgggttactctgaatcccattcctagaggagttcaaaacccacacatagaattcggtcaacagtggttgaaaaacaacagcatgaacttcttatggatttgg

SEQ ID NO: 533657 - DNA, 405 bp, Homo sapiens
tcagccggtcccgcagctcgctgtcgctgggactggggcgcccgccactcgcccggctgatttttgtatttttagtagagaccgggtttcacaatgttagccaggatggtcctgatctcctgacctcatgatccgcccgcctcggcctcccaaagtgctgggatcacaggtgcgagtcaccgtgcctggccaactaatgaaaagtttaaagaatttatatctagttttggatgttaggcatgcacacacaagtgcatgcacactcatacacatcatctccacaagccccatcctggctcagccctattctgatgggtcagcaggaccccaaggagagaagggtgggtccttggcactaagacagttcaccgtggttagctgactccttctgtgctccattctttc

SEQ ID NO: 533658 - DNA, 1276 bp, Homo sapiens
ctggatcttcccagcgattcctcctctacgctccctcctcttcttcaataaccccaaagagcaggagaagaacgtgcccgcgtgagctgctacgcagaccaccctctcgaccatgccccgggtgaggggggcggtagccttcagagcggcaacttgcacagcggactgcctgggacttaggcctaccgagctacgcgctcccgggacgcccggaattgcacggccgcagcccggttgggggcgctatcgtctatgtcttctatggttgccgccatgacgacactcggggtctcgttttttgctgtagaggagcccacgtgttggtggcttcatgggtggcttgctgccggtccgccggacgcggcgctgacgcgtgctagtgacggctcctgtccgccgcgtgggtgctacgagaaagagacatcgctgatgcgcgggaagaccctctcaaggcatgggaaggcactcggacagtgtgtcatgcgacaatctggggctgcacattctcgtcgaagcccagacgggggacgattttggccgcgaaacaattcacagattgcgattatttggatcctatgcgaggagttgacctagtcccttggaccagggcttgatctggcgctgtgtgaagtgccgatgttggtgcacttcgcatcgggaaagttgtgtcgcagaacttgttggtgattgctgttgttgcttgccccggtgttacgggggcttcccccccattttccccccccggttgattccccggttcgaggctggattgtgccttggggggcactgcaggcaagttcaggcaccggcactggcccagctagtgtcctggggcagcagatggcttgtcctcctttcgttcaccgggcccaaattgttccaatgcggttctttgcgaattactacaagggtccaaaccaagaagattttcaatctagaatgttgattcccaattggaaagcgagccttgggctcgcggcacatttacctgaggtgcacgccgtttggttcccagtgagccacaagcgcccttttttggccttaccacagggtatccccttatcatctaatcctggggcacgactttgggcctgcaaaccctcaaggccgttggggaagtctttttaggccatcctgttggtgggcgacacagcgggccggaatcggtccaatgtctacacacataggaagagacccagcttcaccaattgattctttcgaccccccatttttgaagaccgttctacgccattttaatcgacgtggcttggggcat

SEQ ID NO: 533659 - DNA, 792 bp, Homo sapiens
gctcttagcgtggtcaaagccatctgtagaggagtcgccagaccaacggagtgctctcggaggcgctttggagcccaagccccggtaaggcagcgagttaagactccgacgggtcctctgccgtacaagaagatcctgggcaccttccagaagctcaagagcatgtcgcgggccttcgagcaccaccgcgtggacaggaacaccgtggcgcttgaccacgcccatcgccgagctgctcattgtggccccacgagaagctggccgaggtgggcgagttcgacccctccaaggagcgcctgctcgagtactcccgccgctgctttctggcctggacgacgagacgctcaagaaggtgcaggcgctcaagaagagcaatctgctgctgcccatcacctaccgcttcaagcggtgatcgcaccacgccatccgcagccatccacaccgggccttcctcccccgtggaccccggtggatgaccatgccacacatcatcccacgcacagcgcaccactgcccccatcgatccatcgcatccactgggatctgggggctcccattagaccagggccacaccaagcagcgacaggccccggaccggcacgcggcaccacttcccgaacgccggcacccccattccgcttgggcatgcaccagcccatgtcctcgccgggccccttcctcctggaaaaccaggcaggcagggtgcccccccacctcgagtgggggactgtacagaccccgtctccagccatggccccgcggaggagctgccacacctgattcccggacaga

SEQ ID NO: 533660 - DNA, 107 bp, Homo sapiens
atgttgctgaccatctcctctactacctcttccctgtgctgttacacagtgtctttgttgactgttaagttaaagtcactattcttgcttcctctccagaaaacaca

SEQ ID NO: 533661 - DNA, 410 bp, Homo sapiens
gtgaagatttgttacttaggtaaacccatgtcactggggtttgttgtacagattatttaatcactcaggtattaagcccagtacccaattgttatcttttctaatcctctccctcctcccatcttccattctcaagtagaccccagtgtctgttgtttccttctttgtgttcataaattctcatcatttagctcccatttataagtgagaacatgtggtatctggttttcttttcctctgttggtttgctgaggataatagcctctagctacatccatgtacccacaaaagttataatctggttcttttttatggctgcatggtatccatggtgtgtatgtaccacattttcttagtcaatctgttgttggtggaaatataggttttcatgaaaagattccaagtttttg

SEQ ID NO: 533662 - DNA, 807 bp, Homo sapiens
gggcagttctgtgtcgctaggcttctgcccggcgccgcgacataagctgcgaggaggagctttacgacttcccggtcttcggggccgggcgcagcaaggggccagactctgcgctaggcagggcgctgcgcggccaaaccggccgggcacctgtcgcagaatggtgccaacccgattcgcactgtcgcgcaaaaaaagctcctcaaatggccagcggccagggttgcaagccccgggggccggcccacaatttcggccttcaaattgtggacgcctgggtgtggagcagtcccgtgcttacttccaattcaccatgttgggacttaggctacacactttgcggacgagacttaccctaacatattggcaggaaaatccggcgaggttggacccaaggacttggtccaggaattggccgtggggtaaacccgagggggtgtggccaaggttgcgtgtggggacacaaagtaacttttcacagttgggggcttccctttaccaggggcgaaccatgttcgcgcaggacaccacggaattctttccaattttcatttggtttcgcgcccccagagggggtgttggaattctctttgtgggaaattcctttctcgtggcgccattcagaaggtgtggacttccctttccacagagactcttgtggctttcttcccaccaaaaaatgggtggcggggggactttcacacatggatttggttggacctcttacgcaacaagccccaaagttcaaaagcggtggcagggacggggttcacccacggttggggattgttacggctctgggatcga

SEQ ID NO: 533663 - DNA, 533 bp, Homo sapiens
  misc_feature (157)..(157): n is a, c, g, or t
tggaaaacaacaccttatttattcagggtgtaatactgtctacttcctttcagaagacttgaaaaagatcaaaataggataaatggacagttactactaaacgattcaaatacttgggcagtatcttttttttccccccccctcccccctctttttnaaaaaaaaaaaaaagacccccccccccccccctctcctttttttttttttcacacgtttttaaagtgtcaaaattgatgaatggtataaattcaaaaggaaaattcttttctactgaaaaggacatccagctcgcacaaacggtggttcagctgaaggcaaggcgtttctggttttcctctgcactcgggcggatcgttaacttccccaagttaaaactgagttgctctttccaggcttttcgaagcatctttaagtttccccaccaagtcctgtaattgttccatgctgcaactaaaactaatctctggataggatggggaatcagtgttctgtacacttaaggtcacccaaaatgcagggctgtacatcctatg

SEQ ID NO: 533664 - DNA, 126 bp, Homo sapiens
ggtcaatttgctacacatttgtcagtatttttgccggctggtgaatcaaacaacctgcccaaagattgatttgtgtgtttgtgtgtgtatgtgtgtagtgatgtgtgtgtgtgagtatgagtagag

SEQ ID NO: 533665 - DNA, 869 bp, Homo sapiens
agcgatcgtgccgctgcgctccagcctgggtgacagagtgggactgtgtctcaaaaaaaaaaaaaagaaagaaagaaaaattaaccatcccagccataatttaaccagccccttctctttgctaggcagttagttggatcccagttttctactatgcacagaacatcttttattatacacacactttttctcccctttcttgggattctcaactgtgctatgtgatccatgctcgttttttctcctctatgcagggcgatatagcaaagagcacagggctctgggaatctggacagatctggggttcaaatcctgggcttcccttcttaatggtataacccttaagcaagtttttaaacttctctggaggttccatttcctcatctgtaaatttttagaattaataattcccttatgaggtggtggtaggattacctggtgttaaccgattactgaattcaatgtagatacagcactttagcagagaattatggtactttctgagtaaatcctcagtgaatatgagctggctgcaatggcatgatgacatatgattcttcatatcatggtccttattcagattcatctgcctccaaatggggccttaccccaattccgaggccggggaacttcgaagccaagagaaatggaggaacttttccaaaccagtatatctcagatctcatgatgcaagtttcctaatctagaggaaagttaatgtctgcaaatgatgagccaactagttattgacttgtaacgcagattggcaaaacacttcctgatcaggggccaaacttcacctgtctcttacaacctcacaattgattttcccctgtgactctcaactcgactttccttaaagctttcac

SEQ ID NO: 533666 - DNA, 965 bp, Homo sapiens
tatctccgtccggcttctctcctacctaagtgagtgccgacacccgatggaagattcgatgggacagtggacatgacccccctgaggccccagaactatcttttcggttgtgaactaaaggtcgaaaaaagattatcacttacaaggtggataatgatgaaaatgagcaccagattatctttaagaacggtcaagtttacgggctggtgcaaaggatgagtgcgcacatgtagaaagacagaggccatgacattacgaaggcagtccaattaaagtaacactggcaaattagaaatgtctgtaacagacaacggtttcccttggaggctcagaaataacaccaccagtggtcttacggtacgaagcgccggatgcacgggacagagcacttattacatggaaaagacacaaacaccgacatgtggacgaacgatgcagagtcagaacaatagacaaaggaggaagcgatgtgaaacactcacaccataataccggaaaagcggaatgaccccagaaggagagcagcaaggatacaaccagaaaaaacagctaacacaaagatcgcagaccgaacgatcgatgacgacgatgcgccagaagaggactcagaagatcacgacagagacgaataacagaagaagaagcaagcaggaagaaaggctgaccaagaaagaagaccaatagagaaaaacaagcgagcacagacaaggcacaccgcagaacacagacgaacacgaaccagacacataaagcaacaagccagaagcaaaacaccaaagaagacgaaaatacaaacacgagacacaagagaaccacagagaaagcaaacagaaaggcgcctcaaggaaaacaacagtgaagcgccaagcacaaagcagaaccacaagaaagagaaagacaactctaaagagagaagacaacagacaaaaagcggacaggagaaaaaaatagcagaggacacacaa

SEQ ID NO: 533667 - DNA, 131 bp, Homo sapiens
  misc_feature (9)..(9): n is a, c, g, or t
actgcgtanaccaggcacggtggctcaggctgtaatcccagcacttaggcaggcggaatatggcggatcgacttgagcttaggagttgcagaccaacctgcacagcatagtcaaacccctatccctaccag

SEQ ID NO: 533668 - DNA, 194 bp, Homo sapiens
acgcacacgggatacatgtgatatatgcaaagtaggcacagtttcttagttacagaacgttcaagcttcacatttagtgcagtagaaacaaaagtaggctacagtctgtgccatgtagatgtacagtttctgaaatagttttacacagactttgatacatacaaacccttaaacttatgttacgttccactatt

SEQ ID NO: 533669 - DNA, 169 bp, Homo sapiens
tggattggagctggctagaggacaaaatgagaagatttcataaaacagggagcccatttgttagaagggcaaaatgaagtagtatattttattatactgatgatcatgtgtttgaagattcatctgacatctggattatcaagatatatactggttgcatagaattctc

SEQ ID NO: 533670 - DNA, 407 bp, Homo sapiens
  misc_feature (24)..(24): n is a, c, g, or t
  misc_feature (32)..(32): n is a, c, g, or t
ggaagtttataataaatgcctacntcaaaaanagtagagatttcaaataagctaacgatcccctcaaagaacgagaaaagaacaaaccccaaatttatcagaataataattatcagagcagaaataaatgaaactgaaacttaaatgaaaagttagttgtttgaggccgggcgcagtggctcatacctgtaatcccaacactttgggaggctgaggccggcagatcacaaggtcaagagaacaagaccatcctggccaaaatggtgaaacccatctctactaaaaatacaaaaattggctgggcatggtgcgggtgcctgcaatcccagctacctgggaggctgaggcaggagaatcgtttgaacccaggaggcgtaggctgcaatgagccaagatcgcaactgcac

SEQ ID NO: 533671 - DNA, 421 bp, Homo sapiens
tacaccgagggactcctggttaaccggcctccgtgagacaaaggagccaagagatatgacccaggtgtgcatctctccagtagctccagagtcccagtgctcctgctttcttctcctgaaccagctgatgacaggactaatcaggcagatacatccagcataaaccgaggtgtatatacgagaaacctaacagatcgtgctgaacagaactcataaggcagtccaggcatcttgatccacactcgtcccacagtggcccacttcaccttcagcagcaagtgcacaaaggtgcaagcacattggcatcaatctccatccaaacatgcacaccaaagagcttcgcaatcaggcaatccaaggtctttgcatcagtcctcattccagcagccaaaatccgaacaggtcagcacagacaagcagc

SEQ ID NO: 533672 - DNA, 309 bp, Homo sapiens
gaagcgcacgatggcgtgccacagtgacaatgaatggtgatgattgaccaccaccggaacagtatgaaaatctaaaatggacacgtggagagaaaacttgaggagctcgacggtaagcttgctctggcgaggacaggaactggctgctggagtttgaatcgaaaatgcggaacagggagcacgaattcctgtctgcaggctgacacacatgaggcaacacagccttgtccccgggaggccttaagggttaaactaactgcacaagagagctggaggctctgaagggaaagccggggcaaaggcttgcag

SEQ ID NO: 533673 - DNA, 298 bp, Homo sapiens
  misc_feature (94)..(94): n is a, c, g, or t
  misc_feature (177)..(177): n is a, c, g, or t
agacaaacatctacaagtacaaaagacagtccatggaaacatgacctcaccaaatgaactaaataaggcaccagggaacaatcctggagatgcngcgatatgtgatctttcagtgcagaattcaaaaaagctcttttgaggaaactgaaagaaattcaggataacacagagcagganttcagaattctattagataaatttgataaattgaaatagttaaaaaggaatcaagcagaaatttgggagctggaaaaatacaattggcatatttgaaggaatgcattcagtgtcttttact

SEQ ID NO: 533674 - DNA, 562 bp, Homo sapiens
gcgaaccttcggctggacaccaagatgcctggcgaacagaggcagaggaagaggaggaggaagagatgcaggaggagatggtgctgtggtgaagggtgaggaggatgagggtgaggagaactatgcagagtggatcacactcaccgagtcacccgagtggacgcacgaaagacagccgcgggagcagcaggcgccgtggccccacccgccgagcgccgagcgcagatacaccacgtcagatgccaacgagcaccagctcgacccgcccgtacgacgacgcacgcaacccaaccaccggcgacacacaacgacagcacaagacacacacgacacaaacgaacacaaacagcagacaacagacacagacagcagcccacaccacgcaaacagcacccgcggaccgcaccaacagagccccaggcagcccacacacaacccacgagacaaaaacgcaggcccaagccaacaagcaaaccaggacaacagaaccaaacacacacgagcaacaccgagccacaaacgccacagacgaaacacacgagcaaggcgaaaacagaacaag

SEQ ID NO: 533675 - DNA, 361 bp, Homo sapiens
gaataaaggctcagggaccggcagttctactctggagcccaccagcctctcagtagctccggtgactggcctgtgtctccccctggatggacatgtggacggcgctgctcatcctgcaagccttgttgctaccctccctggctgatggttccacccctgccctgcgctttgtagccgtgggtgattggggagcctccccaatgccccattccacacggcccgggaaactgccaatgccaaggagatctctctgactgtgcagatcctgggtgcaatagggcacgcgaggaggcaaagcttcctcctaaatcaagcatctttctgttactgatgttcaataaaagaatatgttccaaggctg

SEQ ID NO: 533676 - DNA, 299 bp, Homo sapiens
ttttttttgccaagttggggccaaaaagggcaaggaaaacatggggggttagggccccggggggttttcccgccccagccccccctttatttaaaaaccccctggcccgggtcacccaggtggggtcccccccctgccggggccccttgtgggaatgggtttcccgggggaaaaaattaatcccttttcccctttttgggaaccggcccccgtggaaaggggtgagggtgggggggtgttccgtctccccccccctcccgggggcccggtttccaaaaaaaaaaatttgcccttttcca

SEQ ID NO: 533677 - DNA, 988 bp, Homo sapiens
  misc_feature (49)..(49): n is a, c, g, or t
  misc_feature (103)..(103): n is a, c, g, or t
  misc_feature (199)..(199): n is a, c, g, or t
  misc_feature (436)..(436): n is a, c, g, or t
  misc_feature (510)..(510): n is a, c, g, or t
  misc_feature (653)..(653): n is a, c, g, or t
  misc_feature (660)..(660): n is a, c, g, or t
  misc_feature (688)..(688): n is a, c, g, or t
  misc_feature (712)..(712): n is a, c, g, or t
  misc_feature (730)..(730): n is a, c, g, or t
  misc_feature (737)..(737): n is a, c, g, or t
  misc_feature (744)..(744): n is a, c, g, or t
  misc_feature (763)..(763): n is a, c, g, or t
  misc_feature (775)..(775): n is a, c, g, or t
  misc_feature (814)..(814): n is a, c, g, or t
  misc_feature (823)..(823): n is a, c, g, or t
  misc_feature (830)..(830): n is a, c, g, or t
  misc_feature (847)..(847): n is a, c, g, or t
  misc_feature (877)..(877): n is a, c, g, or t
  misc_feature (886)..(886): n is a, c, g, or t
  misc_feature (897)..(897): n is a, c, g, or t
  misc_feature (899)..(899): n is a, c, g, or t
  misc_feature (910)..(910): n is a, c, g, or t
  misc_feature (947)..(947): n is a, c, g, or t
atgcggatgtgggcaatcacactgccctgccaccattgccacagttacnatattaacagggcttttcccctgcacatgttcactaggactaaagctgtgactngctgtggaaggattttccaccttcactgaatccccccgtttctcccttgagtttatcctcttatgtttaacaaggcaagaaatatagaagtaagcnttctcacactcatcacagccatagggtctctctcccgtgtgagtcctgtgaggtacaatgagcattgtctttgtaaggaaggctttcccacagtgactgcatttatagggtttctctcctgagtgaattttctgaagtctaaagagttctgacttctgtgaacagggttgcccacattcaggacaaacaaagggagtttttcctgtatgaaaactctgaagtgctaaaaggcaaganttctggctgaaggccttgccacagttaatgcatccataaggtttctctccagtttgagttcgttgatgtttgtngagattgcccttctgaatgaagccttttccacattcactgcatgtttgaggcttctctcctgtatgagtgcgctgatgttcaacgagtagtgattttctggagagagctctcccacattcgctgcatttatggggcttaattnccgtgtnaattctttgatgttcagtaagctcaganttcctggggaaggctttcccacantcactgcacccgtatggnttctctnctttgtnagccctctcgtgttcagtnagcctgttcctnttgtagaaggcttttccacaaaagccacaaccgttgggnttctctccnctgttanccctctcgtgttcagtnagcctttgcttcttgtagaaggctttccanaaaagcganaaacgttgggntnctttctgtttnattctcttatgcccagtgagcggagacttctcgaggnagctttccacagtagttcattatgggcttctctatttgttt

SEQ ID NO: 533678 - DNA, 139 bp, Homo sapiens
taacgtacaaccctaacataaccattgttaagaacctatttatgtgatcctaactactaccgcatgcctactactcaactgaaactttagcactacggggtaccgagcatcaaggcctaatcatggacatatgggagct

SEQ ID NO: 533679 - DNA, 394 bp, Homo sapiens
ttctttgtaataatatcattttttggtgaattccttattcatattgtgaattaatgatttttttattgtttatttgcttttccataactcacagacctcatttaatgtcattattctgaattctcttttacagatgtcatgcatacaattttcactgaaatctgctgctggagaattatcttattttgttgttttgggggtgtcaaatttttaatttttttaaaaaaggtttattccaatttcaatagcttttggggtacaatttttttgtaatatggatgatttatatagtagtgaattctgagattttagtgcactcatcaccaagcagtgtaccttgtacctaatgtgtagtttttttatccctagaccccctctaccccctctagagcca

SEQ ID NO: 533680 - DNA, 114 bp, Homo sapiens
ctagaggattccccaatatacatccacgagcctgaatgccttcctcagagttaaaaggacttcataatgttcacttccaatatgatctgacacctttctattcagctcagtaaa

SEQ ID NO: 533681 - DNA, 132 bp, Homo sapiens
gactctacaggatcttactatacaccacttgagtgtttaggtctatgtatcaaacagttctgggatgataaccctgatttactgcaaaacttgaaattgctctgcaatttctgctggcaatggtggtatcag

SEQ ID NO: 533682 - DNA, 748 bp, Homo sapiens
tggaaacggggttttgtttttgcccaggcggattacgtttgcaatcaacgttgattggcagctttgacctccaggggctcaagggatcctcctgcctcagtctcccaactaatgggggactacagggcactgtgccaccatactcagtttttttttggtttggtttaagacaaagatgtctcgcttgtgttgcgcccaggctgggtctgagaatcccggggctcaacgcaatttttccacctcagcctcccaaagtgctgaagattacgggtttgaacccatgtgcacccaccccttcaaaactactttaaaagtgtctcgtgctcgtgaacgtgattgtgagaggaatttgtaagtttccagctgtgcgtgaatatttcgagctatttctgaacactcgggaatctttttattcccctatttgggggctccctacttaatttaataagagtcgtggtctatattagacagggttctcgggagagatagtttggtcataatatttaaatccataagatgtgctccatagctcatcagtcttatttcagtaaaaccattttttgggccaaattttctaacacgttttttacttcagtaggtgagggcatgaaaacgtttttattaaagaaagatcctattaaggggctaattgggttttggaaacgcttgcctgataataatggtccagtattggaggatataaaagaaggatgtgccttgacctggtgttgattgtcagcttttttac

SEQ ID NO: 533683 - DNA, 117 bp, Homo sapiens
aggcaccaaggagggcgacggggccgagcaggggctgccatagcactcagagccactggaggacagggactcctgcacatcctcgtcctcagccacctcccctgcctctgcctctgg

SEQ ID NO: 533684 - DNA, 689 bp, Homo sapiens
  misc_feature (351)..(351): n is a, c, g, or t
tcagcccttgccaagctctgcctcttcccccgctgactgggcctctgctgagatgtgggcagctggtcaggatggtcattcgggctcatggcacagcaactgcatgcccatgactcacgacattggtgtgaatgcaaacatggggctggacaggccatggagagcctgtcggacagtgatcctgagatgtgggagttgctgcagagggagtaaggacagtgcatgtgtcgtgtgcctggagctcattgaccgtcagatgatagctattgggtggacgacagagtgtggttggcatgaagatttgatgcatgacttgttgccgatgcagtcacgagtggccgtatgtggaangactcgtatatggacgcagttgtgcattccttgacgacatgattggagtgcagtacacatagttcacgaggccgactacgtaccagtggtaccccaagaccaacctggccgtctacactagcccttactgcaacctcacgaccggatcatggagctggacctgcccgatgggggccatctcacccacggctacatgtctgacgtcaagcggatatcaggcacgatccatcttcttcgagtctatgccctataagctcaccggcttaagcatgtaagtgtagtctgtccaagcccataactggcctcattgactacaaacagctggacattgactgcta

SEQ ID NO: 533685 - DNA, 713 bp, Homo sapiens
agcgggaaatagagccgagggccggcggtggtggcggccatgttgggagctgcaggtccggcggcggctgcctgtgttccgggcgcggagcgaatgccgctgagggcaggggaggagcgaggcaggcggtcggctgcggtggcgagagtaggcgtgaccggcgcggcccgggcgaaggcggccagtcccagcctgggggtcgtgaggtggggtgcggtccgagaagtccgctcggaggccggcgtcggtactatgacgctgaggtcggtcgcatcccagggactagttcgtgagccggctgacaccgggtactcgaccggatcacccggcacgctgcccatgacagactgggtgcttgtgctgtgagaacgtcccggaccggacacgtgacttcacgaggtcgatttccctttcaactgctgatttgcacatggaatgcatttattaggagatgtacccctactcactgatacgacatatcagcgcagcctatggatcccatggcagccttgtggaagagccacccatatagcgaatgccgttggaaacgagacagaaaggtgtataaccgagaggttagggatacaatcatgaggggtaaaaaaccctttgaagttgcaataaaactaaaaaaggttgaattaccaaatgaattgagcatacagagggaaggaaacactcaaaacatagttctgaattgtaaagaagcccct

SEQ ID NO: 533686 - DNA, 664 bp, Homo sapiens
gcacaaggcaaataatccccatgctcagaatgaatatatagagaaagcaattaaggaagaaattgacccctacgtataagagagctccaagatattgcattcgcttaaaaagagataattgaaggagatgatagatgcattttatgatgaaggagaaagcacatctttcgttgatcttaaaggagaaatgcataaacaagcacagttgcatcgcacactttagaagatcaagatgatgaacccagagttcattatgagggttgttgtcctcgagatgatacgtccgcatagacattgaacaatgtaccctgtgaatctgtgcagaactttgtccataattaccccattatcctgtgtaccttgggcaacagtgaggtaaatgttggctacgtgcagatgcctctgaagatacatcgctgttctattaaaagcttcaggcccagagactcaatcactctttattgttgagcggcatgaggggtcagaccatccccgtgtattataatcgctgaccccaatggcctttctaaggcttctaaagcctcccacagatacggtgcaatggtgagcattccttgagggacccatcagttcacaacaatccggcttttatgcattacagtttgacaggtccataaagattgctggggattaaagctgctgg

SEQ ID NO: 533687 - DNA, 870 bp, Homo sapiens
cacgcgtcggtgagaccaggattgacacgagatggcggggttcgtggtgagacgccgtcacggagtcgaaatggtatgcttacgaagcagattctaaaagcagtttctcttcagaacatctttattcataccacttgataagcatctagaaagaccatgtgtgtagactgcagtacaatgggtgatgtcaaagagaactatcttgaaacattatttccagtccaaaatggagctttatattgtgttagtcataaatctacgtattctcctctaacagatgactataattgcaacgtagagcttgtctgacttctgatggcaggacaaatagtaatgctaccacccttctgtggacattccatatgaacaccacaaaacctatccctcgagcagatcctgtgccatactaatgaagaaacacatgatcaagtgctgaaacaccagataggaagaaacaagttgaacaccttgaggaaggccctatgatagaacaattagcaaaatgttctttactactaagcaccgtggtatcctcatggaccggtatcacagatgtcgtaagaatctgaatcctccacaacgaaacgatgatgcggccaggtaccttgagggggatccaaagacgacacagtggctccatttgccatttgagaaacatccagctggggtatccagaaacccgcacagacaaaggaacaagcaccaaactagaaggacgaaaaagaaacagaagaaaagcaggacaacaaaagacaaacaaaaacagaaaacaagaggacaaaaagaaaacacaagacacgcacaacaaaagacaaaagagaaaaacaaacaaaaaaaagaaacaaaacgagcaaagagaaacgaacaaac

SEQ ID NO: 533688 - DNA, 513 bp, Homo sapiens
cagaatgtgtcttatgagcggacgcaggtttgacatgtagctccagctttcctcacagccgcactgagctggggccatctcttgcctcctgagaggtgggtgatggtataccttgtcaaacatgtttccgtaggatatgttgctgatttgtgggttgaggagaggaggctgcaggatagggttgcaagagcctagatgcagcattaacatcctggttggacccttacagaaacccttctattcctatgatccttcgttttctacgtatcgtcaaaagtagttcatgatcagggacagagcagagggctgggagagccaaggtgaacagagtcttaggcctttaagacttcatcgtccagttggcatgggacagtcacccataaccaagtaaccaaatcatccctggaagctcgggtgtggtctgctgagggtgtgtgcagagtgccactgacagcacagggccagaggttgcaggagggactatgtggacccaggttgttttgcctttcttct

SEQ ID NO: 533689 - DNA, 731 bp, Homo sapiens
  misc_feature (146)..(146): n is a, c, g, or t
  misc_feature (161)..(161): n is a, c, g, or t
gctatgatggtcggaatggcgtccccgaagatctcgattctgctgttctcggagggctctgtgccttgtacccagtatcgtggagcgggtctcaccacttcacatagagcgtattgcatacgagcgcatcacgatgttgccagggnacgcgagaacggagngaaggagtctctcgtatatcagtgagtcgtagtggacgtagcgtatggaatcggtacgagcggcgaatgtcgtgcaggtgcagacaagaggatctgccgcagagtccagaggatggaagccgagggcgcctgagtgatagagcaggagtgggccggatgtattgggaccggaacaaacggaatgtgaacgggccactcacagtaatgtatctagtgaactctggggtaccctgctgcggctagtactaactcagagacgaggactggttctcacaccatccagaggatgtatggctgcgacgtggggccggactgggcgctatcctccgcgggtaccagacaggacgcttacgacggcaaggattacatcgcgcctgaacgaggacctgcgctcttggaccgctggcgtgacataggcaggctcagatcacccagcgcaatgtgggaggacggcccatgaggctggagcagtgagagagcctacctggagggccggtgcgtggagtggctccggagatagcctggatgaacgggaaggatacgcatgcggacaacgtgaacccccgcaag

SEQ ID NO: 533690 - DNA, 422 bp, Homo sapiens
atccccctagctggagtgcagtggcacgatctcggtcactgcaaactccgcttccaggattcatgccattctcctgcctcagcctcccgagcagctgggactacaggcgcccgccaccacgcctggctaatttatttttacttctacttagtagagacggggtttcaccactgtgagtgaaacagccactgcgcccagccgggtttacattttattagaagggccaaatgcacagaaagacaaatactgcatgttctcacccatagataggagcttacaacgttgcactcatggaggaagagtgtagaatgataccagaggttgggacggctggctgtatagggtggggggaataaacagaggctggttcatgggtgtgaacatacagtgacatagaagacattagttccaatgttcattag

SEQ ID NO: 533691 - DNA, 774 bp, Homo sapiens
aaaaaaaaaaaaaaaaaaaaaaaaaaaggggggggccccccgcatactaaaaactggggtcccccccggggttttgttttttttaacctggattttggggggggaacttacaaagggaaaaaaaaaattaaaaggggggggagaaaggcaaaaattaacttattttgctttcaatcatcagaagggggctgtattttaccttgggagcagaaccaccttgcgggttaacaacccccggggggagaagatttcttctactaaccccgcgtgagagacgaatttttctcacaattgcctcttcttaacaagcactctcaactatagacattatctctatctgtcaagttattagaactttctaaccaacaccacaccagtgggtgcgtggtgcaaacacaaaatctactgtcgcacctacacgcggaggcacataggggaggctcaccctcattataggagtgtgggcgcctacaaagctctattaatacgtgtgtttttccttctggggtagaacacacagcgtcatacaacagacccatctatttttcttctccagcagagggggtgacgtgtgcccagcggcctccattctttttctctttatgacactctctggggcggcgcgactatattatttgcgcctgcgcgcactgcgagacatctttgtgtgcccccctactattggcgcgccaacataaactatcttctccccacaactcgtatgtctccccccctccgttgggaacaattttctagcgggtgcaccaccaaccg

SEQ ID NO: 533692 - DNA, 128 bp, Homo sapiens
taggatccctgtctctttcgggacggggccacacacttgtggagctagaaatagtggggcaggtccctttccttccttaatttcacccaggggctcctccatgggtccgtagcgcttcacctaccgcc

SEQ ID NO: 533693 - DNA, 462 bp, Homo sapiens
tagctcactactagaccccagttatacgcctggcaggcggaatcctattcgcaggatctgtcattactaacaacatttcccgccggatctcccttgcaaacaagaaaccccctccagctaaaactcagagagctcgctgtcaatttcctaggacttcgaacaggcctagacctcaagtagctaatcaacaaacttaaaatagccatctcgcattatgcaccttttatttcgtccaacgatacttcggattctaccttagcatcactacaacgtacaatcccctatctaggccttcttacgagccacgacctgaccctactcctcctagagcaaatctgattaaaaaagctattagctataacaatttcacagtaccaaatctccatctccatcatcacctcaaaccacctaggcgtaattaagctttacttcctctctttcttcttcccactcatcctgacc

SEQ ID NO: 533694 - DNA, 372 bp, Homo sapiens
  misc_feature (302)..(302): n is a, c, g, or t
  misc_feature (334)..(334): n is a, c, g, or t
ctcagaggatcccgaatctcgaaagtggtgcaaccctcatgaaaattcctttataggacattttcatcaccccataaagcacatacccactagtagtcaattctcattctccccttccccaccccaatcccgagataaccacaaattctgcgttctggtctccattagattttcctatctctgtagcattctctaagactcgtaagtaatttcatggtaaataggaatcatataatatggtggtcttctggggtctgggcttcttttaccggagcataatttcttcaagtgttcattcatgnttgtagcatcagattttttttacatgccaaantaatactccattttatacatgcacaacttgtcgagatt

SEQ ID NO: 533695 - DNA, 465 bp, Homo sapiens
taatatgtatttttaattgacaaaagaggagagtatatatttatgaggcacaatgtgatgttttgatatatgtttgcattgtggaatgattacatcaagctaactgacatatctatcatctcccctacttgtaatctttttgtgatgacaacatttaaagcctactgttttagcaattttgaaacagacaatacattatcattaactatagtcaccatgctgtgcaacagattcaccagaacctgttcctccggtctcagtgacactttgtaccctttgaccagcgtctctcctttcccagtccgtcccccgcacagcctccagtaaccgccattccactctctgcttccacgagttcaactgggtttcacttaaactcctttagcttccctcttggaacagatgcagcaaatgggaccatccatctggtaaacaaagtcctctcccagaataggccaagcaatt

SEQ ID NO: 533696 - DNA, 144 bp, Homo sapiens
aatctctctatccttagtccctttatccttaatctctctatccttaatctctctatccttaatctcacagttcataataatttctcttcgaaataatatgtgtgagattaaggatagagggattaaggatagagagattaagga

SEQ ID NO: 533697 - DNA, 461 bp, Homo sapiens
  misc_feature (10)..(10): n is a, c, g, or t
  misc_feature (12)..(12): n is a, c, g, or t
  misc_feature (15)..(15): n is a, c, g, or t
  misc_feature (52)..(52): n is a, c, g, or t
  misc_feature (401)..(401): n is a, c, g, or t
  misc_feature (455)..(455): n is a, c, g, or t
gcctcgcgangnctncattaccaactgtgatggctatgggacaaaactcctnctgcttgagaaaagcagagaaaaaagtaaaggggactttgccttgcacctaaggtaggatcgtggccatagaggtatagagcaccaagtgggcctttgaggtccctaattacaggacttgacccttggatggcatttctggaccagccctgggccagaggggagcccaaagcccttaaagggtgagatctagggcaggcagcattcaccaccagttgactgaaaagaccttgagccttaaggagacatcaccctcctttaaccttctacttctacctacgcctaatcttacttccacctgcaattcacactacttccccatattcttaacaacgttaaaaattaaaatngacagtttggaacatacaaaacccaccccatttcttccccacattcattggccnttacca

SEQ ID NO: 533698 - DNA, 653 bp, Homo sapiens
gcccactagcccgtatcacctcgtgacgcttctctttcatctctaaagcggattatggtacggctctgatagacccagaggcatagcaaagtctggatgatcagcggcttgcccatgtgccagataacagtcacagagcctaggcgggccttgcacgctatcggcgcttagaccggccatacgtcatggtagcggtcaccatgaacgctggaagccaccgaccgctgctggacgagtgagcgcctcaagtcctgttgatagactgacgattcactttggagctcaacgccagacacatcatggacaatggcaacgagctcttaaacctaatcgtgcagggctgactgatgtgcacgacgagcatgtagcacatcgtgctgatcgttgagatgcaggacgactactgcatgactcctagatcgccgagaccagagtgtatatcacttgcactagctgctatgagactatcgagacatgatgatgccatcttgaatgacactgcaggacacttcgtagtctctggcaattgaatgatttactaggtacatcgctatactgctttaacaagtagttaacgcacgggtaaacttgatgatgctagaaagctgcaggatttcaaccgacctgaggttctgtggcggcggtctgtgctg

SEQ ID NO: 533699 - DNA, 375 bp, Homo sapiens
  misc_feature (103)..(103): n is a, c, g, or t
tcgcctagggaagagcgcatgtggctatgctccacccagtccgattaagcttacaggccacttttcctgcccatctagtgcagatgtgatcgagaagcacatnctcaagctcttccagagcaacctggtgcccgctgatcctgagtgaaggccgcctgccgggtgactcagacactcagggaacaaaatggtcagccagagctgggaaaaccagaactgacttccaaggcagcttctggacaggtggtgggaggggacccttcccaagaggaaccaataaaccttctgtgcagaaatgagggactttgctgtgcttcccggagggcttcctggaggagacagcccctagagggctcacaccttcttcctaagaca

SEQ ID NO: 533700 - DNA, 376 bp, Homo sapiens
tggacaattggttattatagttttatattctcataatctcttaaactataactcgtgcaactccagcataggcatgtggagagggaacaaggaaaaactgtggacacccaagagggaaacgtgcaggcgagaagccacaaagaatctctaggaatacgggcgaagccaaagtgggggtgggagggggtgcctcctccgtggagctacagaaaggaagtgactcggggtggtataaaataaacacacagagctcaaactttttctcgagtgtgtggtccacgagtctccagcagaggggtgaatcttctgtggggggctctgtgccatctccgtggacccaaagggcctccagtggccctccagtgaatttttctcc

SEQ ID NO: 533701 - DNA, 332 bp, Homo sapiens
  misc_feature (262)..(262): n is a, c, g, or t
gctgatcgacttctaggtgcgctcgcagattgaagggcgggccatgccccagatcacctccattatagtgaaccagctcaagaagagcataaagcgcaagcacaccctatcgaattacacagatcagggtggattaatgggaatttacaaagtggtggacttacccttcgtcttgtccaggcaactgaggggtatgctgggcacgtcatcattgaaactgtggcttcaaactcgcctgctgcaattgcggaacttcagcggngagaacgacttatcgccattggaggtgtggtcctggtgtactatgaaagggctgttggccacgtcggtgc

SEQ ID NO: 533702 - DNA, 928 bp, Homo sapiens
gagataaacaaggctggacttcaagtgatctgtcaaccagatgtaattgggatttgacaaggactgtgaaaggctgactctccctgttctctttcatgctggtcaccgggcagtagtgtgggtaactgactgcctcaatacgtatcatagaagccattgagatcccgcagtttatcgggcgcagttacctgacgtatgacaacccagatatcttgaagagggtgtcacggatcaatatctaaatgtgttcatgaggtttacaagctaactgccaaggatggccttttgctgtgcggaggggagcacaggcccatgagaccctaacagctgattacatttccttgggaccttcgggatggagccctcgtgttcagctataacctgggcagtgcgtgtggcatacatcatggtgaatggctccttcaacgatggtcggtggcatcgagtttaaggccgtcagggatggccagtcaggaaagataaccgtggaatgactatggagccagaacaggcagattccccaggcgatgatgcggtagacttaagcatcaatgggagctctgtatgtggtgtggtaatgaaggaaaattgtgtctgcatcactatcaagggcaatatatgagagggctcgtggggtcttgtatctctgcaagttcagaactgtccaaccgattgacacaattttcccttcgtgagaagattgcccgtggattgcgaaccaagatcaacgctttgtacagccacgtttacatccagctgtgacttgttacatggggaacacgcgtccttgataagttctgagacattcacaagggtcccttcagatctgttgcctgtatggtatatgtgccaggcccagtgcatccacggtgtgatgactcttaaccacgaagtaagttctcggtatgagaaactgacacccagcacg

SEQ ID NO: 533703 - DNA, 113 bp, Homo sapiens
cactcggacaacaacgacagaaccagttctttcatttatttttccatccctcacaatagtggttctggaagctaggtccctagaccagcagcatcagcatcacctgggaactg

SEQ ID NO: 533704 - DNA, 359 bp, Homo sapiens
  misc_feature (81)..(81): n is a, c, g, or t
acggcatatattaaacttgattacatcacatgaaatagatgtgcacactcactataagagagccatgatatatgcagaagnccaggtgcagggatcatgcaatagtttcgtacccagatttcagaataccaggtagcaaggaaacacaatggaattgaaggctgaggtgaagtacaggcataagggcaaggaaagcagaacattcaagatgtacctatatacaccagttcttaaaacacgcaaatcatttcccataaggcactggctcatgtaattctgttgaggcagaagtcaatcttaggatgtggtctgtacatatctgcagataagatacacaaaagctgaattcagagttatta

SEQ ID NO: 533705 - DNA, 374 bp, Homo sapiens
aagcataaggcaaaggagaaaaggccaagaagtatcttcgaacagctgacagagtcggaacgtgtacgcagagcccacctgaatgaccttgaaaatattattccattgcttggaatgggcctcctgtattccgtgagtggtcccgaacgctctacagacatgctgcacttcagactatctgtcggagcacggatctaccacaccattgcatatctgacaccccctccccagccaaatagagcttcgaggtcttttgtgggatatggagttactctttccatggcttacaggttgctgaaatgtacattgtacctgtaaagaaagtcatacgaactcagcatccagtgggctggtacgacttctgtgctcccact

SEQ ID NO: 533706 - DNA, 338 bp, Homo sapiens
cacgagggcaagattactactgcagacatctcctgaagacttggctctacaaaatgacagtctgcaaataaatttatttatacaatgtatcctaagtcttaacggatgcaatgtaatcgtcgaaattttaaatctaaaattaaacactgttaacttcaggttaactctgctagataacaaactatgggccaaacgccacaacatctattccaatatattacgtttcctcggaggcgtttcctgcgctatgctaataccaaaaacttgacaactttatctaaatgcaatagcatcaactcttgtgcagaaatttttcttggcaatttctaaatcgggaa

SEQ ID NO: 533707 - DNA, 134 bp, Homo sapiens
ctaccacgaactggagaagaagcagaggaggttgacagtagctctcgcaggccattcaggagctagaggggcaccttgcaggctgaggagagtgcgcggcggaagctggtgctggtataacgcgtcctagtatg

SEQ ID NO: 533708 - DNA, 168 bp, Homo sapiens
tagcgcgtaatctactaacagtctctgatttgcctattccaaatatttagtataagtggaatcatacaatattcgtccttttgctatctggcgtatttcacttagcacaagtgccttcaaggttcatccatgttatagcatatgtcagaactttattcttttttatag

SEQ ID NO: 533709 - DNA, 821 bp, Homo sapiens
cagccaggaggaatgggcatgcttgtgcagagcctcagtgtagagtatcccggggaggctggggctgtagtggtgccagcagtctgggccagagtccagctcagcaactccgggttacatgtgcagcccagtgtgggcctagccacctggcagctgcactcagagtgccacatgtgtcctggctgagctcatctgcctgcctgctgggtggagaaagctggaaggaggagaggcagatctggtggagtggcatgcgatgtgtcccgtggcacccccctggccagcagtgcacccttccgttgtcctgagctgggttgccacctgctccttttcctggtgattccctggacaccctccaagggaaccaaggggaacatgctctgggtccagctgccccagtgaatggactgtgcgccccttccccacatggggtcaagtatcccttccaggcaacagccgtttccttgggcaccagcctgcatgcccagtgctgatgcagggatgtggccatgaattgactctgggaaagagtcattcttagcaatggacttttgtcagggtccaaggaaaggagttggccagccagacccgacccgccttgcaggagggcacgttcgtcatcccgggaactgtgccccatcagtgagccggagggctgtcaggcatctttgtgaaccgggtgctggggtttggccggaggcaacaattgcggggactacggctggtacccatgggctcgcccaagtggactggcttgctgaagcaaatggggaaggccgtcattgaaaaattcacgcttaaggggcagttcaaatagaaca

SEQ ID NO: 533710 - DNA, 440 bp, Homo sapiens
ccggaaaaggttggattaaataaattggtccttaattcctttggtaaccccaatatagtattctagccaacatttaatttttacaaatggaactttttagctggatcaacagaaggattcaatatctatttcattaaaattatttaacccttgttgggtgcgggggttaaaacctgtaatctaagcactttaggagactgaggcaggcagatggcttgagctcaggaatttgaaaccagcctgggcaacatgacaggacccctgtttttactaaaaccacaaaaggttaacctggcatgggggcaccacccgcctgtggtcccggttacttgagaggctggggtggaagaaccacttgagcccagaagttgaggctgcagtgagccatgatcatccactgaattccagcctgggcgacaggagtgagactgtatttaaaa

SEQ ID NO: 533711 - DNA, 362 bp, Homo sapiens
tcctacgagcgcacgctgcggggcgcactttctggtgccatgcagagcttggagtgatcactgcctaggccgatgggtaggcgctatctgactggtgttcaagcgtcaattgttgagttggattgatttctcgaaagccttacctttgcgggttagggacaaattgatgacttgacctttcttcgcattaatcaagctcgatagatgagccgcactgctgatgcgctggccatcaagcttctctatagtatctccgatcagtaagtcggctttgaaagcgggtgagtcatcggaaaccatcgtgattttcacgccatagttcgtctgacgagactgacgttctgcttcatccagttcaatag

SEQ ID NO: 533712 - DNA, 496 bp, Homo sapiens
ggtggtaaagagtcttgtacttcgtgtccacacatggtactgatattctgcatctcggacaggtcagcagagataagcaagtgttgaacagaccttgcacatgcttagtgagtgattcgtaattgagtttatagactcagaaggtatataaggacatttggaatcagtagcagagcacatgcctctttgaaaaaaaccacgtagctaattgggtttcaccaaagagtgcattttgtctcccccttacagccccccaacttcaggtccttagtggttcacaaagagcccaggagccaggcttggatttttccattgtagggccgtggttgtcccagctggggtagatttcagggcggccccccgaaatccctggccacagtgtcgcagattgcctggcttggcagaaagtccagatcacccaaatttgggtggattcttcatttctccactgtagttggggtcccttgattgtgccgggggaaacgtgccggaggtt

SEQ ID NO: 533713 - DNA, 508 bp, Homo sapiens
taatttaattttattttattttttattgatcattcttgggtgtttctcgcagagggggatttggcagggtcataggacaattgtggaaggaaggtcatcagataaacaagtgaacaaaggtctctggttttcctaggcagagtgtttgtgtccctgggtacttgcgaatagggagtggggatgactcttaacaagcatgctgccttcaagcatctgtttaacaaagcacattttgcaccgcccttaatccatttaaccctgagtggacacagcacatgttttatagagcacaaggttgggggtaaggtcttaaatcaacaggatcccaaggcaaaagaatttttcttagttcaaaacaaaatgaaaagtctcccatgtctaccttcctctacacagacacaggaaccatccgatttctcaatcttttccccaccttttccccctttttttttccccaaaacccccttttgcattttgggccccgttttaaaagaacttttcggggtac

SEQ ID NO: 533714 - DNA, 124 bp, Homo sapiens
gaggtgctgaatgagcagagaacaagaaaaaagaagccggctgtggggcggctgttggtgggccctggagggcaagagcgcagctcagtgccgcggcccagaccaactccaacgcggcaggcaa

SEQ ID NO: 533715 - DNA, 339 bp, Homo sapiens
ctgctcctcaccctcctcactcagggcacagggtgctcgggcccagtctgccctgacttaaacctgcctccgtgttttgggcttcttggcaattggttttcctctttctctcaaccggttcatataattacgcgtaatttatatatatactatgtgctctctcggatccaacaaacacacccgggcaaagagccccaaaactctctaattttttgaggggcacattatctcggcctctgggatatctgcttcgtcgtcctctgtctctacgatgtgtcaacatagtggtcctctgaacatatcttgtgtctgagtgcttggacgacggcgtcattatta

SEQ ID NO: 533716 - DNA, 224 bp, Homo sapiens
aggcccaggcccggcctttttttagccggcagtgattgaacccggatttggtcctgaccccaaggaccccatcatttatgtggtgggggcccccctcacgcccaatttgaaaaaacgacgggagtgggcctccagcttattttccgtgaaaaaaaccaaaaaaccgtgaaaggccccccggggtgtgggggacgctgttatgtaaataaagctgctgagttgga

SEQ ID NO: 533717 - DNA, 254 bp, Homo sapiens
ctctatgaggatcccaccttgcttaagatgctcccgagggctgtgggtctaggtggacgcctgccgtgttgcacgcgctcctgttggtgaggccccagacatcctgccaaagtgtctgagcgagcacgagtgttggggacgacggacccactctggccacacggcgaccgagggacagatggggccctgcgtcccaataggctgcctgaaggtgggtagggcggcctgcggaatagtggggtggctgtgggctc

SEQ ID NO: 533718 - DNA, 844 bp, Homo sapiens
  misc_feature (24)..(24): n is a, c, g, or t
  misc_feature (26)..(26): n is a, c, g, or t
agtatcaatagtgtattactctcncncgcaccgtccgtccatacacaccaataccaccaatcccaacactagtataggtacctcggaatacacagcaacactcaggcgcgctgctccaggaggctgcagaggggtcctttttaaccgtcaacaaaactggctatggacacgcccattgggaaactcattgctgcacttcaaggtgatggccacagtggcagaacctaggaagccacagaacaaaccacagaatggagacacatggtagccatggcaagccatcagacccaggatttcccaaagaacactggaccaggaagatgctctgtgaaaaagagctccctggacggacaaatttgcgaaacactttgcataatacttaaaagaatgtatggcacataaaagataatatgcaatgaaacaattcattcctttaaaaccaaaaccaaaaaaatgggttctttatggcctcaaaggtggaactctgaagacgattacctttaaagagggataatacatgatcctaactcactgactcaatgaactcggacaataagatgatgcaagcggcatcaacaaactaaaaggcagaaatactgaaattcacataattacgggtacactgttgatttaacatgtcatcaatttgtctaaaattggacttcaccaccaaaaaggcacagcacaatgaatatatcaccataagctactatcacactttcgaatatgacataaactatataataaagaccccacgagccacaaccatcacagtcgcatattattcattcatgttccccgccgtagccatcctgcacccatcacctgttttcaatttattcca

SEQ ID NO: 533719 - DNA, 154 bp, Homo sapiens
aactcttctcccgggcaggctgcaggcatgcggccaggggccctcgtccattttccaacagtcccagcagctcacatccaccaccagttatctccgttggcatgtccccaggtgcacacatccgccacgtttgctgcggtcacggcaggctcgc

SEQ ID NO: 533720 - DNA, 230 bp, Homo sapiens
tggtggtgggcgcctgtagtcccagctactcaggaggctgaggcaggagaatggcgtgaacccagaaggtggagcttgcagtgaaccgagatcgcaccactgcactccagctagggggacagggcgagactcctctcaaaaaaagaaattagccaaaaaaaaaccccggggggaacttttagggggcccggcccaattgatttccccccggggggaacaggaaaggccca

SEQ ID NO: 533721 - DNA, 114 bp, Homo sapiens
ttaagaatcacaactgtgcaatattgaatacttataggataggctcttatgattctagggtccttaaatcaggcactaatgatttcctatgtgctatgtctaagagtgcaatca

SEQ ID NO: 533722 - DNA, 585 bp, Homo sapiens
  misc_feature (5)..(5): n is a, c, g, or t
  misc_feature (63)..(63): n is a, c, g, or t
  misc_feature (178)..(178): n is a, c, g, or t
ttaanaggggggatggtgggcggggattaccctacataatgtgaatttttaaccataattttnacatgattgagatgtacttgagggttttttgtgttaattgagaaaagactttgcaattttttttttaggatgagcctctcctagacttggcctagaatattagggggggctccangaaggaatactgaagaggaaaagagaggcaggattggggtcacaggcggttcttcaggatggaccaagggggccttggggattggaggggtctcaaaggggctggaggactcggatttacagaaaggcacaggggggcaacttgggggtctggtaggaaggcaccagggggggtatggggtaaccacctttctatacaggagatgggaatctactttggcatttatccaccacagggacaaaggactgggcaggcattcatgggatccttcattggggactcctgaaatcagacatggtcctggagaaagaattttaaggtaggctttctatgcacctatcaagaatgaagagggataggttgggtcaaacaccggcaggggaatccttcaggaattctaatccact

SEQ ID NO: 533723 - DNA, 172 bp, Homo sapiens
gagctgggtccgacatgcctcgtgagcatgctcttctcgaccagcctggtagctgtggtcgtgcgctcgcccgcgggcagcgaaaagaggctgcacattctcaacacgaagcggaactcgaccatatgtgagctgaccttccccacagatatccgcgccgtccgcatgaacc

SEQ ID NO: 533724 - DNA, 373 bp, Homo sapiens
gaaaagaccctcgggggactttttttccccctttggggcaatcccagggccttactccggggggaactttcctggggttaatgaggctgaaaggttcagcaaagggtttccccccttccctggccccctaaggggggggggcccgggtggacttttttttgaacccagaaagcagagctgggggggggtgacttcccccaatccctgccttcatagggcccttttccaggggggactttttggggggcaaaggggggggcctttttggtaaaaactttttggccatcccccccctcctatgggttttttccgggggggacccgctggtgattcctaagggggcctttttccttaaaaggtttccccccggcca

SEQ ID NO: 533725 - DNA, 778 bp, Homo sapiens
  misc_feature (12)..(12): n is a, c, g, or t
  misc_feature (82)..(82): n is a, c, g, or t
  misc_feature (85)..(85): n is a, c, g, or t
  misc_feature (89)..(90): n is a, c, g, or t
  misc_feature (98)..(98): n is a, c, g, or t
  misc_feature (108)..(108): n is a, c, g, or t
  misc_feature (113)..(113): n is a, c, g, or t
  misc_feature (128)..(128): n is a, c, g, or t
  misc_feature (140)..(140): n is a, c, g, or t
  misc_feature (144)..(144): n is a, c, g, or t
  misc_feature (176)..(176): n is a, c, g, or t
  misc_feature (179)..(180): n is a, c, g, or t
  misc_feature (187)..(187): n is a, c, g, or t
  misc_feature (194)..(194): n is a, c, g, or t
  misc_feature (203)..(205): n is a, c, g, or t
  misc_feature (210)..(210): n is a, c, g, or t
  misc_feature (212)..(212): n is a, c, g, or t
  misc_feature (267)..(267): n is a, c, g, or t
  misc_feature (314)..(314): n is a, c, g, or t
  misc_feature (333)..(333): n is a, c, g, or t
  misc_feature (391)..(391): n is a, c, g, or t
  misc_feature (435)..(435): n is a, c, g, or t
  misc_feature (512)..(512): n is a, c, g, or t
  misc_feature (524)..(524): n is a, c, g, or t
  misc_feature (730)..(730): n is a, c, g, or t
agtcataaaganccagagatagtaactgtaagtgtgcctacttcaaacactgtataaagcagtggtcccctaaccttttttnaanaggnnttggtttngtggagatanttttnacagatacaggtgtnggggtagatggnttgngggtgggagtgttccacctcagatcatcgggnatnngattctnataatgngggcacaannnagatntnttgcatgtgcagttcacaatagggttcaggctcctgtaagagtctaatgcgaccnaggggtttgagagccctagtataaaggattacacaatcaaataaaantgactgcaccattatttcngttatttgcaggtaactgaggaatgaacaagtacttctgttagggttcaacttaaatnatttttaagacttatcaaatacaaatactttgtgaatgtaaaantaagctctcttagcgtttaccaaatgatcgggacaacaatattagagggttaataaatgactgatttggcatctatnagtctttttgtnagtgctatcagtcaggtctatctacaggaggtagtgcagaaagcaactgataattcacagaccatcaaggtcccttaacatcatggcaaatacgtaactgtagtttgagagtttaagtaggaaaaagaagtgtacttataaagtagtagtgtttcctagtatctgtaatttgagccatagtaaaacacgtaagttaaatcaggagnagccattctggaaaacacaggggtaacagaaattaagtaatcaagact

SEQ ID NO: 533726 - DNA, 179 bp, Homo sapiens
  misc_feature (86)..(86): n is a, c, g, or t
  misc_feature (110)..(110): n is a, c, g, or t
  misc_feature (167)..(167): n is a, c, g, or t
ccaggaggtggagcttgcagtgagccaaaatcatgccagtgtactccagcctgggtgacagagtgagactccatctcaaaacaaancaaaaccatatgaaaaaccatggncttaattcagtcacactagcattttataaaatgaggtgtctatgtagttaaaaatancatcaacagctt

SEQ ID NO: 533727 - DNA, 1430 bp, Homo sapiens
  misc_feature (722)..(722): n is a, c, g, or t
ttgcgagtaatcaacgacgtcatgtggtctaaggatcgtagaagatagtgtgtggtgtctcctcccctccgcaatgggtggttatttttcccgtcgagacagtatcttcggtgggtgatacatcacacacaggctggttttttgtcagaaagaaagcaagatctgttgtagcgcaccgctccgttgtcgcccacaccacgagaaaaaataatactggggggtcgtgcacaggaggaagacaccacgcccgcgttggtggcaccgcccctagtttttttcggctggatcagcgcccaccccttgtggggaagaaaggagattatgcgttgttaaaagaaggggtggagagggttgttttccctcacaaaagaagtgtgcgctcttgggcccccacagccccttatttgaagagtgtgtttttgtggtgccctcttgaagagagagtgtttccgcacctctgttgtgtaggaccccccccaactgggagaattgaagtggttgtgaagccacacaagcttggaagaggagttggtccgtcgggaaccccaatggggacgctagcttatcccacgggggattttgtaggggttctccacggaagactccccacggaagttggaaatttttctctgatgtccccccctggtttgtcctttgtttggagattggtgaccccccacgcagaaaaatatatatcgggccgttggagtaaaacacgcggngttgccccacagatataaagacatttgggagagaaaacaggcgagaaaagagacatgggtcacacactgtgtagagagacactcatttatagagagaagagaagccacgagataacaccccaaggggaacgcttgggacacacgtgttcgtgagactcgtggagctatataaccacgctgttttccacatatgaacttctctttctcttaaaactcttttttgggcccccctcccctcgaaagttttccctcgagagaattggagagaattcttggaattgaatggaatgggcctcgaaaaggctattccctctggctcgccacgagactttctgaaaaattttggtgcacctcttttgtaaccgctgagggccgctatataaatctcccaagagttcacgtggttaataattttaactcggaggaaagctatattgaaagaatgaatgaatgaatgaattattgacatgaaagaaaggtgaaaaaagcggaatgagaggtataatggtttacccaatgagggcaataatttctctcgtggttaacaccacttgagaagcacaattgaatgacttatgtattcctcttgctataatcactttctgtgatttgggatataaaaacacttttggaaaacatgattttagaattttacagcccaaccatgtatgtataaggtttccaataaataaattgccaaaactccta

SEQ ID NO: 533728 - DNA, 84 bp, Homo sapiens
  misc_feature (40)..(40): n is a, c, g, or t
ccggtcaggattccatctctctgaatctgttatgaacacngttggttggctgattcagtaataaatatgtaggcctttcttttt

SEQ ID NO: 533729 - DNA, 186 bp, Homo sapiens
gtgagcccgtgatgagccacttaatctccgtgtagtacaggaggctacatactggctgtccagctcatagagcaggggtgtgaactcgctgtggttcagtccccgggagcatatccagttcacggacttcactaccacgtccatgacgtggtccatcttcaacttctgagcacagagggattccgg

SEQ ID NO: 533730 - DNA, 1296 bp, Homo sapiens
  misc_feature (282)..(282): n is a, c, g, or t
gcggaggcgtacagaactgcttcaagatgaagctgaacaatctccttcccagccactggctggcagtaagctcattgaagtggacgatgaacgcaaagcttcgatactttgctagttgcatgcaagcgtatggcccacagataagtatgctggactgacgacatctggcgttgaaagaatggaacgggttatgtggtccgaactcggaggtcggtgggcaacgacacatagcaatggtttctctcccacatgaagcatgggtcgtctttgacctcgatgagncctgtgtctccactgcataacatgaagttaaaggtgggcattgtgcacctgttaacaggaatcacaacggcacgaagcatggcatgaaaacgagagagaagaagaagtcaaggtgtcgatgggtctgcgatagtgtggaatgcaaattcttgaagacggtgcttcaaactatgggttgattgtaaaaaacatgaaggagaggaaggagtgaatctcactgcgagagctgagcgttagtagcgtaacgagcgtggcgcgtcgtgcgcgaacgctgagggaaccgcctgaagagagcaggacgtaagagcagaaaagtcgcggcgaacatacttttattcaaaaatctcctactgaaaaagcaaagcagtggatgcgttcgcgaccaggttaatggtttggttacacgaaaaggctcgcgtttcaagatcacacacgcacacgcgtcacacgaaaaaccatgaaggtaactcgagaaaggccacccccaacagattatccaagccgttcctttggctttaaaccttcccaaacgtaggtcccctggccaaggtcaaggaaaaaccggtgccgtgctggcttattctcggctacttgaacaagaaacgcaggcgcggtaacaccaaatggaaaacacacacattataccgtgaaacgaaagggcgtgggccagcaaaactaattgcctatacaacctttttgtggggcccaaacgaacgaaattgacacgggacgggcctacaagggagaaggaaaaggtccggcccatggagagaagacaacagcatttgggccgaaaaaggcaatgaactcggccaacggatacatcttatctgccccttccgttccttagcatcgacctgtcttacataactctttcttaaaaggttctttggacaaattcccaggttctaggaacacacattacaggactttttctttctgaatcgtttacaccaacacattacagcattaaccgaatccacaggaacttcttggaaccaacaccaacacaca

SEQ ID NO: 533731 - DNA, 119 bp, Homo sapiens
caggtgtcttcgtgtgaatacagggtgtatgttgataatgtggtgactgagagaacccgctcgtgttgtggtaaatatgtagagtggagtataggagctgtgactcagtatgttgagtt

SEQ ID NO: 533732 - DNA, 922 bp, Homo sapiens
  misc_feature (866)..(866): n is a, c, g, or t
agcggctcgttcaaggaggaggcgagagcaagcgggacgtcgctggttggggccctaacactcgcgagcgaagccccgtaccttctcgtgctcggttcttgcggcttatcccctctgcctcgtacgctacgaccgggtaggcgctgcgccgtgcatttcaccgctctggagcacacatgcctggacaccatgtaggaccgtgcggcgggtgccaacgaggatgcgcagggacatcctcagagtttgcctgggctgctggtgtgctctggtccacggctgggggccggacaagggcgcgacgcgggaagtgggcgatgatggttagaccatcggctcgggcttgccagcgcgcagggtagggcactcgcgttagtagcaacacgcacaggggttcaaagaagctggagcaggcattcggtggtgcctggccacgtagctggtcgctttggagactctgccgcgctggtggcgcgccctgtcgtggcttgttgcttgacgtccaggcgcgtcagtgccggttccggctctgcggacgccgcactgggctgcctggttgcagcgaagaggtcacagtgcagaacaaagtgttcctgggagtacctgcgagcggtacatagtaagtagcgttgcttgtgtgcgccttgctggaagctagggcacagttaaccgcacccgtgtactcgttcaatgtcaatgccctgtggaacgtggaaccgatgcctttgcggaagacgggatgagggaacataccagccgctcgccaactaccaatgggactggaaggagtgggacgaactgggttgtagagcctcggctagtccagcgttaccggccaataaggtgtctaacgggcccccatatagagncacgcgaattcccatctacggcacaccctagtttttgcaagtccctgttgccccag

SEQ ID NO: 533733 - DNA, 422 bp, Homo sapiens
  misc_feature (297)..(297): n is a, c, g, or t
tgtgaagcttgatcttattcacgaatctatccttcataagggcatcaaaacacttttggaaaagaagaagagagtccaactcaaagatatgggagaggatttggagtggctcggtcagataatggagggacagggggacctagattagaccatggaacgagccaagtccttaatgggatcagtactttggccgaatgtgctcctggatgttaagtaaggaattggcagcaaggattcggtttcctgctggcagggataccggtagaggttgcgaggaacaccattggggttcctcgncaagggcttttcttggacaatgggaccaaaggacgaatcaatcaaaattcggtcaaggatgccagtaaacagatctagagggtgtattatttcctggctccgtatgggctcaagcggatgagcca

SEQ ID NO: 533734 - DNA, 182 bp, Homo sapiens
ccttcagtgccgtgactaaccccgtcatctacttacaatacctagatatttctcttaaaaccaaaaactactattgaattgacagtttcatgctagtagaatttcaagtgagagatcttttccttaatattgacgacacaatttaccatgtacttttaaagcaggaagtggggaaaagtata

SEQ ID NO: 533735 - DNA, 547 bp, Homo sapiens
agaacagctatacatacctccaatcattacttcatttcaatacttatttccaatcacaggaaacatttatttaaaattatctcgtacattttcacctgtgctatctctaattccttcccctgtttgttcccataccttttttgactttttatccccaacaacattatactacagggtttttctactacttattttttgaagcattcattttcccaacacaaaagagctttcttctcggtattatgcaaattgaaatcctgtgtgtattcgatagtagatagacgaattttattttttatttccacttgaagagttacatttcggataaaagtctacaaataacggtgatcattttgattttttcagtataaaaaaagttgccttgatggcatattatgatgtaatgctaattgcttgtaggatagtaaatggtcagtattgaaacctaatctctagctgccgtctggtagatatgaacgaatgttcaccaagcatgtatttggtatttggttgcattgtacactgcaactaataagccaacgaatcg

SEQ ID NO: 533736 - DNA, 462 bp, Homo sapiens
  misc_feature (24)..(24): n is a, c, g, or t
  misc_feature (34)..(34): n is a, c, g, or t
  misc_feature (39)..(39): n is a, c, g, or t
ataagccactatggtgaccactantaagaacccngtggntttaaaaacagtgtcgccggattcggatagatgcgcccactactcggacgcggtcatagcagccagcgcgtctgcgcagagaggcgagagccgcgctgcgcctagtcctgcagctctgcctccgcactcagcggggccctcgggaatcttccagcggcggaaccacgatctgcagcctccaccaggcctggggtggccctgggtgcagagcccagaagggcatcccagctgccctgagtccaggccctggccgattcttggcccgattcccagcccagcccagatcccaggcccaggcagagtctcaggtccaggtcccatcttaagtcctggtcggatgcgaagccctggctcacttccaggcctaggcccgattttaggcccaggctacggcccaggctcaagctcagtcccagtcagtcc

SEQ ID NO: 533737 - DNA, 612 bp, Homo sapiens
  misc_feature (1)..(1): n is a, c, g, or t
  misc_feature (60)..(60): n is a, c, g, or t
  misc_feature (64)..(64): n is a, c, g, or t
  misc_feature (131)..(131): n is a, c, g, or t
  misc_feature (140)..(141): n is a, c, g, or t
  misc_feature (143)..(143): n is a, c, g, or t
  misc_feature (147)..(147): n is a, c, g, or t
  misc_feature (150)..(150): n is a, c, g, or t
  misc_feature (229)..(229): n is a, c, g, or t
  misc_feature (261)..(261): n is a, c, g, or t
  misc_feature (264)..(264): n is a, c, g, or t
  misc_feature (276)..(276): n is a, c, g, or t
  misc_feature (279)..(279): n is a, c, g, or t
  misc_feature (330)..(330): n is a, c, g, or t
  misc_feature (356)..(356): n is a, c, g, or t
  misc_feature (381)..(381): n is a, c, g, or t
  misc_feature (401)..(401): n is a, c, g, or t
  misc_feature (439)..(439): n is a, c, g, or t
  misc_feature (490)..(490): n is a, c, g, or t
  misc_feature (518)..(518): n is a, c, g, or t
  misc_feature (521)..(521): n is a, c, g, or t
  misc_feature (525)..(525): n is a, c, g, or t
  misc_feature (611)..(611): n is a, c, g, or t
ncgctgtataccctcctccacttcccgctgcagccaatcaaaggccgttcgctaccatantgcngtgtcccgccgttcttttttccgcgagactgcagagttcagagggaagctgtacgccgcctttcgcnacgcgcgcnntntgcngancttcccctggacctcaggcctctccggctggagtagcggtggacgcttcacataagcttctctggtcgaacttacccgnatctccagatcggccgcgctgcgtcgaatgcnccncttgccgagccngangatgcgaggacgtcgccgcccctttgccgggtagcgcgaggctcgggggcngagtggagaggcgcaacgcgtggggncagagtggggagggtaaggtgggtncctcgtgcagtcaggacgtntagtccctgaaattgtgattctcaaaccgctactggtncggccgtgctgtgtgctggctcacaggctgctaatgctaacactttcccangccgaggcgggcagatcgcttggcccanganttcnagaccaacctagggcaacatagccataccctgtctacaaaaaaaattaaccgggcacgatggcgcctatagtcctaactactcagnt

SEQ ID NO: 533738 - DNA, 455 bp, Homo sapiens
ccatgttgttttggtaactttgaatatgccttttaacatgatgggtaatgtagagaggaggtgccagctgggcttcctgggtcaagtatggactcagaaagctgtgaaactcactcatttactgcaggaggacttacttcgatcctggatgaataatattgaagataaatgcttaaaatattcctaacaccaggatttgtgcatgtgttttcttccccaagaaagctataaacaatgaaaattttgctgtaagtttccctgtgtcctctcttcctctctcccttccccattcccgaaaactaaagtgaaagaaatgttaactgcctgtttttctgtaaccagtgggccttatctatactcctaattccagttccttgtaaacatcctttgtaaagtcccataagatcctgtctcctttgccatacagctgcaaggtcataaagtagataaaacct

SEQ ID NO: 533739 - DNA, 360 bp, Homo sapiens
aggacagtgtgaggggaaaggacaagtttgagatgccgttgcaaggaaaaaaaaggtctttatgctttcgcatgaggccacattcagctgctagtgaaacgtaatgtcttgaaccgagagaatgctgacgtttcctgcatgtccagagttgggcagtaggctacacttgaagagtagtactatttttataaaagggaatctattcaagtgtcttcacagatttcaagtctctcaaacatcaaggcaacttcagcaggcggtacaggtcacatttcattttgattgaatacatgatcttgaacagctcctggacttgctctttgtaaaaaaaaataaaattattttgagttattctaaaga

SEQ ID NO: 533740 - DNA, 371 bp, Homo sapiens
gcctattcgacggtgtctggggagagggaacattccgtgtagtgaccaacggtgtggttatgctgagtgtacagaatttaacagctcggatttgtgtgtttcgacacaggaaaattttacttcaacgccagtacaacggagggaggcatggttagctcacgcctgtaaccccagcactttgggaggccaaggtgggagaatcgcttgaacccaggaggtcgagaccagcctggggcacatggtgagatcctgtctcgacacacacatatacacacacaaacacacacacacacacacactctctgtataagtctattctagaattacccgcgcgtgatggcgcacctctaaggaggaccacatgcgactgg

SEQ ID NO: 533741 - DNA, 977 bp, Homo sapiens
  misc_feature (734)..(734): n is a, c, g, or t
gcactatgtacaggctccgcctgcccagtgacacatgtccaacggtcgcgggaccctaaccgggcaaaggtagcatactcactatgtggccttaaatagggacctgtatgaatggctccaggagggttcagctggctcttacttctaaccattgaaattgacctgtccgtgacagaggcgggcgatgacgcagcaaggacggagaagcagccttatggcagcttaaagtagattgaatattgcaaagacagtacactatacaaacccactagggtcctaagactaagccaagacctgacacttagaaacattactttcggtgggggcgagctctggagcagaaaccagagctccgagcagtacatgctaagacttcatcagatcaaggcgtacttactatactcaattgatccatctagcttgagcaacgggaagaggttatcctagggataacagcgcgaatcctatgctagagtccatatcgacaattgaggtgttgacgagctcgatgtggatcaggacatcccaatggtgcagccgctattaaaggttcgttgttcaacgattaaagtcctacgtgatctgagttcagaccggagtaatccaggtcggtttctatctacttcaaattcctccctgtacgaaaggacagagaaataagggctacttcacaaagcgccttcccccgtaaatgatatcatctcaattagtattattaccaaccaccaagaacnggttgtagatgggagcccggtatcggataaactaacctgaccgtccgagtcaattctcttctgaaatagcatggcaactctatctatgtgccatctatgagggtgctagctcgagaaattggattacatatgaggcagtgggcctggtatcactggagcgaatcagagcaacattaactaagggataggtttatcccccggggaagttttggctcgaacccgccctaaccttccccctctcga

SEQ ID NO: 533742 - DNA, 839 bp, Homo sapiens
  misc_feature (6)..(6): n is a, c, g, or t
  misc_feature (26)..(26): n is a, c, g, or t
  misc_feature (84)..(85): n is a, c, g, or t
  misc_feature (92)..(92): n is a, c, g, or t
  misc_feature (95)..(95): n is a, c, g, or t
  misc_feature (116)..(117): n is a, c, g, or t
  misc_feature (126)..(126): n is a, c, g, or t
  misc_feature (139)..(139): n is a, c, g, or t
  misc_feature (144)..(144): n is a, c, g, or t
  misc_feature (150)..(151): n is a, c, g, or t
  misc_feature (154)..(154): n is a, c, g, or t
  misc_feature (177)..(177): n is a, c, g, or t
  misc_feature (182)..(182): n is a, c, g, or t
  misc_feature (189)..(189): n is a, c, g, or t
  misc_feature (200)..(200): n is a, c, g, or t
  misc_feature (203)..(203): n is a, c, g, or t
  misc_feature (209)..(209): n is a, c, g, or t
  misc_feature (229)..(229): n is a, c, g, or t
  misc_feature (237)..(237): n is a, c, g, or t
  misc_feature (240)..(240): n is a, c, g, or t
  misc_feature (244)..(244): n is a, c, g, or t
  misc_feature (275)..(275): n is a, c, g, or t
  misc_feature (278)..(278): n is a, c, g, or t
  misc_feature (281)..(281): n is a, c, g, or t
  misc_feature (299)..(299): n is a, c, g, or t
  misc_feature (308)..(308): n is a, c, g, or t
  misc_feature (346)..(346): n is a, c, g, or t
  misc_feature (357)..(357): n is a, c, g, or t
  misc_feature (360)..(360): n is a, c, g, or t
  misc_feature (365)..(365): n is a, c, g, or t
  misc_feature (389)..(389): n is a, c, g, or t
  misc_feature (396)..(396): n is a, c, g, or t
  misc_feature (401)..(401): n is a, c, g, or t
  misc_feature (444)..(444): n is a, c, g, or t
  misc_feature (472)..(472): n is a, c, g, or t
  misc_feature (485)..(486): n is a, c, g, or t
  misc_feature (489)..(489): n is a, c, g, or t
  misc_feature (492)..(492): n is a, c, g, or t
  misc_feature (501)..(501): n is a, c, g, or t
  misc_feature (531)..(531): n is a, c, g, or t
  misc_feature (538)..(538): n is a, c, g, or t
  misc_feature (552)..(552): n is a, c, g, or t
  misc_feature (569)..(570): n is a, c, g, or t
  misc_feature (575)..(575): n is a, c, g, or t
  misc_feature (583)..(583): n is a, c, g, or t
  misc_feature (585)..(585): n is a, c, g, or t
  misc_feature (590)..(590): n is a, c, g, or t
  misc_feature (595)..(595): n is a, c, g, or t
  misc_feature (620)..(620): n is a, c, g, or t
  misc_feature (626)..(626): n is a, c, g, or t
  misc_feature (634)..(634): n is a, c, g, or t
  misc_feature (649)..(649): n is a, c, g, or t
  misc_feature (651)..(651): n is a, c, g, or t
  misc_feature (661)..(661): n is a, c, g, or t
  misc_feature (669)..(669): n is a, c, g, or t
  misc_feature (671)..(671): n is a, c, g, or t
  misc_feature (687)..(687): n is a, c, g, or t
  misc_feature (707)..(707): n is a, c, g, or t
  misc_feature (722)..(722): n is a, c, g, or t
  misc_feature (724)..(724): n is a, c, g, or t
  misc_feature (729)..(729): n is a, c, g, or t
  misc_feature (808)..(808): n is a, c, g, or t
tgaagngttccaactttatttaaaancagaaagccctgctaccatgcccccgctcctcagcattgctctagggggggggggggnngaactanggnccttctgccaagcccaggggnnagggggggnaccccttgcttgngaggnacaggnnggnctcctcacttcttctggggttgngcccnggcccgntgaatcttgtnagngggggncccatctgggggtcccgggnaggggganaanacgngggtcagctcagcctcattccggggttcganggncanatctgcagcctgagccanatcgccaanaagaagcaaagccttgaccttctgctcgggacccacgngggaagcatanttnttggnttcgtatttgttatgttgtttcangcagatntccanaaaagggagggagccaatgggggatttcttgctcttggaaaanttctctagctcttcccaatcttccaaanctgccaggggagnnagnttnagccaccanagcctcttgtcagggatgcggaagtcacgngccagcngctctgcacgcttnttgtgaccgccaaaaannagggnggtaactntnttatntaganacaggtctaggaactggccccccanctcgtnttctaggngccgctgcagccgtngngccgcatttnatcctctntngccttggctgcaaacncattcttggccttgtagaangcatcggcggctgtntncaganctgctactcgcccctcaatacgctcttctgcagcatagctggctcggatgtggaagctgcccaattcctggtgattgtnatcctgattgtaaaggtccttcagcgtctct

SEQ ID NO: 533743 - DNA, 470 bp, Homo sapiens
  misc_feature (304)..(304): n is a, c, g, or t
cggatctacagaagttcaagaaaatcctcgtggcaaaaagtaagcgagacacgggcgacttggtctgcacccaagtcgacgtgaagatcttcgacggtattcccgttatttcaacgccgccctgcggagacaactgcgttgctccgccgacccagaatcccacaggaacaggcgataacggtcccgaccaccaatgtgggggaacgtccggaggggagcttcccaagcctaggtcagcctcgaacttccggtcctgcggattgcccgtgaatgtggcaacgggagctatgtggcaccagttcancgacttctccattcccggaagaacaccggatacggaaatctccttcgttcgaacgtacacttcgagcccggctcagcagccaggcccgctcgggattcgctggcaacataattaccagactcacatcgaacgaagctcggttcctggctcgcaagacttgagctgg

SEQ ID NO: 533744 - DNA, 583 bp, Homo sapiens
ttgttatgtgagtgggcattaatctgggaagagtgggaccctgccagttagattagggctatcttggaggaatatgcggattcaatactgcaaatatttctgaaacaccttctgctttgtactctattagatacccaaagaaattttcatccttgaagcggaggaatttaatgatacctgaatgcctaactgttgtattctgcttatacagaatccaatctcaagatacttggggtgaagaatgatgattcacagaagggaagggacatcttacataaacaaataattgcagatacttgctaaagtgtatcccccaatctgggaaatactgtaaaggtgtatattattattgatgtaccaaagaagacagaataaattcataagagaaagtttatattcagtttactactacctagggttagattttagtttgttgttttttcagatgcaaatctacatgcagccttgcctggtagaagccagaagtgttgacagtattgaggacagcactcacatactgtgggaaagaataatacttgattaggacttattatttaatgaaatgaaaattttacaaaacaga

SEQ ID NO: 533745 - DNA, 195 bp, Homo sapiens
ctgttacgtgagcctagggtgttgtagcagtgtcacattcagtggatgcagtaggggcaagggcagcctcactcagggtgtagaataggaagtatgtgcctgcgttcgggcgtatctggctggttgcttgttcataattatgcctccatagggatagtacaaggcacaggggtcggctatgtgtttctgtcatgg

SEQ ID NO: 533746 - DNA, 1059 bp, Homo sapiens
  misc_feature (2)..(2): n is a, c, g, or t
  misc_feature (31)..(32): n is a, c, g, or t
  misc_feature (60)..(60): n is a, c, g, or t
  misc_feature (65)..(65): n is a, c, g, or t
  misc_feature (68)..(68): n is a, c, g, or t
  misc_feature (149)..(149): n is a, c, g, or t
anttcggcacagcaacctgcaggatctgcgnngacggcagcctcggcctgggcaggccanagcanctngtctaggacacaccttccctgagactcatgacatgagcctggggagacctcatttggtttccattcagaagaccagcgtanccttttgagacttttgggtacatttatcaaaaatgttttccttttgttttaccaggaatgagttcgggctatactctttgaaactgcctttgtgagcaaagtgctttggcaaggcaagggtctccctcagcagggctaggtgcactacagcctctttccccgtgtcccgttggatctgagctgtgtagcacttgttgcattacaaagaaaaagacttctgcaggaaatagggtagagaacaggctgtctagtcagatgcagcttgatctgtggcaaaaccaagtgtggtctttcagcttcagtgtgttagcatcccagcacctgggatggggtttgtgggcaagttgattttgccacactgtagggcccaggtggtcccattgccaccgtgaagccaaattctagcccaagtctggtagagcagtcgggcagctagttttcgggggaggatgatgtggtgggacagaggacctcagtggcctattacggagccctcttcccagactaaattcatagccgagagctcggggggatggtagagttaaaatttaaaataattttctaaattctgtatttggatattagtgtttaagtggtaatttggcaacagtttataaagtgatgttctgaataccataaattatgtgtaggactgtgatggcgcgtgtatgttttattattgaggttgatgtgcacataatacgtcagtgtatatttttaccgagtgaggtctgtcttgtaaaaggagacaaggtgatcaccttgcccatgtttatttgtaagtctgtcaacttagcaatgacacagggtcactcctaaatgacttttttttttttttgccttgtgccttttgaagtatgtgttcattcagaggctgttttgattctcagactgaatcattcaaactctg

SEQ ID NO: 533747 - DNA, 461 bp, Homo sapiens
aagcagtggtatcaacgcagagtggttatggccgggatgactttataaagctacaagtataccccaaaaaaaaaaaaaaaaaattaaaacaaaaatataaaaaaaaaaagaaaaaaaaaatgtgtgtttggggccgccttgggccgcagcgaggaaaagttttcataacacccgtcgtggttgggggggcggggaccccaaggtatggtgaatcggctgcaaactgggcgccaaccccggggcttccccaaagggagacccccggcggcactcgcaccatggcgggcggggggcttccttcacaataataaaaaacgcccgcgggggggaaaaccgggccgggtctggagcacaatctcaacgaggaggagcttccggaggcgccacatacccggggctcccaatccacacggggcgtccacaagcgggcgccagatataaaaataagcccggggcggggc

SEQ ID NO: 533748 - DNA, 787 bp, Homo sapiens
  misc_feature (2)..(2): n is a, c, g, or t
  misc_feature (31)..(32): n is a, c, g, or t
  misc_feature (60)..(60): n is a, c, g, or t
  misc_feature (65)..(65): n is a, c, g, or t
  misc_feature (68)..(68): n is a, c, g, or t
  misc_feature (149)..(149): n is a, c, g, or t
anttcggcacagcaacctgcaggatctgcgnngacggcagcctcggcctgggcaggccanagcanctngtctaggacacaccttccctgagactcatgacatgagcctggggagacctcatttggtttccattcagaagaccagcgtanccttttgagacttttgggtacatttatcaaaaatgttttccttttgttttaccaggaatgagttcgggctatactctttgaaactgcctttgtgagcaaagtgctttggcaaggcaagggtctccctcagcagggctaggtgcactacagcctctttccccgtgtcccgttggatctgagctgtgtagcacttgttgcattacaaagaaaaagacttctgcaggaaatagggtagagaacaggctgtctagtcagatgcagcttgatctgtggcaaaaccaagtgtggtctttcagcttcagtgtgttagcatcccagcacctgggatggggtttgtgggcaagttgattttgccacactgtagggcccaggtggtcccattgccaccgtgaagccaaattctagcccaagtctggtagagcagtcgggcagctagttttcgggggaggatgatgtggtgggacagaggacctcagtggcctattacggagccctcttcccagactaaattcatagccgagagctcggggggatggtagagttaaaatttaaaataattttctaaattctgtatttggatattagtgtttaagtggtaatttggcaacagtttataaagtgatgttctgaataccata

SEQ ID NO: 533749 - DNA, 982 bp, Homo sapiens
gtgttgtggtgctagtttgtctaagtcatccagatgccatcctcgtcggtgcgaagtgacataggctactcgtcgccggcaagactgagcagatgacccttcgtggcaccctcaaggagccacaatggttgggtaacccagatcgctactatcccgcagttcccggacaggatcctctccgcctctccgagataagaccatcatcttgatggaacatctgagcacagtggaatagagaaccaaatcgtatggatatgtccatcgatgcgatggctctgctggggtgtcaagtcccagctttgttgatggtagatgtgtctatatctcctcaggatggcctaggttggtgcctctctcagtgctccttggggtatggaactcctgcgcctctggggatctcacaaagggctaccagacatagaggctgattagtggggccagaacgcaaggatgtgcttggagttgtgggcttctcctcgtgacaacctggcaggattgtctctggatctcgagataaaaccaatcaatgcttatggaataccctgggtgtgtgcaaaatacactgtccaggatgcgagccacttcaggagtgggtgtcttgtgtccgttctcgcccaacagcagcaagccctatcatcgatcatcctgtggctgggacaaaggctgcgtcagaggtatggaaccctggctaacttgccgagcttgagagacaacgacattgggcacaacatggactatcttgaacacgggtgactgtctctccgagattggatcccctctgtagctttctgaggacaagatggccagagcattgttatgggattctcaacggaaaaggcaaatacctttaaccaggctagaatgggtggggaacattactcaagccctgtgtaacgcctaaccgtctggcttttttgcacagccccactcaacacttgattcaggacagactttgatgactgtagaattcaacacaaaggaa

SEQ ID NO: 533750 - DNA, 282 bp, Homo sapiens
  misc_feature (1)..(1): n is a, c, g, or t
ntgactctaccgatccttaccgtagcgcacaacaaacagcatcatactgcagtggacactagctgggtgtactgtaattcaattccaatactatactacctggagataacatcagaatccacaggttgaaggctcagtccccaagactgccccccttcttcagaccaccaagtcaacaaagaccccagactctggaacttctgactcaccctgccttgaacgatgagtttcccatactccctccttgggcgtacgggagtaccgacgctacgcaatatccgg

SEQ ID NO: 533751 - DNA, 197 bp, Homo sapiens
cccacgatcacgataaagaccagcaactaggagccgctggagggggcagaacaggttggagcgtccgttcaaagcttcatgctcagtgagctgcaatacctggccactgccctccagcctgatgctaaagcaagacctgtctcttaatatatatgtgtgtgtgtgtgtgtgtgtgtgtgtagatcgtggggttagta

SEQ ID NO: 533752 - DNA, 261 bp, Homo sapiens
  misc_feature (51)..(51): n is a, c, g, or t
cgagtcggtaccctcgcgaacgtgtatccgcacgcactgcattcccaccgnggatacagggcgagacctgccacccaaaaaaaaagggtcatcagcggctacagggagagagcttcagagaggggcagcagattatccagttaggagatgatgggaatagaggacaagggtgatggagggtggctagctggttcctataaactttctttggatattctacctggtctggggttaatcgggtgaggataacaggttcgcgag

SEQ ID NO: 533753 - DNA, 334 bp, Homo sapiens
gtctgtaatgtgaggactctgcctggtgccagtctggaagtgaggagcgtctctgcctgccgcatcccatctaggaagtgaggagcgcctcttcccggccgccatcccatctaggaagtgaggagtgtctctgccctgggcacccaatcgtcgtgagatgtggtggagcgcctcatgccctgcggccccgtcttgggatgtgaggagcgcctctcgccggtgcgcgaccccctttctgggagtgtgaggacctgtctctgcccatgccgcccctgtctgagaaactgaggagacctctgcccggagagcaaccccatcagaggagaggctgcag

SEQ ID NO: 533754 - DNA, 336 bp, Homo sapiens
ggtgactctagcaggatcccttccctttgtctgcaaagaatataattaaaaattaggctgggcgtgggggctcacacctatatcccagcactttgggaggccaaggcaagcagatcacctgaggtcaggagattgagaccagcctgatcaacatggagaaaccccgtccctactaaaaatacaaaattagccaggcatggtggcgcatgcctgtaatcccagctactcagcaggctgaggcaggagaatcgcttgaacctaggagatggaggctgtggtgagccaagattgtgccattgcactccagcttgggcaacaagaccaaaattccatctc

SEQ ID NO: 533755 - DNA, 272 bp, Homo sapiens
gggggctgcaagtggctggcattgagacgtgggaactgatgctggatggattgcctttccctgccagaagactgtgggcatggttgtcctggggaatggctgcaatggtccaaatgggggacccgggattggccccctggcttaagcaattggcttgcccaacaattggtggggcccggccggcccctcaaagggctggggtaaatttcaaacttgaaaccttcgggaaacaatttaacttgacccttggcccaagggggggtttgggcccc

SEQ ID NO: 533756 - DNA, 349 bp, Homo sapiens
aactccattttaatgcttttcaatgatttcatgcaattgacagaattttcatactttgtgtgtgtggttttttttaaaatgactttttttgttaacttcagacatatttgattacttttagaaggtagaaattgctactaactttgtgtattgaataagtaagaaattgcatcctgattttttccttttattaatagcaagattgaatacttgtgtattttgaatagctacattttccctttggtcaaatgtcagtgtccttttccttgtgatatcttttggagttgctttgtttttcatatcaagttagaggatctctttatataataaaattacttaactgataaaa

SEQ ID NO: 533757 - DNA, 98 bp, Homo sapiens
tcacagttgatgagaaatagagcagcagcaaaagcaaacaatgctacagcacaaaactaaatgcacttcagaaaaacattttttaaaaattactcttg

SEQ ID NO: 533758 - DNA, 354 bp, Homo sapiens
  misc_feature (18)..(18): n is a, c, g, or t
  misc_feature (88)..(88): n is a, c, g, or t
  misc_feature (105)..(105): n is a, c, g, or t
  misc_feature (118)..(118): n is a, c, g, or t
  misc_feature (222)..(222): n is a, c, g, or t
  misc_feature (262)..(262): n is a, c, g, or t
aaaagtgattaaaatatnaacttaaaaatgtgtttgatggggtgcacaatataaatggcatgtaatggtctcactttatatttaaagnacatacataggctgagnaatgaagggtggnaaaaaaaaaactccatgcaaatggccaaccaaaagagagcaggggtggctacctttatatcaggcaaaatagactaattcaaaaatggctgcaagacacaaagnatggccataatgtaacgataaaagagtcaattcagcaganacatatatatatatatgtgtatatatatatatgtatatgtatatatatacgtatatgtatatatgtgtgtgtgtgtgtgtgtgtgtatatgt

SEQ ID NO: 533759 - DNA, 169 bp, Homo sapiens
gagctttgcagttttgcaccagctattcttctgatcagattaccttttccacacttcttcctttgaccaagccctactcctccctcaaggctcaacccaagtgtcacctcctccgggaccctgccaacatcctgtgctcacctccatcagaattctcaaccaccagtca

SEQ ID NO: 533760 - DNA, 397 bp, Homo sapiens
cagattagccttggttcctaattttcaatcggtaccagggggatgataactttacctacttcctaaagttgatgtgaggaatactggggctaatatatttaaccagttatagcaaggccaagcatgtaataggggaatttaaaagctggctgttttaatgtaaaatatagctgcctaattattaagcctctttatggggggaaataggctactataattttaggcaaaataattgggttgtagagaaccaaaccaggtggttccactttactctttgaccattaattggaaataaatacttaggtccattaattaaattaacttttaaaactaagcaggtggttaatccaaggagggaatattattagcaggaactgcatatttaagctggttcttt

SEQ ID NO: 533761 - DNA, 250 bp, Homo sapiens
gtgttttccatggctatgtagggacctaatcaaagtcgagttccataatatgcgacataaattcttttcctccatattcttaaattagcagtagctagtgtagttattttgtggtcattctatcgatctctctaggactctattccatcagaggatccaagtgtgtagatcgcatatatacgatttcgctctcttcttcctcccattatttcccttcacacaattagccccttccaagggctttcactat

SEQ ID NO: 533762 - DNA, 1152 bp, Homo sapiens
gggcttgtcgaggacagccatcgcggacctggctatctagtgcttgtgcgtcattcgcggtaccataagtcccgtagccagtatgccgtagaactgaatcacgatcctggatttaggccagtgttgtctgctcaagaattgcgagagtgccgtactgtactggatgcattctagctgggggctttaatactagcggcgactcacatgtcctctgaatgcgtgcagtacttgcgtgcaacatgagcgacgtaacatatggcgaggcattgatgatgaacccacttgctacatgttccaggcgttaagccggacggcgctggcttgacgcaccagtcgctacgccgtaggcggggtcgtcccagtaagactaaggcgatagcgcgagttgggtcgattcagactagtaaagattcagcgagcctaggcgtttcctttacctgtcaaagcgaccttagcaagcagtatggagactgatttctcatatccaccatggctgagaaagaaatagttgtcttgtggccacccgctatgggcgtattgcccacgcgcacgggcgcgcgacgttaacacttcgactgtgatgccacatgagttcagtacttcccggtcttggagcccatactcggttgagtctcgccgagggccgggatagtttttccggatgaccatgcccttagtgggtctccgctatgcccatgggtggtcgatccccgcgcccctttctacgaaggcgggaagcctcgctcgttgtgtggtttccgttaccctgaaggggggcctttcaccggtgacgacaaggcgcgcacaaaacctgggtgtgctcctgttgcgggttttcggatcgcggttggcccctcctgtgtcggtgcaaaagttgggaaaaaaagggggcccctgtgcggtgctaagccaatgtcgcacatggtgagtgttgtcacaccaagggaacgcggcggtaacgaaacgttcgcctgtgctcattccttagcgattcaccgaagtggtgacaacactccaataaaatatcactccgagagggaattttcccacatccaaggggcgttgagtaagcattatggaaggacggcacggtataaggatggtgcacatatgacacgttgctatgcaggcgaccaagtggaccgaagcggt

SEQ ID NO: 533763 - DNA, 402 bp, Homo sapiens
agcatttgacattgtatatatacttcaaaacatcatgttttacagaaaaaaatgcattttatgtcacatcaaaaaattcatttttaaaacattatagaaagataataatgtttcaaatactgtgtctgtttcataaacttggctgaatagtatcaaaaatacttagttcttgtgtggcttttgtcatctgtcataatcacagaaactctgatatttaacagcatgttctggacccagtacagtctgtgggaaaagccagtgtactttagggtttttactttaagcttggggtacctggagtttctggtacagatggtaatggtatgaaagacactaaaagggcaggtgttgcttatggtcccatgacaccattctgtgaaggcagaacacaaatttgcatgc

SEQ ID NO: 533764 - DNA, 292 bp, Homo sapiens
  misc_feature (213)..(213): n is a, c, g, or t
aacaagtttgtttactttgacacccacgtataactaacaaggatctattgagtcagagattgagtaacttgccagagcctgtttggaaatagaccctgaggatttttcagtatcagtggttggttatgcaatgtctgtggcacgccctataaactaagagaccaaaccttaaaagtgttaaaacaggaaaggcatgttattacttactacatnactttgttatacaaggaactataacttattacagtccgatcatttctggccttgatagtttagggttttagagaagctg

SEQ ID NO: 533765 - DNA, 461 bp, Homo sapiens
aaggcagtggtatcaacgcagagtgcccattatggccgggggggggaaaaaaaaaaaggaaaaaaaaaaaaaaaaaaaaaaaaaaaaaatattggggggggcgtggacgtggaaagaagttttttataaaccattgcgtgttgggggcggcgcggccccaatatgtgtttagtgcacatgggggtgaaagagggggtaccagagagaaaaccccggcggcacaacggacaactgggtggcgtggggtttcttccccaattaaaaaaaaggcggcggggcgggacagcacaggaggcgggtctcctgacacaaactccaacaaggggggccccgagggagggccaacagcggggagactctacccaacccacaggaggcgcccacagggggaagcgcgcggcgagtacaacaaacttaaccgcccccgccccgggaggctaggacaaacatagacagagaga

SEQ ID NO: 533766 - DNA, 892 bp, Homo sapiens
ggcgggagggcgctgaagatcggggcgctcggcgcaggccgcctccagcgccgcgggatgtagcgcgggggaccgcggacctcagtcagagcccgcctgcccggtcttgtctaccatcatgagggagatctctgcctccctggggtctgagagaccccaaactttccccaagctgaagctgcagggtattgacggtacctgccagatggtcttcccacaaaggatctgtggtggctacaggtgaatggggctcctgcctagtaacatgggcaagtctgtacacggtggaactgtgctgatactgggacccctgctagaatgagaaggtgcaaacgggtaatcgcctagccacccaaagttgaagaagagcaaacatgcccagtgcccctaggaagaagaggaggaggtgcgggtacttgcgcacttcccccttgcatgcccaccacgccgtggaggactatggatgagtttgtgtcccaggtcttgggaggtgaccttggacggtctatcccgatatgatgtgctcgctgattggtgtacacggacaatgacatatcttgtgtacagtggtcggtatacctcgcatgcactcttttcgcgcttgtttcaagaagcatcttccggcatttattccagaaagtggcagcacatctggaccacatcatgcttggcttgtcgtgctgtatgtcttttgtgagttttgacctattgctcagactacaattgtctccatgccccttacgggaaaggggctctgggcagtctgtagcgtgcagggtcttctcgacttccctggctttgaaaccggactgtcgtcacgaacgcccggacttcagttgctataggatgcttacaagggagcttgtccgggctttactcatgcccacaggat

SEQ ID NO: 533767 - DNA, 796 bp, Homo sapiens
gcgtcccccggtagagctttatggcccccaccccgggtacagttgggtccatctttcggtgaaaccctgttcgaacctggttttttataacgggtatctgccccgggtccgtgactacttgacccatctttcaaggttactgggaaatcactttatcttcgccctgatgccctccctagatattgtactgttgcttaaccaaggattctccacttggtggcatccggcaccagcctttattatctcctgatttctatggatccaaaatgctaggcaccctttaattgggtgctcctgggtcaaggtctttgttgaggttccagccaactattggcccgggctgtggtctcatctgaaggcccgagagagagagaaaaaggggagggaatctgttttccatttcacttacaccattattggccggtccttctacgctgggctgaatgaccacctggtagctgacttcccctaggaagagagaccaagaaagccggagtgagaaagtgagagttagagccgaccagagagattgagccagaaaatgtgccaccatatgcaccccaatggccctgaagaccgaagtccaccatctttctgtgatctaatcttgaagtaaccatctcatcagtttttcatatttgttagaagcaagtcaacttcagcacattacccaggagagaaattacacacaggttgtgaaataccacgaaccctggctcgttgtgatccatcctagggagtatttgatgcactgtcctgggccaatggcagaaataaattccatatccaaccccca

SEQ ID NO: 533768 - DNA, 244 bp, Homo sapiens
  misc_feature (24)..(24): n is a, c, g, or t
  misc_feature (28)..(28): n is a, c, g, or t
  misc_feature (165)..(165): n is a, c, g, or t
  misc_feature (175)..(175): n is a, c, g, or t
agccgctcaggtgaatggcgctanaacngggcactgtgctctgtttgctggctctcctggttctggtgaacagctgatgagctcggctgtcaggacatgaactgcatccgccagcccaccatgtgccctgctgcgcagtggtggaggggccgacgcctcgtggtnctgctcagtngcctcgtgctgctggtcaccggcctgaccctggccggctggcgccgcccctgcccctgctcggccgctg

SEQ ID NO: 533769 - DNA, 101 bp, Homo sapiens
acttcgtggacccaatcctactattcccgcctaggcctcccaaagtgctgggattacaggcatgagctagaatgccaaacgaatctttttcctaaactaca

SEQ ID NO: 533770 - DNA, 822 bp, Homo sapiens
  misc_feature (102)..(102): n is a, c, g, or t
  misc_feature (330)..(330): n is a, c, g, or t
  misc_feature (493)..(493): n is a, c, g, or t
  misc_feature (496)..(496): n is a, c, g, or t
  misc_feature (500)..(500): n is a, c, g, or t
  misc_feature (504)..(504): n is a, c, g, or t
  misc_feature (507)..(507): n is a, c, g, or t
  misc_feature (521)..(521): n is a, c, g, or t
  misc_feature (543)..(543): n is a, c, g, or t
  misc_feature (546)..(546): n is a, c, g, or t
  misc_feature (558)..(558): n is a, c, g, or t
  misc_feature (580)..(580): n is a, c, g, or t
  misc_feature (585)..(585): n is a, c, g, or t
  misc_feature (591)..(591): n is a, c, g, or t
  misc_feature (595)..(596): n is a, c, g, or t
  misc_feature (617)..(617): n is a, c, g, or t
  misc_feature (622)..(622): n is a, c, g, or t
  misc_feature (633)..(633): n is a, c, g, or t
  misc_feature (642)..(642): n is a, c, g, or t
  misc_feature (644)..(644): n is a, c, g, or t
  misc_feature (652)..(653): n is a, c, g, or t
  misc_feature (663)..(663): n is a, c, g, or t
  misc_feature (671)..(672): n is a, c, g, or t
  misc_feature (677)..(677): n is a, c, g, or t
  misc_feature (700)..(700): n is a, c, g, or t
  misc_feature (739)..(739): n is a, c, g, or t
  misc_feature (743)..(744): n is a, c, g, or t
  misc_feature (754)..(755): n is a, c, g, or t
  misc_feature (761)..(761): n is a, c, g, or t
  misc_feature (782)..(782): n is a, c, g, or t
gaccggccgggccatgggcgccgggggcagaggcggaggcggcagaggcggaggcggcagaggctgcccgggcggcggcgaggggccggcggcgcgggacgngggccgggtagcgccgggccgagcgcggaccatgggccgggctggcaccgggaccgggggcgaggcggtggccgcggtggtggcggggccgctgctgctgctgctgcttgcccggcccccgcctgcctccgccggctacagcgggaagagcgaggtggggctggtgtccgagcacttctcgcaggccccgcagaggctgtccttctacagctggtacggcagtgccangctcttccgcttccgcgtgcccccagatgctgtgcttctacgctggctcctgcaggtctcccgggagagcggcgctgcctgcaccgacgcggagatcaccgttgcacttccgttccggcgcccctccggtcatcaacccggctgtggcaccagctttcccggnacnacanccgnggntacagaccctcctntccaggttcgggggttgccggntgnagcaccaacagncgaggaagcaaatgccttccgntcaangttttngggnnccgggcccccgggggactggnttccntggccgcccancttgccccncngcagtccnngaaaaatcgnattgaaannggctnggtctcccaccctgtgcctgcgntcttccagcccggaatctgctgggtcacgcgggggggtngagnntttccatcannggggcnggacgttgccccttccctcanaaccctcctctcccaatcccagactacctcaagggtcttt

SEQ ID NO: 533771 - DNA, 332 bp, Homo sapiens
tccccatcactaccatcaacatttttcatagaattagaaaaaaatttaaaagttatataaaaccaaaaaagaaatcgcagagccaagacaatcctaagcaaaaaaaaaaaaaaaaacccaaggtgggaggcttcacactaccggatttcaaattttactacaaggccacagtaaccaaaacagcttggtccgggtacaaaaacgggcacttagacaatgggaacagattatggacctcaaaattaacaccacacattccataaccatcgtgatctcaacaaccccaatgaaaaagcaagggggcagggattcccaatttaaataacgggggg

SEQ ID NO: 533772 - DNA, 511 bp, Homo sapiens
  misc_feature (3)..(3): n is a, c, g, or t
cgntttatcataggaggtgggttcttaccaccctgtttccctcagcaaaatgaaactgtcccttttgcctctgtaggcaatcttctgaacaaggcattcctaatattcttatctcatcttattttatcttatcctcttctctgtaccttgtttacatgcttctggaacacttgtgtgtcttgcacccatctcctgcattatttaggcaatcctaacagaaggccgctaggatggattggaagagaactgctggcatattgagccctctctctttgtatctggaactttcataattaccttagttctccatgccaattttgcacttatctttgttctccacttcaaaatacatttacctctgacagctactcaggaggctgaggcaggaggatcccttgagttcaggagtttaagaccagcctggacaacataggaagatcccatctcaattttttaaaatgagaaaaaaaatagataaacttaaacatattaaaattttaaagagtttatt

SEQ ID NO: 533773 - DNA, 1214 bp, Homo sapiens
tataacaaactgtccttattttcaaagtgaaaactgcggaacattaataatttttcacccggtggagctccccaaaagccctggtgtgcccagtaaacccctgtgtgtgggcgagaggacaatgaggcggggacctccgggagcttccttgaaaggcgccgtgttctgtgggcagcacaggtgacatttatttcacgttcaggcgacgcggaacatttgacatctctaggaagttggggacaacgtgaaaagaacccattcctcctcaacttcccgaggacggggtgccaggtcccccttaaaaaaggcaacaatgtggcaggtgcaggttgtgggcacaagtgtggttgtgagtctgttcaggggtctcgacacaaagggaccaccactgagtgattactcgttgtttgtccccccgaggactcacgtgtgagttaaagaccccctcttctgtgtggaaaaagcgtgggagcttgaaggcgagagggaccccgagcggtggtgcacaggagagtatgtcccccaaggggcgcatatcaccttcgggaggcgacaagggccagatataccacccaaagagattcgtatatagacgtcccgagagaataaacgccggtgccaatgacagcaacccttttccctcttacaataaaaggtgcccaagggggcgccttttttggtgacgcagttaagagaggcgagaccaaaaccatgtttgcagaagaggggttgttaagaaaagtacgtcgtctcgatgatacagacacatcctcagttaagccgtttagttttgcgccccagagacataagcacggacatcacggagtgttatgactccccactattttgagggcatccaggctgtatcacacaagtgagaaaacacccatcataagcagcgtttctccaaattgcacaccactcctagcagcaccagtggcagcacgcaatgtttttaggtgattcgtttggcagatacaaaaccccggggttgagggaacacatactcaagaagctgcctatccccattaacgagaaatttaaaatctcggggggaacgcccccacaacaaaattgtaccgtggctcctctgagagacagacataagattcctacagatacatcgacaacataatggatgcttccacatacgagtataatccaaccacacaaacaactatagtgctatacaaacgtgtgataatgacaaattg

SEQ ID NO: 533774 - DNA, 143 bp, Homo sapiens
cagccccgcaagacgccatgtatacgggcattgctgacaggatgcagaacggagatcaccgccctggtgcccagcaccactgaatatcaatgatcatctgcacccccaagagcgcaagtactacggtgtggatcaggtggctc

SEQ ID NO: 533775 - DNA, 793 bp, Homo sapiens
  misc_feature (1)..(1): n is a, c, g, or t
nggaaccaggtttaaaaatccccgaaatgtaaaccattctttctggcgatggccgctgagtttaataaggaatgggttccggaaccaacaagttggtggtgctcagaagtcccaatgttaaaattaagagcgttcccgttcaatcaatcaggtggagggtcttgggtaaaaatttgcctcaatcctgttctctcaagcatgactttcgcattgtgaccccaagtgaaaaatcaatattgcctaaattgaattgtatgtaaccgcattccaacagatttttccggtctccacaaaggtcacagattgtaaatggacgaacgacctttttttttattcccaggacccaagacagttaatttcacttcaaaaactgttttagacctctgtgggctggtttatacaacaatgtgcgaacccttgttgctctcatgaaagcagattgttttacgaggtgggtcagaaaatataggctttcgatgtaaaaataggcatgtttaaatgtcagtcttagtcctaggaacatcaagttcacccattttgtatcatagagctcaagcagtgtttgtccctttccattcataaagtatagttggatgttatatgtaacgtttgctttgctagttctcccctgtacaggcacaaaagggaaagctccaccctatcaataacagccttttccctccccgcaaaaaatatgtggttcccaaatattgttatttggtgcaccctaggtatcgcagccgcctaaaacatggctaacgaattctgaccttttgggaggctctacctgcac

SEQ ID NO: 533776 - DNA, 122 bp, Homo sapiens
gggtgttcaggtgcagttcgtccacattctcagatttgaacggataatatcgtaccaagtaataaaaaaaatactagatgctacgacacttaacactcatagtacatacatatggggatcct

SEQ ID NO: 533777 - DNA, 380 bp, Homo sapiens
  misc_feature (35)..(35): n is a, c, g, or t
  misc_feature (75)..(75): n is a, c, g, or t
  misc_feature (80)..(80): n is a, c, g, or t
  misc_feature (90)..(90): n is a, c, g, or t
  misc_feature (102)..(103): n is a, c, g, or t
  misc_feature (123)..(123): n is a, c, g, or t
  misc_feature (125)..(125): n is a, c, g, or t
  misc_feature (157)..(157): n is a, c, g, or t
  misc_feature (163)..(164): n is a, c, g, or t
  misc_feature (172)..(172): n is a, c, g, or t
  misc_feature (187)..(187): n is a, c, g, or t
  misc_feature (194)..(194): n is a, c, g, or t
  misc_feature (199)..(199): n is a, c, g, or t
  misc_feature (217)..(217): n is a, c, g, or t
  misc_feature (235)..(235): n is a, c, g, or t
  misc_feature (237)..(237): n is a, c, g, or t
  misc_feature (240)..(240): n is a, c, g, or t
  misc_feature (243)..(243): n is a, c, g, or t
  misc_feature (260)..(261): n is a, c, g, or t
  misc_feature (294)..(295): n is a, c, g, or t
  misc_feature (313)..(313): n is a, c, g, or t
  misc_feature (315)..(315): n is a, c, g, or t
  misc_feature (329)..(329): n is a, c, g, or t
  misc_feature (340)..(340): n is a, c, g, or t
  misc_feature (350)..(350): n is a, c, g, or t
  misc_feature (352)..(353): n is a, c, g, or t
  misc_feature (356)..(357): n is a, c, g, or t
  misc_feature (361)..(364): n is a, c, g, or t
  misc_feature (366)..(366): n is a, c, g, or t
  misc_feature (368)..(369): n is a, c, g, or t
  misc_feature (374)..(374): n is a, c, g, or t
  misc_feature (377)..(377): n is a, c, g, or t
ttgtcagtgcacagtttgcgcagttccaatagtgnttgattcacatttttttccaaatgtaatgcacactccatngcatncagccgtctntcacagtcatcnnagtgtggtttcttgatatcntnaagaaagattcgcccacctcgttggttccgcngcttcnncagtttcncggcatgttccctcncctcatnagatnggtaaagaaagtattggncaaagttcttcaaagccncntcntcncggtcaaagtagtaacnnatgcacagtgtaaccgtaggaggcgtagagccnnaggttgatctggcggttnanggccgcctcagagntctgggtgtanctctcgcgcncnngcnntgtnnnngngnntctcntgnccc

SEQ ID NO: 533778 - DNA, 137 bp, Homo sapiens
  misc_feature (120)..(120): n is a, c, g, or t
gggcaggggagaaaatattcatgtggaacacttttgtaaaaccccttaaattgaggagactgaaattatgagctctaggccgggcgtggtggctcacacctgcaatcccagcacctttanaaagtcaatcacactgt

SEQ ID NO: 533779 - DNA, 729 bp, Homo sapiens
  misc_feature (9)..(9): n is a, c, g, or t
  misc_feature (12)..(12): n is a, c, g, or t
  misc_feature (98)..(98): n is a, c, g, or t
ggtcgtctnggncgggatgttgttgatgccgcaaccgctcagcacgctgctgatcagtaacagcgccgcagccttgaagccccagcgataagtgtgtnctgcttgcatagtgtttctcctgcccgatctgatggaatgtgacgactaaccctataaaccacgcgcttggggcataatccgccaccactggaatgcttcgagccaatcagctacaaagatgcccagcgcgaaaaagagttcagagtgtgctgcatttatctgaacaacacccgaacaacaatagacgttccccacattttggccgacagcatctctctgaatgctgcgcagtcgccgaaaaaggatattcatgaaaaagctgtgcttgctcggccttgttgccactctggccagccaccccgtatgggcagaaacaaagcctgctgcgcttaacgacaaggacgccttcgtcagcgacctgctcaagcaaatgaccctggatgagaagatcggccaattgcgcctgatcagcatcggcccggaaatgccccgcgagctgatccgcaaggaaatcgccgccggccgcatcggtggcacgttcaactccatcacccgcccggaaaaccgtccgatgcaggacgcggccatgcgcagccgcttgaagatcccgatgttcttcgcctatgacgtgatccacggccaccgcaccatttcccgatcagctggcctggctcaagtgagaagaccagg

SEQ ID NO: 533780 - DNA, 858 bp, Homo sapiens
gctctgttggtgtaagaagcgttttttcaggctgggctgctggctcatgcctgtaatctcagcactttgggaggccgaggcaggtggatcacttgaggtcaggagttcgagaccagcctggccaacatggggaaacctcgtctctactaaaaatagaaaaattagctgggcgtggtggcgcatgcctgtaatcccagctactcgggagactgaggcaggagaatcacttgaacccgggaggcagaggttgcagtgagctgagatcgcgccacggcacttcagccgggggaacagagtgagacttcatctcaaaaaaaaaaaaaaaaaaaaaaaaaaaaaaaaaaaaaaagggggggggcgaaaaaagcccccgggggcgcctcaagagcaggggcagctcacccccgacttttcggtagcaccaggggggtgggccccagaaaggggaggggccgagtgaatagaaagaccaacggaagcagggagcgggaatctacaagggatgtgactggagcgggaacacaactcgcatgaggcggggctctatggggcaggggagacccacttccatgggggcggggggaccatcacggggagcaactagcgcaacaaatatcacggccacgggcggggcacaacagacactgtgggcagcgaagatacgcggtgtgcagaccgccggattatgcaggccggaacaaattcgttgccacgacgatgggttgaggaacaatttttccggggggggcggtaaacccgctctcaggccatgtccacaggtctcgcagtacaggctcaggaagcggtcacactgaatggcacaagatgacacaaccgaggggacagaggaagggcaac

SEQ ID NO: 533781 - DNA, 248 bp, Homo sapiens
tatttgcaggatcctaatgggtgaggtggtatctcattgtggttttgatttgcatttccctaatgagtgatgttgagcatctttttatgttcttgtcagccatttgtctatctttggagaaatggctattcaagtccattgaccatatttctaaaaaaagagattgtttgattttttgttgttgctgaattgtaggagttctttatatattgtgaattttaattccacatcagttacataatttgcca

SEQ ID NO: 533782 - DNA, 129 bp, Homo sapiens
ctttaagggacatagacatttatgacagaattaacaaatatttacaacagaatacaagtactacctataaaaatgttagctgtaagcgcttcttaaaggtaaacatgtaatcttcattaaattacttac

SEQ ID NO: 533783 - DNA, 1582 bp, Homo sapiens
cccgccccccccctcgctaggtagaggcctggtgttaatcggccgaggccaagattgcacagcttggaggagcagctggacaacgagaccaaggcagcgccaggcagcctgcaaacaggtgcgtcggaccgagaagaagctgaaggatgtgctgctgcatggtgtgatgactgatgcgtgagtgaactgcctgatgcagtacaatggaccatgtgccgacaatggcatctaccctgcctgaatgcatgctcaatgctggcagcttggaggaggcctgaatgcaggatgtgcccatgctgggccaactgcctcccgaccggaaaccttgcatgctgcgacgctggacggaccgccacgtagagacaggcctgagtgccattgaaacctgcgagagtcattcgctcctctaacatgaacagaggctcaagtgctgcagtggtgatcctgcccggttcgtgtccgctgaccacgcgacccgcaaactggcacccgtcgcacaagtgccgcccgtgcgcgactgcgccctccggaaccgaacgcacgcgcatagacatggtcaaacgcacggtcctggcgccctgcacgcgcccacacaccccatgcccggacagtcagatgacccctcctatatcgatcagcatatgcaaggccctctgcagaaactagtgaatgggacacagccaccacgtaccaacgcaacacggacctatcagcggtttacacatagccacctagcccgtaccaaagcgcccgggcccttcctacgacacaagcagcttcctatatggcggaaacagcctatgatgcaatccacttgtccctacacaatcacattgacaccatcacatacaacttcactacaccactaaccacaattcaaaccacaaatatcatacctaactaaacataacaaaaacaaaaacagaatcaaacgaaactctactcttcaccaccaacaaaacaaacccaacacataaaaactacccactccacccctatgacccggatttaacgagaaaaaacaataacggagagaactaggagcacgatacaacacacaggagccagctcactacagtgaatgcaattaactggaaccgacccgaacagcgagctatcagagggccagacatacagctacgtcaggaatggcattcaaccctgacgccccaccaaaggcagccagaacggatggggacgcgaacgacagactagtcagcatcagtgaaagagaacatacctcgcagcaacctccaccgggtcatgctaaggacacagatggatccggacgtcatataggaagatgaacgagccggtgacggcatcgaaatacatgactgactcaatcactatatcactctggactatcataccactccaccatcagacaccaatcaccagcatacacaatgccactcacaccaacaccccatcactccctttcaccatccatatccaacactcagacttatcaatcacactcctccccgcccatcaccactgacaacaccaaacaaccacagcctcaccactcacacatcaaacaaacacatctgccaccaccacaccacaccgaacctca

SEQ ID NO: 533784 - DNA, 114 bp, Homo sapiens
catggagagtaccgggacgtgtcctggagccatacctgaatctcacccttcttagtgacagctcctccccctcctctgtgctgtccaactcctctgtgctgtccatgctgtcca

SEQ ID NO: 533785 - DNA, 199 bp, Homo sapiens
  misc_feature (26)..(26): n is a, c, g, or t
  misc_feature (36)..(36): n is a, c, g, or t
  misc_feature (68)..(68): n is a, c, g, or t
  misc_feature (105)..(105): n is a, c, g, or t
  misc_feature (162)..(162): n is a, c, g, or t
cgcttatacttctcatttcatttccnggtatgaagnataagcgttgagagaagtataaagcgttgagngaagtataagcgttgagagaagtataaagcgttgagngaagtataaagcgttgagagaagtataaagcgttgagagaagtataaagcgttgagngaagtataaagcgttgagagaagtataaagcgttgag

SEQ ID NO: 533786 - DNA, 257 bp, Homo sapiens
ggacttatcataaggtcctacatacttccaccattattcctagaaccaggtgacctgcgactccttgacgttgacaatcgagtagtactcccgattaaagcccccatttgtataataattacatcacaagacgtcttgcactcatgacctgtccccacattaggcttaaaaacagatgcaattcccggacgtctaaaccaaaccactttcaccgaaacccgaccggggggtatataacggtcaatgctctgaaatct

SEQ ID NO: 533787 - DNA, 344 bp, Homo sapiens
  misc_feature (180)..(180): n is a, c, g, or t
agtagccctgtccagcttgaggtagtagccctttcccagcatgaggtagtagccctttccagcttggaggtagtagctctttccagcttgaggtagtagccctttccagcttgaggtagtagccctttccagcttgaggtagtagctctttccagcttgaggtagtagccctttccagcntgaggtagtagccctttccagcttgaggtagtagctctttccagcttgaggtagtagccctttccagcttgaggtagtagccctttccagcttgaggtagtagccctttccagcttgaggtagtagccctttccagcatgaggtagtagccctttccagcttga

SEQ ID NO: 533788 - DNA, 715 bp, Homo sapiens
agaggtgagattccgtctcaaaaaaaaaaaagaaaaggaaaaaaaatagcataatacctcttcctggtctcaaccgccatgaaaattctgaacactccaaatttcaggggaattaatccaaaacaaaattttataacgtataagaataatttctacttgcttatagtaatagtatactttaaaaagcctcaggggtatattatcttctaaacagctacaagttcagtggcagctacatttaaccaactatgtcctctagtggagaacaactaggcctatttcactggctgtgtagcctcagtggcctaacatgggtgccaaataaatattcgtagaattacactggaattggtaaaaaccattcgttttggtttacaagttggccaaaaatctcaaaaggccctgtatttatgtaattcttggaaattataatctatttaaatttctcagttatggactggctggggtgtgacttagtacataagtactcaatattataaaaagctcaaataatggactggattttagcacaagatccttcccttttctaccaagtaattttttaacaaatcatggggtaatctcctaaataggttatattatggttctagaaccatgttcaaaatatatgtgcattatcagtataatcggataaatatgtccaacaacattttcataattcaaagatattctgactgagatttgcaggaaggac

SEQ ID NO: 533789 - DNA, 413 bp, Homo sapiens
  misc_feature (57)..(57): n is a, c, g, or t
  misc_feature (386)..(387): n is a, c, g, or t
ctcactgtgttgctcaagctggagtgcagtggcatgatctcagctcactacaacctntgattcctgggttcaagcgattctaacacctcagcctcccgagtagcgggaattacaggcatgtgccaccacagccagctaatttttgtatttttagtagagatggggtttcgccatgttggccaggttagtcttgaactcctggcctcaagcaatccacccatctagcttcctaaagttctgggactacagaggtgttagccactgcacccggccttttctcttttttattcctcagtgtcttatttggatggggccgtatctaatgggtttactctaggttgggtctgcaatccttcagaaatatgctcgtaagattagaacacttnntataggagaaaccagacttcaccaaa

SEQ ID NO: 533790 - DNA, 351 bp, Homo sapiens
tgagaatgagtcttgctttgtcacccaggctggagtgcagtggcacaattctcgctcactgaaccctccgctcccgggtcagccattttctggctaagcctctgagtagctgggagacgggccacaccacccacccagtaatttggattttagaaagaaggggttaccatgtctccaggcgggctaaactcctaccttaaggattcgcctgcctcaactccaaaggcgggataccgggggagccttcagtggccaacaacttgttttgaaaaggggtgggggtttatccctagacctaaccttagagggtggaattcacttttacttacggttgaagggggtataaattta

SEQ ID NO: 533791 - DNA, 147 bp, Homo sapiens
acggctgcgtcgcgtacgctgtggtgggtacatgcttatgtgtatgcacggcggagctggagccctgacatcacgtaaggtttgactatgcttggggtaaccccagggtaccagaaccgtcggggttaccgaggctcgaaatttcgg

SEQ ID NO: 533792 - DNA, 928 bp, Homo sapiens
  misc_feature (39)..(39): n is a, c, g, or t
  misc_feature (442)..(442): n is a, c, g, or t
actcatctgagacagcatcagtatttgactaaatcattnttcacaactgaatagtcttgttcttttagtagcaatgaaatcctaagctcttgaggccattcacctgccaacctgaccatactgctttcaaaagtcttttctcatcagtagaatctattttggtcacttctagtcaatgaaaaatgtaaacttttaggagagaatgtttcctagaactcacccactccattcaatgttacatataaaatagtgtgatcaatcacaatgtccatctttagacagttggttaaataaattatctggtctttgaaaagaccgtgctgggcgcggtggctcttgcctgtaatcccagcactttgggaggctgaggcgggcagatcacctgagatcgggagtttgagaccaagcctgaccaatatggagaaaccctgtctctactaanaaaacaaaattagctgggcatggtggtgcatgcctgtaatcccagctacttgggaggccgaggcaggagaattgcttgaacccgggaggcagaggttgcagtgaggtgagatagcgccattgcactccagcctgggcaacaagagcaaaactctgtctcaaaaaaaaaaaaaaatgatggagctccgaatgtgcttaagtggaaagatatctatgaaatatggtggttttttaaaacacaaaaattatagaatatgggatcccgtgtgtgtgtgtgtgtgtgtgtgtgtgtgtgtgtgtgtgtgtgtgtgtgtttgaatgaaaaatgcttatgtattgacagaacacttctagaatgatacccaaactcctggagtgggagtggggaatgccttctacgtacacactgttctactgtttgaattttttaatatgagcccaaattgtataatctttttttaataaaggggagaaaaatcaaaaaaaa

SEQ ID NO: 533793 - DNA, 259 bp, Homo sapiens
ggaggtgggtgtaatattttccatgagacacttaacgtagtacgtaaatatatcaggcagcctagtgtgtcaagtactgtgggtatggtagacaacagattagttaaatctctgctctcgagaaacctgatgtgtgtgtgtgtgtgtgtgtgtgtgtgtgtgtgtgtgtgtgtagaagtctgatgctctctcgcgcgcgatagtatatgagctggcgatagcgctgtcttgtagaaatataaagctaggtaaaggagga

SEQ ID NO: 533794 - DNA, 795 bp, Homo sapiens
  misc_feature (26)..(26): n is a, c, g, or t
  misc_feature (61)..(61): n is a, c, g, or t
  misc_feature (210)..(210): n is a, c, g, or t
  misc_feature (309)..(309): n is a, c, g, or t
ttttgcgctatggaagctgcagcgcncagctgcgcatttgcaaatggttcagcattattanaatatgaggtggtggatgcatatgcagcaaatggtgcgcatgctgttgaggagcacgttgggtttaaaataaaaattaatgctgggtgcttttggaaaaaagagcgcgtggctgggggcggcggttgggctgcttggcgctcgtaatgnggcaggcagcttttggggaggctgaggcgggcagatcacctgagatcgggagtttgagaccaagcctgaccaatatggagaaaccctgtctctactaanaaaacaaaattagctgggcatggtggtgcatgcctgtaatcccagctacttgggaggccgaggcaggagaattgcttgaacccgggaggcagaggttgcagtgaggtgagatagcgccattgcactccagcctgggcaacaagagcaaaactctgtctcaaaaaaaaaaaaaaatgatggagctccgaatgtgcttaagtggaaagatatctatgaaatatggtggttttttaaaacacaaaaattatagaatatgggatcccgtgtgtgtgtgtgtgtgtgtgtgtgtgtgtgtgtgtgtgtgtgtgtgtgtttgaatgaaaaatgcttatgtattgacagaacacttctagaatgatacccaaactcctggagtgggagtggggaatgccttctacgtacacactgttctactgtttgaattttttaatatgagcccaaattgtataatctttttttaataaaggggagaaaaatcaaaaaaaa

SEQ ID NO: 533795 - DNA, 565 bp, Homo sapiens
agtaactgcctcagcatcagccgcaaacagcatgctactatatgctatacagatccactgtaaagaggtacctgtgacattacagcaagcctcttattcaaagcagaggaataatcccaagattcttcctcaaataaactccattccagtaaatggtaaatacataaaaattacagtaagccagacacttaaaaggacagccaagaagtcttccaacagtttattagaaagaatgtagacatttaaaaaaatccccactgtcatgaacataaattgaggttttcagcccgggtataagctgaatcaaaaaaaggaaataaaaaatccaatagtgtattaaacatttttcactcatttgccatactgacagtgcaaaatacaaatctggactaaatgtacagactctcaagcaacaatgtacagctttcttcgtcctccatgctaagagatgtaaaagcttaagggtcaaacaataccaattgtataggcttcaaaaaccatctaagttagggcattctctagttttagctaagatacacctggaacactgacaagtcatcactta

SEQ ID NO: 533796 - DNA, 426 bp, Homo sapiens
gtggggaatgccttctacgtacacactgttctactgtttgaattttttaatatgagcccaaattgtataatctttttttaataaaggggagaaaaatcaaaaaaaaaaaaaaaatgatggagctccgaatgtgcttaagtggaaagatatctatgaaatatggtggttttttaaaacacaaaaattatagaatatgggatcccgtgtgtgtgtgtgtgtgtgtgtgtgtgtgtgtgtgtgtgtgtgtgtgtgtttgaatgaaaaatgcttatgtattgacagaacacttctagaatgatacccaaactcctggagtgggagtggggaatgccttctacgtacacactgttctactgtttgaattttttaatatgagcccaaattgtataatctttttttaataaaggggagaaaaatcaaaaaaaa

SEQ ID NO: 533797 - DNA, 187 bp, Homo sapiens
ctccagtttatgaaatccactatagtataggaggattaaggaaaacttctggctcttcattttctttttttttcgagacggagtttcgctcttgttgcccaggctggagtgcaatggcatgatctcagctcactgtaacctccgcctcctgggttcaagcgattctcctgcctcagccttcagagta

SEQ ID NO: 533798 - DNA, 486 bp, Homo sapiens
  misc_feature (37)..(37): n is a, c, g, or t
  misc_feature (124)..(124): n is a, c, g, or t
  misc_feature (253)..(253): n is a, c, g, or t
  misc_feature (482)..(482): n is a, c, g, or t
aactcttaaatgaacatctggcaagttaaaaccttanaattccctttgtccaatttaagtttcccccactatccctaggtcaattattttgcactttgtactctccccttcaaaaattcttganacctattccccctccctccctcactttcagctgatgacccctgcttcttgctttactgtcaaaattgcagcaatcccagccgggcacggtggctcatgcctgtaatcctagcactttgggagaccgaancgggtggattgcttaagcctaggagctcgagactagcctgggcaacatggcgataccccctcgctgctaaaaatacaaaaaattagctgggtgtggtggcacacacctgtggtctcagccactccggaggctaaggtgggaggatcatctgagcccaggaagtcaaggctgcagtgagccatgatctagccactgcactccagcctgggtgacaaaaatgagacccaanctca

SEQ ID NO: 533799 - DNA, 279 bp, Homo sapiens
ggaagatacagcacggcaaaaaagaggcctgtcacatggaaggcactgacaacacaagtcaacttcagatagagtcatgcaccagataatgatgcttataagatgattggctgcgcgcagtggctcatgcctataataccagcacttagggaggccgaggcaggtggatcatttgaggtcaggagtttgagatcaacctggccaacatggagaaaccccgtctctactaaaaatacaaaaattagccgggcatggcagcgtgcgcctgtaatcccagct

SEQ ID NO: 533800 - DNA, 745 bp, Homo sapiens
gggtccatgctctagagatctgtggaagtttgaacttaagggtgataaattagtgtatctggccaaagggatttctaagcagcaaagtattcaagatgttccttggctgcttctaacaacctgtctcagatgtaggagaaaaggaaagacttaaagttggaatttataattaaaagagaagcagagcataaaagtttggaaaatttgcagcctgaccatgtgtagggaaagaaagagcattttcggagaagaaaccaagcaggatgctgaggaaccacttgctggagagctttgcacgactaaaagggagccaagtgctactatctaaaacaatgggaaaaagcccttgaaggcatttcagaaatctaggcccctcccatcccaggcccagaagcctagtgggtaagaatggtttcgggggccaagcctggggccctgctgctctctgtagcctttggacactgctacctgcatctggctgatccagctccacccatggctcaaagtgccccagatacagttcaggccactgccttggaggacacaagctataagacttggtggcttccccatggtgttatgtctgcaggagaacagaatgcaagagtgaaaaaggttgaaagttacactaggtttcagagggtgtatgtgtttgaaaagccttgagtgcccagggaaaagcctggcacaagggtcgagctcctacagagagattttaatagaacagtgtcatggaaaatgtggg

SEQ ID NO: 533801 - DNA, 89 bp, Homo sapiens
ttcccgtgatgttatctgcccaaccactgacattttatgacaattttgcaaggactctgaatttttgcaggcctacttttggatactgt

SEQ ID NO: 533802 - DNA, 960 bp, Homo sapiens
tggaaactgggtcttgctctggctgtcactgaggctggagtgcagtggcttgatcctggttcactgcaacctctgcccttctggttcgagtgattcttgctgcctcaaaatcctgagttatctgaaatgacaggcacctggccaccatgcctagctaattgtttttggtattttttaggtagagacagggtttcgccatgtgggcaaggctgggtctccacactgctgggctcaagtgatccaatcgccttggtctcccaaagtgtggggataacaggcatgagccattcactgcacctggccctttaagtatatttcttaaaatatctttcaagatgggctttgaacctatggtgactttctagcagtgtttgcacttccaaaatatttgtagttcataaatgagacttcatatggggtctcttctgaagcacagactacttcacggtgtatttggtctaccctcctcccattgggcctgtcagtccagcatacgggagatcgcttcacagaaattccttattctgtcaccttagtctgttaagacttggaggatttaagcccttgaatgtggggactggtatagcaaccttaccttgtgcgggacaagagtacaaggtttattcatcccccacattaatgaattaacaatatcccggtctgcacaggtgcaacggattgcccattgcgggttgacaggtcgggcaggacaataggcgacgaagacaagggctcagttagccacacgagaaaagtgcccgttgcaaagaacgtcgtttctagaaacccaggtgacacaagtctaaatgagacgtcgaagccgacacaatcggaagccagttcttaccaaagcggcgcatagtagcaccatggtcagcaaaacaacaggagccgaacaaagctaaaccaggagcggacaacaagaccacgactgcaacacgcagcatgcataccatgaat

SEQ ID NO: 533803 - DNA, 351 bp, Homo sapiens
  misc_feature (52)..(52): n is a, c, g, or t
  misc_feature (351)..(351): n is a, c, g, or t
atcctctagccaatcatcatgcatgctacgggtctaatactatgtagatcgncccatacactctctctcagttttgactctcgaggtcacattttttcaagctaactacactgttcggatacgtttcaggtaacgatgtgccggacatgctcaccgttttgtgtcatctacttgacgaatcctgattttttcccggtctggccaagaacacgttcttcatgtcagacaggtccttcagcacctcctcgagaaccaactctcgtgaaagccgagaagtgtaagttccaccgctctacaatctcctttctgggatatatcatcgctgagggaaatgtccagatggatcctggn

SEQ ID NO: 533804 - DNA, 124 bp, Homo sapiens
cccttccccacagttgaaggacagaccaggtgaacctatggggtcgtggaaccaaaatgttatcctacacctgaacagaagaccaaacttgatgtactttgcgatgagaactgacagcaactaa

SEQ ID NO: 533805 - DNA, 368 bp, Homo sapiens
gacctctctattatttttaaaaccagtctaggttggttgtggtggctcacacctgtaatattcccagcaccttgggaggcagaggtgggcagatctcttgagccccaggagtttgagaccaacttgggcaacatggggaaatctctaccaaaaatatacaggataaataaaaaaatagctgggtatggtagcacacacctgtagtcccagctacttgggaggctaaggtgggaggattgcttgagcctgggaggtcaaagctgcagtgagccttaatcactccagtgcactccagccggggcaacagctagaccttgtctcataaaaaaagtaagaaaaagtcgacgcggccggaagttagtagaagg

SEQ ID NO: 533806 - DNA, 90 bp, Homo sapiens
  misc_feature (30)..(30): n is a, c, g, or t
gttggggctgaggggggaagatcgcctgantccagggtatcaggccactcactacacgccagcctaggcaacagagcgagaccttgcctc

SEQ ID NO: 533807 - DNA, 262 bp, Homo sapiens
atcagatcaggcggaccgattgctgtctcatttaataattctgcaatatttcaaactttttcattattatcatacctgttatggtgatctgtgatcagtggtctttggcgttactgttgtaattgttctggggcaccatgaactgtgcccacatgagatggcaaagttaattgatccatgttgtctgtgttcagacgactccaccaactggccgactggcggcttctggtctctctctctctgcctaggcctccctctttcc

SEQ ID NO: 533808 - DNA, 1147 bp, Homo sapiens
tccctttggtgtcgttctcttcagaaatttgcccaacattcaacacaactatattcaccattcactcctctctttgtgttctttcacagtgtgattgaacacaagagttcattcaccgggttccactcagtgatttacaaatgtgcctttcaggtgcaggcaacatctccgaacccctcccgagaaacctgtgtttctcactctcccttctacatgtgcataagagtagaattatctccaacaatctcacttaccattatacagggtggtggaagattaacgccttctcttttattttaaagggggaccccaaaaggattgtgccaccgtggcatagtgacgaggttcacagtgagtgttattttcacatgttggggataaccacattaaccttctcataccaccacagtctattacacgccatctcttctcgaggtgctgtgccacacaagcgctttgtgaccaccgtgccataatttctctctagtgcacacgtctctgtggtttctccctttctctctctatggagccttataccctctcactattattccatctcgtggcgtggtgtgtgtatacagcggggagtctgcgcgaacattttctcaacccaccacccaccaccttatatcttttctctctgcgctcaatatctctctctctccccgcgttctatgtagaggcggcgagatataaccatttctcaccttgtgccgcgtgtgcaagtctctccctctatataaccctccgtatctccctttcaatctactatttccccccaaccatttcaatataggccccacccatatacaacccgcttccctttaataacccgttctatagcttttttattaccaactatataacaccaacaacaaacgaggggcgccggcgcgcgtcctccttgagcagtttttccccccgccgagaggggcgccccccacagctgttcttccacgtctgtattaaccccccggcttcttttctgtgtgctccaccaacgtggcgtggctcccccccttattaagtgggcgcgcgtctccctcattttaattacgcgctagatgcgccacccgtggtcctcccgtccgtattttttaacacaacaccgtcgtcgcccgacacggctgtgcaacacaccccggtc

SEQ ID NO: 533809 - DNA, 1610 bp, Homo sapiens
gaaatattttcttattaatgcagttcccttcatatgtatatatatatatttattaccttaccttccttccttccttccttactttctctctctctctcttaacttatctttacttacaacagagtacttagctactagttccccaggctggagtgcagatggcagacaatctaggacacactgcaaacccctgacttccagtataagaagacaattctcctgacctcagcccatcctgagtagctgggacttataggtgtgcacacatcaccacccgacctaaaatagttcaatcatacatcagctatgtactgtattactagacgaacggagattatccgccttgattcgcgccaagagctgtgtctatgaacactcccatgtacactaccaggtgactcccagctatgtccatagagcatatacccacgaaactagcagaggaataaggccaagacaacgcgaacgccacaccatatagaaccatggcccctacctcacgccaagaccaccattaccacccagctaccattccggccccaccaaacgcggctgaggacacccaacacgccccaaacagatgggcccccacaacaaaccgaacgccttgacacaatactaaaacacccacacatcaatgacacacaccaacgaggtacacacactacacatccgcacgaaccagtcacaaacaacagcgccaaacaacacaagctacacggcaacgcagaggcactcacacgcacacatcccaacatcaaccacccatagagagacacaacaacgaccacgtaaggagtatcaccaacacagaccccgcacgtacacgtccccaattgccactgcgacaacaacaccgaactttcgcagccacacacaaccccgccgaccacgcaaccgcacgctaatacacgaaccaacacgcaaagtcactcaaagacaagcgagcacgccacaccagacctccaccagatccccgaaccgagaaatacaacgcactacagcgactctgccacaaacgcgaatactatacagcaactcaaatacaaagatgcacatatattaacctactcatcagtcacacactacacctctcagcagccagactatcaacatcaccgtactcccgacaaatgcatacgaatacacctctacacacacccaataacataataatcatcacacacaacacactcacatcataacacaaccgcacacatatactccaccaactctaacctacctatacaccatacatcacatatatcatatatacgacatagaactaacacaacagagacagagcacaccatagacacagacacgcatgaacagccacacatcgtaaagccgacacgacgagcagaccgtggcaagacgaggagcgaaaatacaggacgcgtcatcagctacgcgagacgtcgaagtatcgcaagactacaagatagaggaaggacgatgagtcaccccaacgtgacgccccggacaagcacacgagaaccgaagacgccagcttgcgctaaagcggagcagccagtcgccatgcgagtctacgccaccacacaccacctcaacgacgaccccacgacgccaaccgcaacacctactgc

SEQ ID NO: 533810 - DNA, 293 bp, Homo sapiens
  misc_feature (17)..(17): n is a, c, g, or t
  misc_feature (106)..(106): n is a, c, g, or t
  misc_feature (109)..(109): n is a, c, g, or t
  misc_feature (224)..(224): n is a, c, g, or t
  misc_feature (290)..(290): n is a, c, g, or t
tcgcaggtgtgcctggntcgggctaaagtgcctgtgcagaaagaggctgcctggcggggttaggagtcggcgccctcgtcctcctcctcgggcaggatttccaggntgntgtcgggctgcggggatgtgtcagtggagggcggaggggtgggcggggcccgggtgggcgaaagagggagcggggagggggtgggcgaggggctgtggggatctgcgggcggggncagccccaggattttttgcacgttgtggggaagcttggggaaggcggttagttggcggtgcagggnttt

SEQ ID NO: 533811 - DNA, 220 bp, Homo sapiens
caagatgccacttgcatgatgctgtgggtgccttttcattgcaatgcctccatttcagatgtgagaaagttctgggcctgtagggcatttcaagcctaggtgtgtatgggggaggaggggatagatgtcctagtatgctccatatgctctgaatccctgtagtgtgttgctggttaatccttagtagtttatgtttttatctatgtaattcagtttttgt

SEQ ID NO: 533812 - DNA, 335 bp, Homo sapiens
caaagcttggctgtggcatttatcaatagtatgatcttgagcaaatcgtcaaatcattttatttttctaagcctaaatttcagcacttgtaaaacagaaatgatgacatttgtaagattgttgtaaggattaaatgagaaaatgtacataaagtggttaggtacatagaaaacatcccaaaatggaactgcttttatcatacaattattgtcatttttgtcattgtaccataataattcttagaatcatatcttttagagattgctcttgagattgtagtagacatcaaatgtctccttactgatttccctagctgctatagcttctatttattt

SEQ ID NO: 533813 - DNA, 438 bp, Homo sapiens
tactctgtcttttagtgtctttattgaggatgatgatgatgatgatgatgggagcttatattaatcgagccttagtgtaagtcagacacggttatatgtactttacatgtgagccttagtttctataaggtagtacatgtgggttccatgacgacgaaatgacttaattcaacaacagtataaaggatggtctgatattatccctgttctacttgtgaaaaaaccgaagcacgagaagctgaaggaacttgtgcatgttcacacaggttaaggggtagatctgggattccttgccaggtagtctagctttctttctggaacacaggtagtgagtccttatccagtgtgattcgcggatccactttatttctcctctcactccacttgattaagcaggggtgtcttccactcccatagattcccgggttgcctgtcggg

SEQ ID NO: 533814 - DNA, 646 bp, Homo sapiens
gccctatcatataataaaagccagcccagagagcgccatagcagggcttgtcgtcggggcgctctctaatgacctcgggcttaaccatgtgatcacctgttcgcactgccatacctgctcctcatacataggcctagtaagtggaagacacgtaagacatataccatctgaaggatcgatgggaggacgagaccacggataaccgagaggcactaccgagcacaccaggccgtgcacattaaagtgcaccttcgtatattgagggcctaaatcctaattctattaccatcaccgaagattgagagcgtcagtcagagaaattagctagactctattgccattgtgtccctagacctatcgcatgaatatcaggcgacgggcctgcgagactcaagatcaacggagatgccatcctcacaaagtatatcacatttcgcgttcaattactttgccaatatttactctccttaaggcgaggtcatgacacctgcatggatgtcaaacaattgtcctacgcttgaaaataaggaggcaggctcatctaattcaatcgtcgtgcttatacaaatgtagctcaggctcgttatcatacccaccctgactcggactctgaaaggcagaatctcccctggactgtaccttcgct

SEQ ID NO: 533815 - DNA, 361 bp, Homo sapiens
tggtttcatcacttgcctttttgcattttgggtcccagcctcctgtatccaaaaatgcagtggctttccattgcccctttgattcctccttttttttggtcacaaaaaaaggggactttttctgtcaaatttcaacttaaacttgacttcctccaaggagctttggctatactctttcctcccgaccccccccctggcatactacacagatccctttggggtcccttgcctgcctaatggtcatttccccagtaaactgtaagctcctttagggcaaggattgtgttggaatttttgtattaacagggcctggcttggggcctggcccctaaaaaaccctcaataaatgtttgtttaatta

SEQ ID NO: 533816 - DNA, 215 bp, Homo sapiens
tggggagatatagtgataaatttctcaggggctacctatcgctattaaaattggaacgggccactaaaggagggggcggattttaaacactgggtaggttactccaaccaaaaggcaagaccacatcctttaggagaaaggcagaaattttagacttctagatacagaacgtatgatgtcactgaacacacagatatcctgctgatcagggggaa

SEQ ID NO: 533817 - DNA, 98 bp, Homo sapiens
ggccccggggggggggggggggggggggttttttccagggcccccccctttttcccccccatttaaaaggggttttttttgggcccccggccctttta

SEQ ID NO: 533818 - DNA, 833 bp, Homo sapiens
cggctgtcgacggacggacgctggactgaccactgtgtctgtcgacggacggacgctggactggacctgtgtctgtcgacggacggacgctgggtgccctgtccctgtcgcggcggcgctgggctggacctgtccctgtcgacggacggacgctgggctggacctgctccctgtgtcgacggacggacggctggactgaccactgtccctgctaccacgcgcccgacgtctggtactggacactgtggtccggtccactgacgggacactggactgaccctggtggttccgttacgcatcggacggccggtctgcgtacccgaccatccggtgcgtcccgctaccaacgggacccgccgccctgcgtacttgacacgctggtcgttcatgctcccacgagccgcgcacgtgcttagcgtgcctgcactaccctgcgatgctccctggcctcacccagtacacgcctgtccccggcgccctacgcaccctactggttcccctgtgcactcgccatgcgcctgtgggcgtacgtgcgtccccaccccccctacgcgtgcgcgcgtacctccgcactgccccgtgtcaacgcgcgtgttcccgcgccttctacgtacgctgcagctacgctcacgtctaatcgccgcaccgccaaattgcggcgcaacacgacccataacgtaagcaaccttcctcaccctccagcacgacgcacaggtcgtgcaagacggtcactaaccgtaatggacactcaaagcaccttacaagacgagatacctacggcgttcgtacacctctactctccaaatggcaacgatccacagacactacacgca

SEQ ID NO: 533819 - DNA, 300 bp, Homo sapiens
ttcctccatgtgtactcctctgctcagctcccacgtatgagtgcagacccactgcatgtgtccggtttgctgttctctgtgatagttagctgagactgagtgtgtctgtccacgtcttcatccgtgtccctgccttgtacatgaactcatcctttctcatggtggcatagtattccatggtgtttatttgccacattttcttattccagtctgatccttgatggcacaatcatgggttgggaccctatctgggctattgctcatactgccggagatcctctacgtgggcctgtgtctttt

SEQ ID NO: 533820 - DNA, 687 bp, Homo sapiens
actgccccccgaggctgctagacgtaggtgttaggcatgtccacccacccgccgcctcccacggcacctcgggacaccagagctgccgacttggagactcctggtctgtgaagagccggtggtgcccgtgcccgcaggaactgggctgggcctcgtgcgcccgtggggtctgcgcttggtctttctgtgcttgcgatttgcatatttattggcattgctggtagagacccccaggcctgtccaccctgccaagactcctcaggcagcgtgtgggtcccggcactctgcccccatttccccgatgtcccctgcgggcgcgggagcccacccaaagcctgctgggctgcggccccctctcggtcaggcattggctcagcccgctgagtggggggtcgtgggccagtccccgaggagctgggcccctgcacaggcacacaggtcccggccaacccagcggccccccgcacagccacccgtggggtgctgccttatgcccggggccgggaaccaactccatgttggtgtagtctgtgtagtttttcaagaaatgattcaaatgtgtgtttggctttgggacatttactgtaactgtcaagtgtacacgtcgtggaccccgtttcatttttacacccaattgtggtaaaaatgctggtctcaagctcccacaattaaaaccgatgtgatctc

SEQ ID NO: 533821 - DNA, 696 bp, Homo sapiens
atggcacatgcagcgcaagtaggtctacaaagacgctacttcccactatcatagcaagagcttatcacctttcatgatcacgaccctcgagtaatcattctatgcgccttagtcgtgtcttgcctagagtactgtgtaatgccctgttgtaccgtaagcacctcacgaacaaaaacgtaactgaagtactagaaatctcagacagctcagggaagatagaaagccgtctgaacatatcctgtcccgccgatcatcctaggtcctcatcggcctcccatcccgtactgcatcctttgcataacgagacgaggtccaagtgatcccatccacgttaccattcaaatcagattaggccaccaattggtactgaaccttagcgaatacaccgatgtacggcggactaatctttcgaagatcctacaatagctgtaccctcgcattgattcgctaggaaccaggcgagactgggacgtccatatgacagttggacaatggaagtagtactcctcgattgacagcccctattcggatagtaggtgacatcagagtgacgtctagcgcgtcatgaagctgtaccacacatgaggcttaataacagatgacaataccccggatcgtctaagcagaacactttcaccgttacatgaccgggggtatactacgggtcgatgctcggaaatctggggagcaaacaca

SEQ ID NO: 533822 - DNA, 407 bp, Homo sapiens
gggcgcgaaaaatggggaaggataacccggtgagagggggccccccggggggggtggtcctcttgtattttggggggccccccccatggggaagataacaccccccggggggacgcccgggtatgttggtttagggttgtttcccttgttttagagggaaacggggggcgggggggcccggttcccccaaatttttaaaaagaaccctttccccgggggggcttttggggctcttgggttttaaacccttttgacccctgacttggggcgggcaggggggggggggggggggggtttcggccccccccccccccttgggggttaaagaaaatccgggttggggcccttcccagggggaaagggggggtttttttttttttttttcccaaaaaaagccccttaactta

SEQ ID NO: 533823 - DNA, 404 bp, Homo sapiens
taaccaaaacccacctgtactccaaaaaaaaaaaaaaaaaaaaaaaaaaaggaaaaaaaattaaaaaaaaaaaaaaaaaattaaaaaaaaaaaaaaaaaaaaaaaaaaaaccttgtgggccgcttgggccaagtcgattttaaattggggcaggtttatgcttgcggccgaatttggggttaattgggcaaattggccttatggggggtcgtttaaaatttaatgggccgtggtttaacaacgtgggaatgggaaaaaccttggggttcccaaattaaatggcttggaagaaaatccccttttggcaagttggggtaatagcaaaaaggcccgaacggatggcctttccaaaaagtggcccagcttgatgggcaatgggaaatggaaggcgtaaatttttggta

SEQ ID NO: 533824 - DNA, 890 bp, Homo sapiens
agacagtgcagccacctccgagagcctggatgtgatggcgtcacatgaacgagaccctcccaggaggcacggatccaacataccgtggccacagacaagtaccatggagccatgccatggcatggcttcctcaccaatggcacacgatgacacggggcatccttgactccatctgggcgctatctttgtgcgagtgacatgtggtgtgctgcccaacgcggggactctggcaagggacgtcacacctaccctggccaagaacttgctcacgtactggctcccatgcgcccagagagtcacactggcctggaccccaaggattgaaaatcccccgtaggtcccacgttccttcaatgaaaccatttgtgacctgcctcagcacgaccgaccccccagtcagcacgggcaaagggggggccctgaagcgccagaagaacccagggactttggggctaacggggcagggccagaacgccggttcccggaccttacttcgcatagttccgtgccttccaacaaaacgggggaactttcccaacggggcgcaaggctcgcgattttgccccccaaggggggccaaccggccctttatttcccaaatataaactttgttttacaagggcctagggcggaaacggtggacactcgaacagacctcaacgattcctgggccttccttggtgagacatgtcaaagccctccaaatttgggtcccttaaggaaacctggccctttggcgagcacagatagcccccaatgccccgttggggggattcctcccccgggtggcacactcttccccgcttgagtgacccccatctccacacggcgccatttcactcttattcacagcgtacaactttacacacccattgggtgcgcccttataa

SEQ ID NO: 533825 - DNA, 115 bp, Homo sapiens
cagcacttaatggaagatagatggtagcgtgcccaccttgctggcctcccgcactctgctcacccctgtcccaatacactcgagccaccacttcattttcacctggcggctgctc

SEQ ID NO: 533826 - DNA, 141 bp, Homo sapiens
  misc_feature (2)..(2): n is a, c, g, or t
angaggaagatatggctttcaagcagaaacaaaaagaggagccgaagaaactctaggagctaaaagcgaaggccgcggggaaggggcccttggccacgggtggaattacgaaatctggcacaaagtaagctgtaccttgtg

SEQ ID NO: 533827 - DNA, 1387 bp, Homo sapiens
ggctgcggccgcggcttattgctccagtgtcgagcgcaagaacccttcgcagcaccaagaacctgctgctggaggggaactcgaggtcgcgggtctcggggtcattcagtgcgtcgcggccctgcctggactcatgctcttgctgtgtgtgacgggagcggtggccctggcctgatttgttgtgcccgttgcacagttcacgcccattcgatctcggactctccaggttaccactggcttctatcagtgatttacctacacttattgatttcgcatgctcagtgggctaacagttcgcaagtagcgcgacgcgatcccacggggcttgcagagagcgggccaatggctttgtcaattcgaattagggaagaattctccgagttcaactcgatacgttccccatgaggaaggccgcacggaatacgcaccttccggaagacaagtccacatcgctcggtgggtgccgattgacctcgcgctgacctagcacgtgtaaccgatccgagtagcgaaggactctgcaacttggggacgggtacgttcccaacccaaggcgcaactgggaaggcacacgggtccttgcgagtgacactcgagtagttataaccaagatgtgcagtgagcaatgccccgaaacacgaaggggtcagttcccaagtacaaaattcctctacaattgtggaccgcacccccgttcctttgccattagaaaccgcgacagcacactcctaggtggtgtcatactagactacccacgttgaagaagacttggtttagaaaaaccaccaagattgaacagaacaccgctaagtttgtatccacaagcgcaatggacgcacggttagcacagacgcaagttcccaagataccatataagcactctatgggtgggcgtacgttaccccgtctggtcgataggactaatcttctaagaaccaattgtatcattcaaatggttccacatatgccgcccacgtttaatgagccccaacgaggggaggcctctagaggttcacaccaaagttttgcgacagcaaagaaccaggttgtttcatcggaggaatttaacattacagggaatcggcggccatgacagagtgtaatcactttctcccatatttgcaaactcgccaaagcaaaaggcgatacacctaacgttgaaaccctccaaaattcctacccatattggacgtcgaaacctctggcaaggtgtacgaaatgtgaacccgtttggtgttgggggacatctttgagggcgcatcttccttttccaacacggaatcgtgacaaaaccaggcatttggctctgcagcgccacagagccttcggcagtagttggtcgacccacaaggatcagagcggcacggaatatttaacattaccacag

SEQ ID NO: 533828 - DNA, 269 bp, Homo sapiens
ctctagcaggatcccctcaaactgtatttcatcacataacttagtataccgatgacacatcaaatgtttcacttccttcactattacatcaacatatctgccgatgatgaaaataagctatgtgataaacattttaccgtcatcctgctgattcttgctcgcgttgatctttgtgatccctctgcgaattcctctattgttgctactgtatcggggtctcgcggttccgacgctcgatcttcgtgactcgtggttcatagcctggtttc

SEQ ID NO: 533829 - DNA, 1013 bp, Homo sapiens
ggcgctccgggtggtgacggtggctctcggtggcggttccggtcttgtatctccaggcggggcggtcatggcggcgacggagctgagaggagtggtggggccaggcccggcaggcattgcatgcacttggtggcgggtggccggttccccatgtggtgggatggaaggcggcggcgtggagatgcggggtcatggctccggggccggtcatgggacggtgttcgcggcggtggctgtgaggccctggtgccctggggtgccgtggtgtgagtggctggtgcttgttgtgcccggcccctgcgccggctggaactggtggctcgggcggctctgggcgctgggggtccgggctcggtcgagagggttggctcttcatactggaccacgttatatcaaaggctaccatccggcgatggttcgttgctgagcaacgtgactcctgatgctacctacagatcaaaggcggaaattgagacataacctgcgctgtggtaccatcgaaggctcgccacacggcaagcatcaccgtgtgaggactcctgacagagtttcatcatttccaatgggggtgctcagacctaccatctgaaaggctagtttcagaagttgagcggcagacgctgggtgacggcctgtgaacttggccaaggcaaagctgtgaaaatgctggcagagtcagatgactccaggagatgaacgagtctgtcttcaccaagctgacggaactgagctgacgaatacccttcggacctctctagcacagtagaggacttgagcacgtgcgatggcttgatagctaagcttggcacagtctggagcgtcctccagggaggtggatcctgaacttgctgtggcagcatgaagattccacggtcacggagggccacccttaggatacctggggttcacagctcggcgaaatctcttgttcgacacgaaatggaagcgcagatcagagccggctcggaaaccacccggggagaccaacgaggggccgagcgcggcgacatgtt

SEQ ID NO: 533830 - DNA, 683 bp, Homo sapiens
  misc_feature (71)..(71): n is a, c, g, or t
aaaaataaaaaattaactggggtgtgggggcgggcgcttgtgttcccagttcctccgaagcttcagccaanagatatgccgtaaaccaagaacccggagcttccagtgacccaaaatcatgcccctgcactcaagcctgggggccagagcgagcctcggtctccaaaaaaaaaaaaaaaaaaaaaaaaatgccatccactccatccgttagtagcaagagcgaatagccatcagaaagagcttttcacgtcagaaagcactacagaagtagtggcatatccccgaaggctgaggtggagcaattgctgagaggtggcacgtgaccacatccatgtcattcatcaacagacaaccaagtcatcgagggtgtgaggggccggtgagaaacccagtatggaagaaaacacaactgggctgagcgtggtggctcacgcctgtaatcccagcactttgggaggccaaggcaggaggatcacctgaggtcaggagttcgagaccagcctggtcaacatagtgaaacctcatctctactgaaaatacaaaaaaattaactgggtgtggtggcgcgtgcctgtagtcccagctactccggaggctgaggcggaagaattgcatgaacccaggagccgagaccacaccactgcactccagcctgggggcggcacagtgagactcgtctcaaa

SEQ ID NO: 533831 - DNA, 194 bp, Homo sapiens
  misc_feature (63)..(63): n is a, c, g, or t
  misc_feature (90)..(90): n is a, c, g, or t
  misc_feature (92)..(92): n is a, c, g, or t
  misc_feature (112)..(112): n is a, c, g, or t
  misc_feature (118)..(118): n is a, c, g, or t
  misc_feature (175)..(175): n is a, c, g, or t
  misc_feature (187)..(187): n is a, c, g, or t
cacggctgagtgtagagtggccgtatatatgggatattagtcccctatcagatgagtaagggnaaatatttttctcccattcaaaaggtngnctctttaggctgtgattgtntatttngctgtgcagaagcttttaaacttaatatagtcccgttggtctgttttttattttctngcctgtgctatngagatct

SEQ ID NO: 533832 - DNA, 959 bp, Homo sapiens
  misc_feature (22)..(22): n is a, c, g, or t
  misc_feature (38)..(38): n is a, c, g, or t
  misc_feature (46)..(46): n is a, c, g, or t
  misc_feature (59)..(59): n is a, c, g, or t
  misc_feature (83)..(83): n is a, c, g, or t
  misc_feature (86)..(86): n is a, c, g, or t
  misc_feature (88)..(88): n is a, c, g, or t
  misc_feature (98)..(99): n is a, c, g, or t
  misc_feature (101)..(102): n is a, c, g, or t
  misc_feature (114)..(114): n is a, c, g, or t
  misc_feature (121)..(123): n is a, c, g, or t
  misc_feature (126)..(127): n is a, c, g, or t
  misc_feature (129)..(129): n is a, c, g, or t
  misc_feature (146)..(146): n is a, c, g, or t
  misc_feature (158)..(159): n is a, c, g, or t
  misc_feature (164)..(164): n is a, c, g, or t
  misc_feature (170)..(171): n is a, c, g, or t
  misc_feature (173)..(176): n is a, c, g, or t
  misc_feature (182)..(182): n is a, c, g, or t
  misc_feature (188)..(188): n is a, c, g, or t
  misc_feature (190)..(191): n is a, c, g, or t
  misc_feature (198)..(199): n is a, c, g, or t
  misc_feature (205)..(205): n is a, c, g, or t
  misc_feature (225)..(225): n is a, c, g, or t
  misc_feature (279)..(279): n is a, c, g, or t
  misc_feature (292)..(292): n is a, c, g, or t
  misc_feature (367)..(367): n is a, c, g, or t
  misc_feature (479)..(479): n is a, c, g, or t
  misc_feature (599)..(599): n is a, c, g, or t
  misc_feature (709)..(709): n is a, c, g, or t
  misc_feature (712)..(712): n is a, c, g, or t
  misc_feature (788)..(788): n is a, c, g, or t
  misc_feature (924)..(924): n is a, c, g, or t
gaggtggcggcggcggcggtanggtggccttggttgtnttccagtntcctcggctcgcnctttagccggcaccgctccccttnccncncccttcctcnnanncttacttccctncccttcnnnttnnancttccccgtcggtgagnggcgggggtggnnccagnaacggnnannnncaagcngtgtanannaattaannaacganaacggcggcgacggcgaaanctcggagctcgcagggcgggggcaaggcccgggccttggagatggagaattctnagttgtgtaagcngttcatcggcggcctcaatgtgcagacgagtaaatagggcctgcgcggccactttgaggcctttgggactctganggactgcgtggtggtggtgaatccccagaccaagcgctcccgttgctttggcttcgtgacctactccaatgtggaggaggcggacgccgccatggccgcctcgccccatgcngtggacggcaacactgtggagctgaagcgagcggtgtcccgggaggattcggcgcggcccggtgcccacgccaaggttaagaagctctttgtcggaggccttaaaggagacgtggctganggcgacctgatcgagcacttctcgcagtttggcaccgtggaaaaggccgagattattgccgacaagcagtccggcaagaagcgtggattcggcttcgtgtatttccagantcncgacgcggcagacaaggccgcggtggtcaagttccatccgattcagggccatcgcgtggaggtgaagaaagcagtncccaaggaggatatctactccggtgggggtggaggcggctcccgatcctcccggggcggccgaggcggcggggggcgcggcggtggtcgagaccagaacggcctttccaagggcggcggcggcggttacaacagcnacggtggttacggcggcggcggaggcggcggctac

SEQ ID NO: 533833 - DNA, 342 bp, Homo sapiens
gagatcgcaacattgcacgccagcttgaacaacaggagcaaaatctgtctccaaagaaaaaaaaaaaagagtaaagtgaaagaacttaaacaaggatggattaaaaaaatgtggtgctcgtacacaatggagtaccgttcagccatgaaaaagaatgagatcctgtcatttgcaacaacatggatggaactggagatcattatgtcaagtgaaataagccaggcatagaaagacaaacatcacatgttctcacttatgtgtgtgatctaaaaatcaaagcaattgaacccatggacatagacactagaaggatggttaccacaggggctgagaagggtagta

SEQ ID NO: 533834 - DNA, 415 bp, Homo sapiens
  misc_feature (73)..(73): n is a, c, g, or t
  misc_feature (210)..(210): n is a, c, g, or t
  misc_feature (242)..(242): n is a, c, g, or t
aggttgggacgggacggacagtatgtcgtctgactcggtggtttcgtcggtgaggcgctttcagaagcggtgncaggactgctgagatggtgagtccgcatgcggtgtggtgtgcacttgagcccggtatgacagtccccagctgacagatccaggtgtccagagcgagtcttcagcggactccatgtggttctgatcctctggcgcttntggcatgactcagaagaggtgctggtcacttnccgtatcctgatccttcccagtggacagatgaagaattaggtatccctcctgatgatgaagactgaaggtgtagactcagcctcactctgtacaagagccaggtgagaatttcaaggattatcgacttcatattgcacattaaagttacaaattaaagtggcatcgataaaca

SEQ ID NO: 533835 - DNA, 205 bp, Homo sapiens
gttatacgctcagccactcatagaatgggacgtccactatcaggaagcctgcagccactatgttcgccgggccagaacaaagcgacccagcaagtccttgcttccggctgttgaagttggggaactcccaccgcaaggaacgctagcctctatagacccgtggaggtggtgacgtggctcccatgttggctggagctgtgacagt

SEQ ID NO: 533836 - DNA, 498 bp, Homo sapiens
tggcataaaaaagtttttttcccattgggcccacgggtttggtaggatattaaaaaaagcggcctttgggggggggggaaaggtttaggcaaaacccctataatttggagggggcccttcaaaacgtcgcggggcccaaaagggccctaaagccgggctaggaagatgtagagctcttccagaaagaagatactcgcccagcccagcctcggggcacccccagccgggggggggtggggccgggggtggcccccatcttctctgggataagctaccatctccctacattctagagaaggtggatgtcctccaggaggtcacaagaagaggggggcccgggcgggcaagaacccggggtagtgaaatacccaaaggggcgcgggtgcacgacgttatcatctcccgggggccagggaagtttataccaggggcgtgggggtgtataacaccatctacattactaccagggggactccatggatggtcccggggaaaaga

SEQ ID NO: 533837 - DNA, 353 bp, Homo sapiens
  misc_feature (40)..(40): n is a, c, g, or t
  misc_feature (336)..(336): n is a, c, g, or t
cggtcgttatagaggatccccccttaagctgctgacgtanggttgagatgtctatcgtgggtggcccaatcatagctcactgtttgaaattaattgagaaaatcccttctcagtaatccagttttacatttaggctacccaaaccatggcttttaaaaactttacctgatgctggtataagaaacttattacaaccaatagggtgggttccatttggaaatttaatattcctaatagtattaggaaacatagttaatgccttttttttaattgaaaccaaccaggttatttggtaaaaggtcagaaaacaccagtatccttctgatctcatccggnatttttctgtcagcacc

SEQ ID NO: 533838 - DNA, 98 bp, Homo sapiens
  misc_feature (78)..(78): n is a, c, g, or t
aaagccggaaggggcaagacgggttcagttcgtcatggggctgtttggaaagacccaggagaagccgcccaaagaacntactcaatgggagtggtcat

SEQ ID NO: 533839 - DNA, 155 bp, Homo sapiens
  misc_feature (1)..(1): n is a, c, g, or t
nctgccacatgctccaccactgttaatgccagcatcactctctgtagttccagctactctggaggctgagccagtaggattgcttgaacctgggaggtggaggctgcagtgagccaagatcctgccactgcactccagactggtggacatgtgag

SEQ ID NO: 533840 - DNA, 309 bp, Homo sapiens
  misc_feature (243)..(243): n is a, c, g, or t
ttaggggactgagctggggagggaggtaggtgggtggtaagagggaaactttggagagcttgtatttaggtactgagtggggagtgtatagactcttgctttgggggttctgggaatgatgtaactggttttactagtgtgcaagtgtgtttatccccaagttttcttttgtcctcacatgcagagttgtgcatgcccttgagtgtgaacaggtttgcttatgttggtgcaagtgtgcatggntggggacttctcacttccccttgcaccccttcctccccaacctgcaataaatccgcttctcctgca

SEQ ID NO: 533841 - DNA, 211 bp, Homo sapiens
gtaattctggttgaagggggcaagaaaaggtgatagatgctttgattttggctaataggtctcagcctataatgggggtgggtctaatgaggcatgataatgaacagagtgtgatgataatgggatcaaatatgggaacaagtatgaggtgtggtggcaatctgtgacaggaggatgagtccgtcaaaccccacacgtctacggcctgagt

SEQ ID NO: 533842 - DNA, 443 bp, Homo sapiens
ctagaggatcccgaacggctatctgtgttgctgcaggcttcagctcaacgggaacctgcagctggagctggcgcaggtgctggccaggagaggccaagctgccagaggaccctctgctcagcggctcctggactccccggcactcaaggcctgcctggacactgccgtggagaacatgcccagcctgaagatgaaggtggtggaggtgggtgcctcctgggcatgcaaggcctctgccccggacatgttaggaaccagcctgacatcagttgcaggagacagcacagacacggggcgggccctgggcgggtgggtggggccggccagttccctgtgtggttctgtgcacgtgtcctgtgcggtccacaaagccagcgtggagggtccggccgtgggctccaagaggcgcagcctaggcaggaccccagggacaagagcagtgg

SEQ ID NO: 533843 - DNA, 213 bp, Homo sapiens
catataattttaattcaaaataggtaatttacctaaatgaaaccccctttattataaaacttagagaagaaaacataaagtaaaattggtcgggcgcgatggctcacacctgtatcccagcactttgggaggccgaggcaggtggatcacaaggtcaggagattgagaccatcctggctaacagagtgaaagctcatctctactaaagatcca

SEQ ID NO: 533844 - DNA, 161 bp, Homo sapiens
tagataggacaagggaaggccctcagagaaagcctgactgaggctagttgtggtggctcacacctataatcccagcactttgggaggctgaagctgagaggatcacttgaggccaggactttgaaaccaccctgggcaacatagtgagaccctgtctccat

SEQ ID NO: 533845 - DNA, 540 bp, Homo sapiens
ctacactgatcaggagtggggatctggtctgtctctacctatgtctaggcatgacgggtgacatcgcgggaatgcagtaagtcctgtaggttggagtcagtaagtcctgttggttgaatgaaggcataagcgtccccttaactttacttagagaatcttttcttagttggaacttatttcatccccttctcagatttcagatgtgacaggtcagtgtactttggtcatctgtctgccaagtaaagccaagaataccaaatatactcaaagggagaaaagtatgttcttatctctttgattttaaaggagatatttgaagtatcagtactcaggatcagtgggtgagaaaattactgtgaccagagatgggaattttgggggtatggtgacccttagaatctagaatacagtgtagtacaacttaggtgcagcccatgttacatgacatgtagctgtcgcagatgatttggatgtctgtaaacttacgcatattaatctaagaatctctctccacattcgtaggatgtaatccctgttcat

SEQ ID NO: 533846 - DNA, 301 bp, Homo sapiens
ctagctcctcttccttctctcttactccaaatacattctagaccctgtcccaggctctcttctctctctggtccatccttgttccctttgtgaatcttgccactcttgttttgaacaccatagacccatgactggcaactctcaccctccagctcagcccatttctgggtgctggcctttttttctcttgacttctgaacacatccacttgcggatgcccctcgtgaggcaccttgaggcaaatatgtccccagctgtattaatcgtcttctcagattttccagctcccctatttctggca

SEQ ID NO: 533847 - DNA, 127 bp, Homo sapiens
tagctaaagggttaaggagaacatagtaaccccaaatagaaattgaaacctgggagccaatagactctagtaccgcaagggaaagttaaaaattataatccaagcataatattagcaaggactaaac

SEQ ID NO: 533848 - DNA, 327 bp, Homo sapiens
tgttcatgcagagagcatgtgggctgctcgcccagcccggcctaggtgaaggaagaggcagtgctcctcagagcatgcggagggaggggggaggtcggaggtcgtggaggtggttgtgtatcttactggtctgaagggaccaagtgtgttggtggtaggttaggtatcttgtctttctgatcggagcatcactactgacctgtagtaggcagctatcttacagacgcatgaatgtaagagtaggacggggtgggtgtcaggcatcacttgggatctttgacagttgaaaaattacacctggcagctgcgtttaaggggtaccgagct

SEQ ID NO: 533849 - DNA, 412 bp, Homo sapiens
agcccttgtccccgaagaagtatgtgccagggccccaatgcttagccccaggccccaggccggttttttgcccaagcatccttgccgtgtcccaaaaagaatggaaaccgggggagccctacccctgggtggtggcccataaggcccttcccaacagggttcccaagagggccgtggacaagtcccccggttaaccccccctgtacaaggtgtccctggttatgttcgacacaaatggcccctgttatttacccttttggcctgcccccaggcttggggggggtggcccctttgtgtgggcaaccaaactaaccgggtccacggggggaaatgttgccttttttaaaattaaaaataaaaaaatcccttccaaaaaaactggtcctggggggccgatgttttggccctctta

SEQ ID NO: 533850 - DNA, 502 bp, Homo sapiens
tacttttccacagggaaaaaatttataatcaatcataaatttccactaaaataagtatatgcttctattaaagggaaagtatcaatcaaaaataacaataaaacatattctttttttttttagctggtggtatggattggaacacacattcataattcaagaacttttacactaataaaacttagaaatcccaaaaccaacaacttatcagtgatgttctatttttccagctcagtatcacttcagttcaaatgctacaggaagaaaacccggtaacttaaaatctgaattactggttaaagacatcagaaaaaagaacaaagaataaatctaagaataaaaagagatggggaaacaggtaacaagagaaatgcagggagagaaggaggagccagaatgaaagaagcagagatgggttaaggaatgggaagcactgggacaaggcaaagttgcaggaggccgggataggagaccaggaaatttttaaaaagtaataataaaa

SEQ ID NO: 533851 - DNA, 516 bp, Homo sapiens
tgcgttttgtttgataatcattctagggcatgggggtaaatcatcatacctccctttctaatttatcatctgcccgacagcgaagcagctcccagctatctgtgctgtggtagtgtgattaactggcacgctgattgcccttatattaacattaacattgtcttccctgccatacagatggtgtgcgtgatgatgagagacagaagaaaagatgacacaaattacaggaatttgcttaaaataaaaagcattattaactaagagaggaggccaataataaaaactatttgtttgcattaaaaaagaaaattactatggaaatacagtttcaccagggagaaaaaaacatagcttgaatgtagttttagatgaattcatacctcaagagttatacataattacagtatacccttctctttatacatggtactcaacttgatataattaaaattaaatttcaacccaggaatttttcaaagtatattgcattctagcatatcctataagactcaggac

SEQ ID NO: 533852 - DNA, 911 bp, Homo sapiens
gacagaagttgccgttgagcgtgtcgactcggttgctgtggcgacggttgccagtaagtgcgttcgtgggggaaaactgaagggatggaatcgggcggccaggacgagatcatggggagtgccgctcgactcctggctgtcgtgaatcgtggcctagtggatgtcagaggggaaaaacgttcgcgggagttatgtcgtgcaacaccatacatgtgcatatgatctgcagtgtcgaccccaggtgggtaaccatagcatcgcgctagggaatgcattgttggtttggcagataactggtctcacacatggtgaacctgctggagggagactttctgagggcgggaagatacaaggcaccctaggtctgattaggaagatctgaggagccaggtggatgtgttgtgggtggaatccagtatgatgggtagtgccttgggggtgggtaaaggactgagaatgttggtcgaaaagagtgaacctatgcaatgagaggagggtgccaaatggagtgggcagtgaatcgggtgagaatgtcatatcgtctggggatgttgcactttgtgtccaaaggtattggcccgagcaatgtagggtcattgaatatcagtggaagttatggaagctagggaagaccgtggatttttgtggctgtatgaggcattggtagtgagctcgagtggtttaccaatggggacgatagaacgcagaaaaaggtcgggatggtgaacaaatagttctaaggagtggtagacgccggtgattgagggggggaaggaatgttagaataaagattttttgcaaagatggaagaaaacttggattcgaaactggggagacgggattttaagttaagtagcaaagttactcttttgaaagatttaaaaaagggaggtgcaaaaagtggattaggc

SEQ ID NO: 533853 - DNA, 129 bp, Homo sapiens
cccgagccgacagatctctcaaacccagaacttctacaaaacaacaactcctttccttcctaggcatggttagtgcggtcagaattcttacacaagagccaggactgcaccctgtcgggctagtcgggg

SEQ ID NO: 533854 - DNA, 625 bp, Homo sapiens
agctaagaccggatggtgcatgtacagacagaaagcgtgtagtcactgagacagtcttactgactctgatcattctgtgcactacacagctcctctctgagtgtaagggcatctgagaagaggatgtggatactccccagtctgtatgagtgggacacgggatttctcagtcctttcactcaagaacaagtagctgatattgatggacagtatgcaatgactcgagctcagaggggtacgagctgctatgttccctgagacattagatgagggcatgcagatcccatctacacagtttgatgctgctcatcccactaatgtccagcgtttggctgaaccatcacagatgctgaaacatgcagttgtaaacttgattaactatcaagatgatgcagaacttgccacacgtgctatccctgaactgacaaaactgctaaatgacgaggaccaggtggtggttaataaggctgcagttatggtccatcagctttctaataaggaagcttcagacacgctatcatgcgttctcctcagatggtgtctgctattgtacgtaccatgcagaatacaaatgatgtagaaacagctcgttgtaccgctgggaccttgcatacctttcccatca

SEQ ID NO: 533855 - DNA, 490 bp, Homo sapiens
cataaggaatagcagacatgtgcctttcttggaaaatcatcccctgcttagcctgcatttattcgaacattgaacagagaggcggaagacagcttatcctcccaaattcagagactggagctagagttcatagctacaactgatacttaaagagagactggtagtttacaaagtcttattcatgaccagggaaaacataactgcactcatgcccgaaggaaggagtttcatagggcgaataagagaacggaggctgtttatataaggatgaattgggatggtatggagccacattcccggggctcttattggccaagaagtagcttacgcaaggcccatctggctgcgtgagatcatttttgagttagctctccccactttagcggagatatatggtcggatgctggctatgatatgcctccctctcctctggcacgcagcaggaggaggatcttcacacccagactgtactcctgagggcccggctcac

SEQ ID NO: 533856 - DNA, 1004 bp, Homo sapiens
gcggcggccacagcagacatgtcgggggtccggggcctgtcgctggctgcgtgagcagctcggctgcctggacgctggccaaggcgtggccaacagtgttgcaaagcatggaacccgaggttttcacttcactgttgatgggaacaagagggcatctgctaaagtttcagattccatttctgctcagtatccagtagtggatcatgaatttgatgcagtgcgtggtaggcgctggaggggcaggcttgctgagctgctatttggaccgttatcgtgaggcagagggtttaatcacagcagtgtgttaccaagctgtcttcctaccagtgtcacacactgttgcaggcacacgggaggaatcaatgctgctctggggaacatggaggaggacaacctggcaggtggcatttcgtacgacactcgtgaagggctccgtactgtgcctggtgggaccagtgatgccatccactacactgacggacgcaggtgccccgcgcgacgatggctcgagctacgaacaattatggcatgccgtttagagagaacgtgaaagatgggaagatcttatcagcgtgcatttggtggacagagcctcaagtttggaagagggcgggcaggcccgatcggtgctgctgtgctgggtgatcggactggccactcgcgtattgcacaccattatatggaagggtctctgcgatatgataccagcttatgtgtggagtattctgccttggatctcctgatggagaatgggggagtgccggtggtagtcatacgtcactgtgcataagacgaagggggtcacagtccaatcgacatatagaagcaagagcaccacgggggaagtggccgacagggaagggcaacgggggcggcaccctacgttaacagggatgcaacgctctggcccacaaccgcaggcactgggcgacagggcccggccagtgagtcaccaggggcaaggcagttacatggccaggaacagaagatggaccggtccagcc

SEQ ID NO: 533857 - DNA, 347 bp, Homo sapiens
acgaccagcttactgaccctactcctaatcacataacctattaccccgagcaatctgaatcacaacatatacacgagcaaacaatgagcaaccagcagctactactaatcaacgcccataatcatacaaagcccacgaaccaataggatgctcccgaatcaaccctgaccgctctacttgataaatgattcagttacctacactattgaaagataccacaaccaccagccgatgatactgtttcagccacaggaccagtgctacctacatcggtaaccgcactataacactcaccgagacctcaacccctgagccccatgcctcaagaagctggtcgagcaggtacc

SEQ ID NO: 533858 - DNA, 360 bp, Homo sapiens
  misc_feature (177)..(177): n is a, c, g, or t
  misc_feature (251)..(251): n is a, c, g, or t
cgtctctcgcctgaacttcacgctgctggtccaagctcgccagagctaagacagcggaaatgagcccaaggcagatgcagctggagggaaggagacgaagtcacactcatctgctcttgcccgcggtccatcctagaccccaaactcatgctggagccaattgggtgggcagccccngcagagctaatccctcggacggcagggttgcggtgagcagctctctggaccctgagaagtgtaccagcgccctngagccgcgatggcatctcactgtgaagcctccagcccccacgggaacaagcgccatgtcttccacttcggcaccgtgagcccccagacctcccaggctggagtggccgt

SEQ ID NO: 533859 - DNA, 446 bp, Homo sapiens
  misc_feature (130)..(130): n is a, c, g, or t
  misc_feature (152)..(153): n is a, c, g, or t
  misc_feature (174)..(174): n is a, c, g, or t
ggtagtagccatggcggccatgagtttgttgcggcgggtttcaggttacctgcggtggccagctcttgtctgggcctggccccctttggccacttctgcctcggcattctgcggggctttcctaactcgntggctttcctgaaggctgctgnntgctccttgtttccgggaaancaaaccaaaagggtttggggcgcgccacaagggggaaaaaaccccccccaaaaaagtctttgcgggggagcagggaggggcacacacacacacccccaccaaaaacaacaccagggcgggacgaaaaaacccgtttttttacaaaacacgttttttcaacaacagagagaggggggggacactctttccaacgcaccacaactctcgtttttttctcacccgcaaaacaaaaggagagggggagagaaaaaaaagacataccacaccatgtt

SEQ ID NO: 533860 - DNA, 847 bp, Homo sapiens
acagatttttcgtgcctattcctcgggggcttggtcggcgcacacccagtatccgttgacgtctcttttgtcgtgagcgtggggcccacgggccgtggtgttaacaccactctgacggccactttgtgtgcgcacacacccgacgtggcggggggcccccgaggggcacaccgcacagatagcgtttgcccttctgctggttctcctctacgcaggagcggggtcttgcgggcaaaaaagacacgtgttttggaacacgaagttcgggcgccaactaccactggcgccaggcaggaagacgctgggttaggccacccccggtggcttggcacctctgggccacgcgaacgctgggagtcacttgcgaacgctggctcagaccacacggctccacagcctggggtgagaccgccgcccgcccgctgtttttccacacgacgaaagggagactatgagcaacgccctcggggcacaaccacccgcttttttgagccgctctcatctctcctggagttttgctatgctgccgctcgtcccgggccccgccacgttcgaagggttgctgtggcccacccccgcttccactggtttctataagcgggcccgggtcccaccgccggccacgcagccgctgctcaactcggagcgacgccctgggcctgcagcctttccacgcttcttcccccggggtccgccgtaaccccggcccccccccagacccccgagtttccccacggcccttcccaggtgcccggcctccctcccccccaaccattccacagggtcctgacctacctggcccctgagtttggggcaaaacctgaacccattaagggtttggaaccca

SEQ ID NO: 533861 - DNA, 155 bp, Homo sapiens
cccgcgaattaaccctcactaaagctgttcacaaatggtcgtggttcgattccatggactactccggtccttagtgagagttaattccgtggttcgattccatggactactccggtccttagtagggttaattcctttagtagggttaattgggg

SEQ ID NO: 533862 - DNA, 125 bp, Homo sapiens
acctctgaccgagttcctttctccgtcccacccaggactggaagaattcttgtgggctgcattccccgtgggtaaatgcgagctctggagatcgcatacgagaaacttgtagtgtcctgtggtcc

SEQ ID NO: 533863 - DNA, 1026 bp, Homo sapiens
  misc_feature (1)..(1): n is a, c, g, or t
ncgagtcttgggcttgttgtcgtttctgctctgaggtgtttggcgagggcgagtgttatgggaggtgtcctgcatatgggtggttctcgtgtctgtgggacttaggtttagcgtagttatatgctgatggtggggttagtagggtcctcgcaggacctcctaaggtgatgggtctgcccgtttagggcgtccgattatgcaggggcctgcgggttcgcttaactacgtaagctatctgctagcctagctaattttcgggtccgtggcttgcatttgtgtctcttgggggcgtgcccctgtgtgaaggctcggtgcggggctcccaaggctggtttagcgttggcttggtggttttgcgttgctgggttgggtggtgggtccgcgctagtcgtggggggtttggagggtgatggggttggcctctgggcgtctggtgtgggttctgcgtgccagtgcgtgggtttggcgtcgggtggttaagaggcttgatggcaggaggcatctaggagtcgttgttttgcggtggcaagtttgggtaggtagcgcctcgacgctctaaggctgtcgtcgatgcgcgtaggcttctgtggtatgccgtgtgtggctcccgggcgtgcggccagggagtccgcgtgccccgggccctgacgcagcgcgccgcgtgggcttgagcccgcggacccgcacaccaggccggcctccacgggccctgcccggtggaaacgcggccctgcctgagggccctctctgccctgtcttgggtcccagtctgggtctcgtgcgcacgcctactctgttcatgtgtcccgggcccgttgatggatgaggccgctatgaggcctgaggatgagctggaatggatgtgatgaggggtacaaaacccaccttgttggagcctgcatgggtggtgctgggactgagccagtcctcaggggcatgtattggcctggaggtgtggttgggattgtggggctggtgccagccttcctctgcagctgacctctgtaaacctccgcggtgggcgga

SEQ ID NO: 533864 - DNA, 120 bp, Homo sapiens
aaggtagcctttagtctgggccctgatgggtaggtggaaatctattaggaggtagacaagagtgtgaggaaatgaaacaggtcaaaggcctttggggtagtagaataaaacaaaggctag

SEQ ID NO: 533865 - DNA, 653 bp, Homo sapiens
ggctggtacggtccgaaatcctcttggatctgggtgacaagagcaactccacctcaaaaaaaaaaaaaaaaaaagggaatgagggcttgtgcctgtactcctggctactcagtagactgaggcagaaggattgcctgagcccaggggtttcgaggttatagtgagctatgattgtgccacttgaattccaggccgtgggttgacagacccagggacccttattctcaaaaaaaaaaaaaaaaaaaaaaaaaaaaaaaaaaaaaaaaaaaaaaaaaaaaaaaaaaaaaaaaaaaaaaaaaaaaaaaaaaaaaaaaaaaaaaaagggggggggccactcgaactatctcgtctctctctctctctacgagttgcgcgcgcgagctgtctcgcgctcgcgccgcccctcgtcttatctttttatcgacagagcggcgcgcgcctcctacgtaaggaggagcggtagtttatatatatatatagctagagggagggagcgggtgctcggtttatataacaaagcaggggcgagacgagagggaagaacacaacagcgtgagagcggagcggttcttcttgtgtagagagcggcaccctttactatctgtcggggtgaggcagagaaacagtagggggaagcaacatcctctccgttg

SEQ ID NO: 533866 - DNA, 156 bp, Homo sapiens
atagtttgtttcacatccctaacaagcagggtttacctgagcacacacacttcggctggaggctgattttactgcctcccctgggcgccacgttcggcccgtcctgcggggaggcacgggcgcggggggcgcgcggacgcccggtgaccccgcagg

SEQ ID NO: 533867 - DNA, 450 bp, Homo sapiens
gatccttacgatcggacatgttggcttgctgggccctttatacgattgggtggctctgcctcggcttcctactccctgcgcccaggtgggcgcacgacttggggcctgcggtctgactgttccctccccttagttttagacctgagctgccgaacgctcagtgggccgggagctaggctgggggaagcagtggccgttttctgatcccgggagttacaggtgccgacgtgatgtcgcttctctggtgcccagctcccttcctggtctgagactagctctgggggtggcgggggcccccacacgctgctcccgctccaccctgcccgtgctgctgctctgtgcctgctgtcagagccctggtgggggaggatgtggccaccctgagacccggaggagacgggcgtctgcctgggttcgcggagagccgcttatgggtgtggtccgagcgga

SEQ ID NO: 533868 - DNA, 109 bp, Homo sapiens
acttctttcttacttattctttctctctttccttccttccttccctccttccttccttcctttctttctgttggtaatagtatatgctgtaataatttatgaaggagag

SEQ ID NO: 533869 - DNA, 726 bp, Homo sapiens
  misc_feature (15)..(15): n is a, c, g, or t
  misc_feature (89)..(89): n is a, c, g, or t
  misc_feature (95)..(95): n is a, c, g, or t
  misc_feature (101)..(102): n is a, c, g, or t
  misc_feature (114)..(114): n is a, c, g, or t
  misc_feature (137)..(137): n is a, c, g, or t
  misc_feature (141)..(141): n is a, c, g, or t
  misc_feature (144)..(144): n is a, c, g, or t
  misc_feature (157)..(157): n is a, c, g, or t
  misc_feature (174)..(174): n is a, c, g, or t
  misc_feature (187)..(187): n is a, c, g, or t
  misc_feature (201)..(201): n is a, c, g, or t
  misc_feature (270)..(270): n is a, c, g, or t
  misc_feature (284)..(284): n is a, c, g, or t
  misc_feature (306)..(306): n is a, c, g, or t
  misc_feature (359)..(359): n is a, c, g, or t
  misc_feature (368)..(368): n is a, c, g, or t
  misc_feature (397)..(397): n is a, c, g, or t
  misc_feature (403)..(403): n is a, c, g, or t
  misc_feature (481)..(481): n is a, c, g, or t
  misc_feature (504)..(504): n is a, c, g, or t
  misc_feature (586)..(586): n is a, c, g, or t
  misc_feature (658)..(658): n is a, c, g, or t
  misc_feature (708)..(708): n is a, c, g, or t
accaatgccaccttnataataatggtcctccacggtaaggatcctgcccattggtggaacaatcgctgtcgagaatgagttttctgtcnaggggntttatnnttaatggggtcnaacacgcggattttgattttttntttnttnaacaattcggcancggccaaggcctcttgnagggtcaccccanccccgataacggtnacctggtcatccttgctcttcaagaccaccttggcttttccgacctggaagtcctcattttttttatanataatggcattttntttgcggctggtccggattaancaaataccctttgtattggcggctagttccactgccttctctttagcaacgcnatcacttgngtaaaagacaattaatatagggaatatancaaaanatagccagatcttctagggccatctgggagggcccgtcttccccgatggaaacgccgcagtgggagccgcagaggttnatgttgctctcggagatggcggncatgcgaatctggtcaaaggcccgcgtgaagaaggctgcaaaagtgctgcagaagggcacgtacctgttgcgggtggcacancccaccgcgatgctcaccatgttctgctcagcaatgtagcactcgatgaagcggtccgggtgctcttttttnaagatttcgagaaggtggaatttttggtgtcccatccagggcgatgatgngtcactggcatggccaac

SEQ ID NO: 533870 - DNA, 1256 bp, Homo sapiens
tgttgagtcccgtgttcctgtatatctcatcctatggggaaaccaagttggcagtgtcctaacggggtggtggtgtaatctctatccttctgcgtgtaagaacttggcgaatatcgaagatggggttcctcggcaaatatatcgcgctgcgacattatggggcacacgcacaggaggaggtgaacgagtttcatcgatgcacagagcatccacccaaggaaattgcccctgcacacatgacctccacctatcagaatggacgcaggcccgaatcaggcaatacacccacagagcgcacgacttggggagcgaattccaaaggaccacatggggagtgccttcatcgatacggcaactgtgccgatctcctggccaggaggaagctggccacctcccaaagtcatccagaccggagctctcggagtggacatgggacgaccgcctggatgcaagcgatccgcaagacagcacggggcagacaagtggaccctaagaagtcagagggaaattcgggtgaccctcactctgaccatcacagccattttctcgtcaagctaactagctgggctcggctgcaagttggagcgcgacaattgggtctactctcgataagcagccatggaagagaagaggtcggggtctgtacgcgagacacgagggggattgaagaaagcgaaaggatcatgatatttggaccctccttagaagagacagacccaggaggcagttcctcaatgcctacgtgtccctggaatcgggatgatgtgactcattaggcaaggaattcccatcatacctacgtggtggttctgtgccttcccctacgtgcatcgttcatcatgctctcaggtatactgacgaatgctgcatgaaaactcatcatcacggcgacgccctggcggaagggtggagaaggaaacctaatacaagccccgcacgtccggcacgccgtaggagcgatgcaggcgcgacaacaactgctgcatccagacaacccacgcccgctcggtatggtagtacgttcaagtccttcggagtctataggaatcgtctacacatgtgtacggaaagacatctcgcagcagtgtggaggaagacaagacagtccatggaatgaagcatgtagcatctatggggggaggggggagggcgtgcctgaaaaccatgccatcctgtggaaatgacagaacggggaaggtttttatgtgcctttcttgtcttttgtaaaaaaggaacacccggaagactggaaaaga

SEQ ID NO: 533871 - DNA, 375 bp, Homo sapiens
attcctctcctttcccttggcctcccctggtgcctttttttccccggatttttcctcgggtcatctcctctccctttggggggtaagccatgggaaagggatgagggaggacaggttttggttaaacccaggtcccttttccccatcaaatgaacattgggttcctgggacagaaggccttcaaaggggggattgcaaagcaaggcaaagcgttctgttttcattttccccctccccatgagacaagactgatggaaagggggggggggcaaccctgcttaatggaggccctttcccatcatttcggtttttagccctcatggcgggattttttaatcagagccaataaccttttaaataaaaccacgccaaaga

SEQ ID NO: 533872 - DNA, 557 bp, Homo sapiens
  misc_feature (23)..(23): n is a, c, g, or t
  misc_feature (36)..(36): n is a, c, g, or t
  misc_feature (350)..(350): n is a, c, g, or t
  misc_feature (402)..(402): n is a, c, g, or t
tccaaggctctgtgggaggatgnaggagtgcgtgcntgctacggaacgctccaacgagtaccagctgattgactgtgcccagtacttcctggacaagatcgacgtgatcaagcaggctgactatgtgccgagcgatcaggacctgcttcgctgccgtgtcctgacttctggaatctttgagaccaagttccaggtggacaaagtcaacttccacatgtttgacgtgggtggccagcgcgatgaacgccgcaagtggatccagtgcttcaacgatgtgactgccatcatcttcgtggtggccagcagcagctacaacatggtcatccgggaggacaaccagaccaaccgcntgcaggaggctctgaacctcttcaagagcatctggaacaacagatggctgcncaccatctctgtgatcctgttcctcaacacgcaagatctgctcgctgagaaagtccttgctgggaaaattcaaaaattgaggactactttccagaatttgctcggtaaactactcctgaggatgctactcccgagcccggagaggacccacgcgt

SEQ ID NO: 533873 - DNA, 117 bp, Homo sapiens
tccataatgtgtgccagtattgttctgtgtgattttgatcctgtcatcatgatgctagctggttattttatagacttgtatatgtggttgctcctgtattgggcacacattatggag

SEQ ID NO: 533874 - DNA, 340 bp, Homo sapiens
tttttttttcggtttttttaagacggagtcttgctctttcaccaggctggagtgcaatggcacgatcttggctcattgcaacttctgcctcccaggttcaagcaattctcctgcctcagcctcccaagtagctgggactataggcgcctgcaccatgcccagataatttttgcattttcagtagagagggggtttcaccatgttggccaggatggtcttgatctcttgacctcatgatccgcccacctcggcctcccaaagtgctgggattacaggtgtgaccaccgcacccagccaagcaccactgatttttaaaaagcagaaaactttgaagttaaac

SEQ ID NO: 533875 - DNA, 383 bp, Homo sapiens
  misc_feature (176)..(176): n is a, c, g, or t
  misc_feature (228)..(228): n is a, c, g, or t
tccttgtaatccaagcagtcgggacaaagtcaacttccacatgtttgacgtgggtggccagcgcgatgaacgccgcaagtggatccagtgcttcaacgatgtgactgccatcatcttcgtggtggccagcagcagctacaacatggtcatccgggaggacaaccagaccaaccgcntgcaggaggctctgaacctcttcaagagcatctggaacaacagatggctgcncaccatctctgtgatcctgttcctcaacacgcaagatctgctcgctgagaaagtccttgctgggaaaattcaaaaattgaggactactttccagaatttgctcggtaaactactcctgaggatgctactcccgagcccggagaggacccacgcgt

SEQ ID NO: 533876 - DNA, 807 bp, Homo sapiens
aaggcaaggagatctaggacatctagcccctgaactgtcaggcgaatacatcttatgcaaaggagtgaattcgaggagcccttgtatcactggcagaaggacgtgaccatggagaagctgttgtgtttataggtctagaacagggcgttctctcatgcttttggccagactagacgattgtcgaggaaggcttcggtgtatcccaagagagtcggatacttccgtatgtatcccgtccaaatgtaccgtgaacgaagccggcgtcaaagcctttcacgtgtgtgcctccacattctaacctcgggaatttgtcctcgacccgtgggtacagatttactcgtaggccagcaagagacaagacaatgacgattcatcaatatggggtctacatggatctatggatacaagagatagcagtggggtgggtctgaaatataattcgaaggtttcctgaaggtcacatgtagctccagtacacattttgtacgaagctggagagtcctgcctcaggggaatcgtggaaggtgctgggtagatggtgaaagcccaagtgggtgatggcatgagtctgacagaagggatacggctgtgggggcagaagcattgcatcactcttggggtaagatgcaggattcattcgggtgggaactttggaagggaaagccgattccctagtgggacgacattggcaaactgtgaacgtgtgggactttgtgctgtcaccaagatgaaattaccaccatctatctgggggggcccttcatcctaatgtctggaggctggggaccctgacagttttcacggcca

SEQ ID NO: 533877 - DNA, 320 bp, Homo sapiens
  misc_feature (300)..(300): n is a, c, g, or t
cgtgcttgtgcattctacatattttgttattgttgcccggattgtgagcatattttaatagctacttgtgctcccaggttatggtgtaataatgtataccgaatttggcattatacaggctctatctttgcatcagtattatgtgctattctaatgacagaattatggcaggtttcttgtgtcaggctcatttttgtatgacctatttccagcaaacacaattacttaccaagcagctccttcatgattgggatcctctatagtctatctagcaggtctttcagcttggtgtatatcttntgtcggttgctgtttcctgt

SEQ ID NO: 533878 - DNA, 398 bp, Homo sapiens
  misc_feature (25)..(25): n is a, c, g, or t
  misc_feature (170)..(170): n is a, c, g, or t
  misc_feature (190)..(190): n is a, c, g, or t
  misc_feature (199)..(199): n is a, c, g, or t
cccccaaaaaccccaggggggttcnaaggggccctcagggcacggggccccaacccgcattgtgtgggagcacacacgcggccgctatttgtgaatgcagtggcctttttccagggccttggggccccccatgaccctgcacttgaaggacccccgccccggggcccccngggcccccggggcggggccnccgggcccnaacgcccccggggatccggccccgcttgcacccaaggtttccccgctgttgtcaaagggggagcttccagtgttttcgcagttttaaatcccccccctttgggggtgggccatggaatgtgggtagttttttcatttggagggggctgcagggaaggggggttggggtggccaataaaaaaggccccatgacccaccca

SEQ ID NO: 533879 - DNA, 902 bp, Homo sapiens
  misc_feature (552)..(552): n is a, c, g, or t
aagaaaaaaacaatggcatggatgaggccggtggggtttttggcacggagggagagagagagagagagagagagagagagagagagagagagagagagagagagacggtagagagggggccggggggagagacgcgcgcttgtgtgtgtgttttctgcggagagtgagagagagtgtctagagacgtcctcttctctcgtcgagatgcgaaaggggcccatcatcattgaaggagaaaccatcatcatgtcgcgcccagggttgaggaaaaaagaggacgagcacgcccaccaacacaaataagtcatcagctggtcgggtggtgtggtggagacaatggtggtggtggtggcgatgtcgtggtgcatcaccagcattgtcgtggaggatcgatcgtcgttcgtggtgcgtgagagtagacagctgcagctgcttatgggtaggtagtggtgtgtgaggagagaatgaataagtagcatgaagagagaggaagaagagatagagtgagtgagtacgtagggacaaggcaagatggaggacagctcaatattnattgcatatcgaagaaagcaagtacgtaagaagattgtgtgatggaaggaagaaatcacagatagatatctagtctgatcggtcgatgaaggcaggacgatatatgatcgatagaaaggatctgatggtgagaggtgggagataaggaaacggctaagcagagaatagaatagagttcgcttcggttcgaaaggccaggattgacgagagggagtgaaggatggttctgggggcaatcaattcattcgttgggaggtaagcaagaaaggagataggttgttggtaggtcggttgctatctaaataatatctatctttacatacactcgaccgaaagaatccgacaatagc

SEQ ID NO: 533880 - DNA, 274 bp, Homo sapiens
tatcctgctggagatactggacgaggcgtggtgtgtagaggcgcaagaaaaaagcgcgctgttaaacgagtttgtgtcgacgtggactgaggggagctggactaccttagtggtggacacgcccccggggacctccgatgagcacattggcaccatagaagccctgcgtacctaccagaccctgtggggcctcgtggtcaacacgccccaggcggtgtcccgtgaggggacgtaagggcgcagagattgaaccttcgatactcagacggtgctg

SEQ ID NO: 533881 - DNA, 711 bp, Homo sapiens
gtgtctaaggcaccctgcttccttgcttgcatcccacagactatttccctcatcctatttactgcagcaaatctctccttagttgatgagactgtgtttatctccctttaaaaccctacctatcctgaatggtctgtcattgtctgccttttaagaatcctttcctctttcttcctcctctattctccgtacataatgatggggctaagttatacccagagctcactttacaaaatatttcgcctcagatacatttgcggagaaacaccaaacaaaaatgccgctttttttaaagggggtgtattgtttgcttgtacaggaatgtaagctcctcaagagcagggacagaggtgtgctgtgatatggtgcctagtacactgtaaatgctcaataaatatggatgatagagaacgaaaatccagtacaagatgataagaaagattgtggggccgcgcgtgggcgcctttggagaacatgttcgagacacaacctggtgcggcggcgcgcgtgccagagtggattacaggaccactggttcccgacgcgggcctcgaaaagagagaccggggtcgcgacccacggggtgggggtacccaaccccagaaaaaagccgccgcgggggaccacggacggcctccgaaccacccagagagacgctggggcctacagggtccttgccagggaggccagcgaggcgggaaaaatgagcgg

SEQ ID NO: 533882 - DNA, 129 bp, Homo sapiens
gggggaaaccgcttttaccgtgaatacggtttccctggccggcggtttacggggagaaaccccttttaccggggatccggtttccccggccgtccccttagcacgggaagcccccctttccgtggagcc

SEQ ID NO: 533883 - DNA, 520 bp, Homo sapiens
  misc_feature (240)..(240): n is a, c, g, or t
tccacgcgagttagagtgtctcatatcacactctgtgacaccacagtgtgtgttaaacacagcgcactgcgcatataaaatataatacacaaaaatatataaaagccgcgttataggggagcactacacaacatgtgcacatattcttctctcttgtgatattgttgtgtcactataggtgcgtcgtggagagttatatatatattatcgccaacgagtatagagacgcacatctgtgtntctcgtgacacgaacacgttgtagagacgacagagatagagaggatatggcacagtgtttgtgtgtagagacgccccacgagtttgtgtgtgacacagcgatatctctggggcgatattggtgcgcgcatatgtgttggagagaacacactttcttggagaggcatatgagatctttgggttgtgtatatttcctctttcacagagagagagtatgcgttacactattttcactatatatactctacatgtgatgtgacacgtgatatacatcgtgtttt

SEQ ID NO: 533884 - DNA, 258 bp, Homo sapiens
ccagccgagggacacctgacgtgcggtaccgttcctggtttacagctgaacttgatcagacctgaggattgtaggttagggttggcacctggccccccggagctggtgctggtggtccaggtgcataccggcccgaatactagatttctgctggacttacttcgaaaggcccagggaattgacaacggccctcgtcaatttttagccaatgacttcttggtcggcccaggataatcagctgatcgcggggtgatttct

SEQ ID NO: 533885 - DNA, 359 bp, Homo sapiens
  misc_feature (359)..(359): n is a, c, g, or t
ccgagaaccggtctagctgatggcatggacactgtattgcttatctgcaagatgtacataaccaaattgcgcttgaaggaccgccagcagctctccaagctgatcattactcagctgctatatgaccgctacatgagcatcgccaagggactcatcactgaactcaagcctcagtctgagtgtgcacactcggagcagttcctgcatctcatcagactagggagagtgtgaacacacatccatacgtcccatggcgaggaatgcctggcacaggtaacgacctgctatgctgcagatcgtcacactatgcactcagaggctattgagtacgcatgctatgtcacatcacatgtaggccn

SEQ ID NO: 533886 - DNA, 297 bp, Homo sapiens
ttttaggaagagagcgaggcagtgcattcagggaattctggaggcagccttcagtgagggggacacgttccacccactgtccctcaacaatgtcatttcagagagagatagtacactgtgtgaaatgtggagcgccaacaagcggggctcttaggcgatcactagtgagagtttataagaggatgagtgatatggtgagcagcggacttcaaaactgtcaagatcaatccagcggttctcaacggtacacagacttttgacatcagcctcacctagaacttgttgaaatgccaattc

SEQ ID NO: 533887 - DNA, 229 bp, Homo sapiens
cacttggtgcagctggatgatgttgccaggaggcgaccgtctcgtcctgggcaaaggtgatgtaggcatagtcatgcaggcaaagatctcaggcatatcatggagtgggaggctcttgatgtaggagaggtcgccgtgccggtcgtaggtaggcgggatctggtggtagatgcccgaggagctgtagcatgtgctcaggggcgagcacgtcagggtagtcgaagtcctc

SEQ ID NO: 533888 - DNA, 607 bp, Homo sapiens
tcgggagtggtgtgaggccccggttgcggggcgcgctgacgaccactgtgtgggaggggtggtccccttttgtccgccgcatgggtgcggggagtggtagccgtttgttgctggcccgaccacctcgtggtggaggtgcgagcagttttgtgaagccacctatattgatgtcacgacagagttagcgtgactatgtacgccccgtgactttcttcgtggggcatgacacacttgtggtcgcgcgcgccgccctctgtgcggctccacattacgcttctgaaacacagtgcgccgacgggcgtcgtagtgctgctctctcccatgatatatttcggctgcacccttacagaggggcattaagtttgtcgcacttgcttagttctcctaccacagcgcctattgtggcgagtcagcaggccggcatgttctgcaccagggcctgctgagttctacgcgggcctcgcctacccgcccccgccttggggatgatgtcgcaggatccggtcgggttgtcattagtcgagtccgcgagtcgaccccgtccctcgtcccggtggtggtctgcgcgccaccccccgtttaccctcacaagggccccaacaaaaca

SEQ ID NO: 533889 - DNA, 425 bp, Homo sapiens
  misc_feature (15)..(15): n is a, c, g, or t
  misc_feature (31)..(31): n is a, c, g, or t
  misc_feature (68)..(68): n is a, c, g, or t
gacaacatgtctganatcaagttacatgctnacactagcataatggccagaagaggaggtataatgcnactagatggcactgataaaggtgtattcaggaaaccctgaagccctcactgaaaaggcaaaagcagggaaagaagtcggggagcggtagaccagaagaaagaaagagttatagctaataagccaacaaaggaaagaaaatggaatgatataaaaaccatgtaatcattatgctggaacaactgctctccatgcactccagcctgggcgacagtgaaaccctgtctcaaaaaaaaagcccaccccttagggctgggcatggtggctcgcgcctgtagtcctaccacttggggaggccaaggcgggttgatcacctgaggtcaggagttcagggaccagcctggccaacatggtgaagc

SEQ ID NO: 533890 - DNA, 1961 bp, Homo sapiens
  misc_feature (9)..(9): n is a, c, g, or t
  misc_feature (11)..(11): n is a, c, g, or t
gaccacgancnctcttccgctacggctcccagaaggggccagcccgcgcctttcgcgcttctgccgtggccctctgcgggccgctccgccggtgctgtccctgggcgcctccgtgctctcagccaaccgcctctgagagcgcccactcgagcgccccgggagccagagggcgggggtcctcgccgggaccctcctgtgggcccagggggacaaaagtggctctcaatccagcacatgcacattgaagcaagttaaaggatttaatatgaagcacagaagcagatagtgccaaatagcaagcagtagttgttacacatttggtgagcagggcagcatttccttctcccactgctgctgagatggcagaaattagtcgaattcagtacgaaatggaatatactgaaggcattagtcagcgaatgagggtcccagaaaagttaaaagtagcaccgccaaacgctgacctggaacaaggattccaagaaggagttccaaatgctagtgtgataatgcaagttccggagaggattgttgtagcaggaaataatgaagatgtttcattttcaagaccagcagatcttgaccttattcagtcaactccctttaaacccctggcactgaaaacaccacctcgtgtacttacgctgagtgaaagaccactagattttctggatttagaaagacctcctacaacccctcaaaatgaagaaatccgagcagttggcagactaaaaagagagcggtctatgagtgaaaatgctgttcgccaaaatggacagctggtcagaaatgattctcttgtgacaccatcgccacaacaggctcgggtctgtcctccccatatgttacctgaagatggagctaatctttcctctgctcgtggcattttgtcgcttatccagtcttctactcgtagggcataccagcagatcttggatgtgctggatgaaaatcgcagacctgtgttgcgtggtgggtctgctgccgccacttctaatcctcatcatgacaacgtcaggtatggcatttcaaatatagatacaaccattgaaggaacgtcagatgacctgactgttgtagatgcagcttcactaagacgacagataatcaaactaaatagacgtctacaacttctggaagaggagaacaaagaacgtgctaaaagagaaatggtcatgtattcaattactgtagctttctggctgcttaatagctggctctggtttcgccgctagaggtaacatcagccctcaaaaatactgtctcaacagctggaaatataaaagatttgcaaacttctttgtttctgtctctgcattgtatgccattttatagtccacaccctgaaaatgtatttcttccagaaagtctggaggaaggacctatatttgtagaagtaaaggtatattctgtcactcagctgtattcacgtctgagcagttctgcagtaacacctgcttaaaattctccctttgcatgttttgtaaataggctccagttttgttttttaaaaggaatttattttttgcctcatcagtccacccaactgattctgaatgggagagagtctgtagagaattgattcagaaaagtgtctgtgaaagaaaaacaattattttgtcctgtttctcaaacagtgttaagcagttttgttaatagacatttttgcatcgacacttcaacattaacactttgaaagtcatggtctggtgccagatttaagaaactcgaaccacctaatatttcataaccttcttcattaggtacttgtacagattaatttctaacattgcagcagtttcatatgtgtgcaatatgtgcattctttcattttagttttgcacttggttttctataaagtacgtttttactcagttcatgcgtgaacaatttaaaaaacgacagaataaggtacaaatgtagtgtatttaataaactgtcaaccaaagaaaaaaaaggaa

SEQ ID NO: 533891 - DNA, 2081 bp, Homo sapiens
  misc_feature (9)..(9): n is a, c, g, or t
  misc_feature (11)..(11): n is a, c, g, or t
gaccacgancnctcttccgctacggctcccagaaggggccagcccgcgcctttcgcgcttctgccgtggccctctgcgggccgctccgccggtgctgtccctgggcgcctccgtgctctcagccaaccgcctctgagagcgcccactcgagcgccccgggagccagagggcgggggtcctcgccgggaccctcctgtgggcccagggggacaaaagtggctctcaatccagcacatgcacattgaagcaagttaaaggatttaatatgaagcacagaagcagatagtgccaaatagcaagcagtagttgttacacatttggctggaaaagcagtgtccgtgttgttatgtacacctccaaaaaaagttcaaatgtgtaggggaattgttgtgtaaagtaaactgaactgcagggtagcagtattttaatagctattatagacctgtatttactgtatttaaatgagtaaaggaacaagcagtgacacatcactaggaagggtgagcagggcagcatttccttctcccactgctgctgagatggcagaaattagtcgaattcagtacgaaatggaatatactgaaggcattagtcagcgaatgagggtcccagaaaagttaaaagtagcaccgccaaacgctgacctggaacaaggattccaagaaggagttccaaatgctagtgtgataatgcaagttccggagaggattgttgtagcaggaaataatgaagatgtttcattttcaagaccagcagatcttgaccttattcagtcaactccctttaaacccctggcactgaaaacaccacctcgtgtacttacgctgagtgaaagaccactagattttctggatttagaaagacctcctacaacccctcaaaatgaagaaatccgagcagttggcagactaaaaagagagcggtctatgagtgaaaatgctgttcgccaaaatggacagctggtcagaaatgattctcttgtgacaccatcgccacaacaggctcgggtctgtcctccccatatgttacctgaagatggagctaatctttcctctgctcgtggcattttgtcgcttatccagtcttctactcgtagggcataccagcagatcttggatgtgctggatgaaaatcgcaggtatggcatttcaaatatagatacaaccattgaaggaacgtcagatgacctgactgttgtagatgcagcttcactaagacgacagataatcaaactaaatagacgtctacaacttctggaagaggagaacaaagaacgtgctaaaagagaaatggtcatgtattcaattactgtagctttctggctgcttaatagctggctctggtttcgccgctagaggtaacatcagccctcaaaaatactgtctcaacagctggaaatataaaagatttgcaaacttctttgtttctgtctctgcattgtatgccattttatagtccacaccctgaaaatgtatttcttccagaaagtctggaggaaggacctatatttgtagaagtaaaggtatattctgtcactcagctgtattcacgtctgagcagttctgcagtaacacctgcttaaaattctccctttgcatgttttgtaaataggctccagttttgttttttaaaaggaatttattttttgcctcatcagtccacccaactgattctgaatgggagagagtctgtagagaattgattcagaaaagtgtctgtgaaagaaaaacaattattttgtcctgtttctcaaacagtgttaagcagttttgttaatagacatttttgcatcgacacttcaacattaacactttgaaagtcatggtctggtgccagatttaagaaactcgaaccacctaatatttcataaccttcttcattaggtacttgtacagattaatttctaacattgcagcagtttcatatgtgtgcaatatgtgcattctttcattttagttttgcacttggttttctataaagtacgtttttactcagttcatgcgtgaacaatttaaaaaacgacagaataaggtacaaatgtagtgtatttaataaactgtcaaccaaagaaaaaaaaggaa

SEQ ID NO: 533892 - DNA, 131 bp, Homo sapiens
tgtcttgtaccagcattggcacataggagccttctaatgaggagcctatccctgacacacgtgcaacgatatatcattttctaatccttcgcactaggataacctacagtttatgatctctcatgagttat

SEQ ID NO: 533893 - DNA, 1924 bp, Homo sapiens
  misc_feature (9)..(9): n is a, c, g, or t
  misc_feature (11)..(11): n is a, c, g, or t
gaccacgancnctcttccgctacggctcccagaaggggccagcccgcgcctttcgcgcttctgccgtggccctctgcgggccgctccgccggtgctgtccctgggcgcctccgtgctctcagccaaccgcctctgagagcgcccactcgagcgccccgggagccagagggcgggggtcctcgccgggaccctcctgtgggcccagggggtgagcagggcagcatttccttctcccactgctgctgagatggcagaaattagtcgaattcagtacgaaatggaatatactgaaggcattagtcagcgaatgagggtcccagaaaagttaaaagtagcaccgccaaacgctgacctggaacaaggattccaagaaggagttccaaatgctagtgtgataatgcaagttccggagaggattgttgtagcaggaaataatgaagatgtttcattttcaagaccagcagatcttgaccttattcagtcaactccctttaaacccctggcactgaaaacaccacctcgtgtacttacgctgagtgaaagaccactagattttctggatttagaaagacctcctacaacccctcaaaatgaagaaatccgagcagttggcagactaaaaagagagcggtctatgagtgaaaatgctgttcgccaaaatggacagctggtcagaaatgattctctgtggcacagatcagattctgccccaagaaataaaatttcaaggttccaggcaccgatttctgcaccggagtacactgtgacaccatcgccacaacaggctcgggtctgtcctccccatatgttacctgaagatggagctaatctttcctctgctcgtggcattttgtcgcttatccagtcttctactcgtagggcataccagcagatcttggatgtgctggatgaaaatcgcagacctgtgttgcgtggtgggtctgctgccgccacttctaatcctcatcatgacaacgtcaggtatggcatttcaaatatagatacaaccattgaaggaacgtcagatgacctgactgttgtagatgcagcttcactaagacgacagataatcaaactaaatagacgtctacaacttctggaagaggagaacaaagaacgtgctaaaagagaaatggtcatgtattcaattactgtagctttctggctgcttaatagctggctctggtttcgccgctagaggtaacatcagccctcaaaaatactgtctcaacagctggaaatataaaagatttgcaaacttctttgtttctgtctctgcattgtatgccattttatagtccacaccctgaaaatgtatttcttccagaaagtctggaggaaggacctatatttgtagaagtaaaggtatattctgtcactcagctgtattcacgtctgagcagttctgcagtaacacctgcttaaaattctccctttgcatgttttgtaaataggctccagttttgttttttaaaaggaatttattttttgcctcatcagtccacccaactgattctgaatgggagagagtctgtagagaattgattcagaaaagtgtctgtgaaagaaaaacaattattttgtcctgtttctcaaacagtgttaagcagttttgttaatagacatttttgcatcgacacttcaacattaacactttgaaagtcatggtctggtgccagatttaagaaactcgaaccacctaatatttcataaccttcttcattaggtacttgtacagattaatttctaacattgcagcagtttcatatgtgtgcaatatgtgcattctttcattttagttttgcacttggttttctataaagtacgtttttactcagttcatgcgtgaacaatttaaaaaacgacagaataaggtacaaatgtagtgtatttaataaactgtcaaccaaagaaaaaaaaggaa

SEQ ID NO: 533894 - DNA, 219 bp, Homo sapiens
agtgcttcccagaggatgtctaagctggcccaaaatcagcagcccaccctagcctctgggggctgagtgcaagggctcctcttttctccacacagactgggcaccctctgtgggcctaaggtaagaggtggtctatttctaaaagtgctggtgtctagttaacgctctgaggtactcatacttacgctttgctatataatggggggtctcattcagacg

SEQ ID NO: 533895 - DNA, 129 bp, Homo sapiens
gaggatgttttattacggctctgtgctggctctccttcctcttggctgagatagcagaggggctccccgggtctctcactgttgcagtgggctggccgttcagcctgtcttccccaacaccccgccctt

SEQ ID NO: 533896 - DNA, 1849 bp, Homo sapiens
  misc_feature (9)..(9): n is a, c, g, or t
  misc_feature (11)..(11): n is a, c, g, or t
gaccacgancnctcttccgctacggctcccagaaggggccagcccgcgcctttcgcgcttctgccgtggccctctgcgggccgctccgccggtgctgtccctgggcgcctccgtgctctcagccaaccgcctctgagagcgcccactcgagcgccccgggagccagagggcgggggtcctcgccgggaccctcctgtgggcccagggggtgagcagggcagcatttccttctcccactgctgctgagatggcagaaattagtcgaattcagtacgaaatggaatatactgaaggcattagtcagcgaatgagggtcccagaaaagttaaaagtagcaccgccaaacgctgacctggaacaaggattccaagaaggagttccaaatgctagtgtgataatgcaagttccggagaggattgttgtagcaggaaataatgaagatgtttcattttcaagaccagcagatcttgaccttattcagtcaactccctttaaacccctggcactgaaaacaccacctcgtgtacttacgctgagtgaaagaccactagattttctggatttagaaagacctcctacaacccctcaaaatgaagaaatccgagcagttggcagactaaaaagagagcggtctatgagtgaaaatgctgttcgccaaaatggacagctggtcagaaatgattctcttgtgacaccatcgccacaacaggctcgggtctgtcctccccatatgttacctgaagatggagctaatctttcctctgctcgtggcattttgtcgcttatccagtcttctactcgtagggcataccagcagatcttggatgtgctggatgaaaatcgcagacctgtgttgcgtggtgggtctgctgccgccacttctaatcctcatcatgacaacgtcaggtatggcatttcaaatatagatacaaccattgaaggaacgtcagatgacctgactgttgtagatgcagcttcactaagacgacagataatcaaactaaatagacgtctacaacttctggaagaggagaacaaagaacgtgctaaaagagaaatggtcatgtattcaattactgtagctttctggctgcttaatagctggctctggtttcgccgctagaggtaacatcagccctcaaaaatactgtctcaacagctggaaatataaaagatttgcaaacttctttgtttctgtctctgcattgtatgccattttatagtccacaccctgaaaatgtatttcttccagaaagtctggaggaaggacctatatttgtagaagtaaaggtatattctgtcactcagctgtattcacgtctgagcagttctgcagtaacacctgcttaaaattctccctttgcatgttttgtaaataggctccagttttgttttttaaaaggaatttattttttgcctcatcagtccacccaactgattctgaatgggagagagtctgtagagaattgattcagaaaagtgtctgtgaaagaaaaacaattattttgtcctgtttctcaaacagtgttaagcagttttgttaatagacatttttgcatcgacacttcaacattaacactttgaaagtcatggtctggtgccagatttaagaaactcgaaccacctaatatttcataaccttcttcattaggtacttgtacagattaatttctaacattgcagcagtttcatatgtgtgcaatatgtgcattctttcattttagttttgcacttggttttctataaagtacgtttttactcagttcatgcgtgaacaatttaaaaaacgacagaataaggtacaaatgtagtgtatttaataaactgtcaaccaaagaaaaaaaaggaa

SEQ ID NO: 533897 - DNA, 2429 bp, Homo sapiens
  misc_feature (9)..(9): n is a, c, g, or t
  misc_feature (11)..(11): n is a, c, g, or t
  misc_feature (223)..(223): n is a, c, g, or t
gaccacgancnctcttccgctacggctcccagaaggggccagcccgcgcctttcgcgcttctgccgtggccctctgcgggccgctccgccggtgctgtccctgggcgcctccgtgctctcagccaaccgcctctgagagcgcccactcgagcgccccgggagccagagggcgggggtcctcgccgggaccctcctgtgggcccagggggacccgcgacctgcngcccgagctggctgccaggcctatcgccgccgccgagaccctccggccaacagggacccgcggtggccccggccccccggtagtgtctccctgacccgagtcccgtccccgggcctcttgccttcaaccctggtctttcctcctccccgggaccttgagtccccgaggagagcgagggagaggagcgccttctgcagggacaaaagtggctctcaatccagcacatgcacattgaagcaagttaaaggatttaatatgaagcacagaagcagatagtgccaaatagcaagcagtagttgttacacatttggctggaaaagcagtgtccgtgttgttatgtacacctccaaaaaaagttcaaatgtgtaggggaattgttgtgtaaagtaaactgaactgcagggtagcagtattttaatagctattatagacctgtatttactgtatttaaatgagtaaaggaacaagcagtgacacatcactaggaagggtgagcagggcagcatttccttctcccactgctgctgagatggcagaaattagtcgaattcagtacgaaatggaatatactgaaggcattagtcagcgaatgagggtcccagaaaagttaaaagtagcaccgccaaacgctgacctggaacaaggattccaagaaggagttccaaatgctagtgtgataatgcaagttccggagaggattgttgtagcaggaaataatgaagatgtttcattttcaagaccagcagatcttgaccttattcagtcaactccctttaaacccctggcactgaaaacaccacctcgtgtacttacgctgagtgaaagaccactagattttctggatttagaaagacctcctacaacccctcaaaatgaagaaatccgagcagttggcagactaaaaagagagcggtctatgagtgaaaatgctgttcgccaaaatggacagctggtcagaaatgattctctgtggcacagatcagattctgccccaagaaataaaatttcaaggttccaggcaccgatttctgcaccggagtacactgtgacaccatcgccacaacaggctcgggtctgtcctccccatatgttacctgaagatggagctaatctttcctctgctcgtggcattttgtcgcttatccagtcttctactcgtagggcataccagcagatcttggatgtgctggatgaaaatcgcagacctgtgttgcgtggtgggtctgctgccgccacttctaatcctcatcatgacaacgtcaggtatggcatttcaaatatagatacaaccattgaaggaacgtcagatgacctgactgttgtagatgcagcttcactaagacgacagataatcaaactaaatagacgtctacaacttctggaagaggagaacaaagaacgtgctaaaagagaaatggtcatgtattcaattactgtagctttctggctgcttaatagctggctctggtttcgccgctagaggtaacatcagccctcaaaaatactgtctcaacagctggaaatataaaagatttgcaaacttctttgtttctgtctctgcattgtatgccattttatagtccacaccctgaaaatgtatttcttccagaaagtctggaggaaggacctatatttgtagaagtaaaggtatattctgtcactcagctgtattcacgtctgagcagttctgcagtaacacctgcttaaaattctccctttgcatgttttgtaaataggctccagttttgttttttaaaaggaatttattttttgcctcatcagtccacccaactgattctgaatgggagagagtctgtagagaattgattcagaaaagtgtctgtgaaagaaaaacaattattttgtcctgtttctcaaacagtgttaagcagttttgttaatagacatttttgcatcgacacttcaacattaacactttgaaagtcatggtctggtgccagatttaagaaactcgaaccacctaatatttcataaccttcttcattaggtacttgtacagattaatttctaacattgcagcagtttcatatgtgtgcaatatgtgcattctttcattttagttttgcacttggttttctataaagtacgtttttactcagttcatgcgtgaacaatttaaaaaacgacagaataaggtacaaatgtagtgtatttaataaactgtcaaccaaagaaaaaaaaggaa

SEQ ID NO: 533898 - DNA, 177 bp, Homo sapiens
tcggtttcacaatgtatctctctggtctgacccttctgcctcctccttcttcatttaagaacccttgtgattacactagggcccacagccaatacatccaggggtagtctactctactttgcaagtcgagctgggttagcaacctataattccatctggcagttttaatatcctctt

SEQ ID NO: 533899 - DNA, 1705 bp, Homo sapiens
  misc_feature (9)..(9): n is a, c, g, or t
  misc_feature (11)..(11): n is a, c, g, or t
gaccacgancnctcttccgctacggctcccagaaggggccagcccgcgcctttcgcgcttctgccgtggccctctgcgggccgctccgccggtgctgtccctgggcgcctccgtgctctcagccaaccgcctctgagagcgcccactcgagcgccccgggagccagagggcgggggtcctcgccgggaccctcctgtgggcccagggggtgagcagggcagcatttccttctcccactgctgctgagatggcagaaattagtcgaattcagtacgaaatggaatatactgaaggcattagtcagcgaatgagggtcccagaaaagttaaaagtagcaccgccaaacgctgacctggaacaaggattccaagaaggagttccaaatgctagtgtgataatgcaagttccggagaggattgttgtagcaggaaataatgaagatgtttcattttcaagaccagcagatcttgaccttattcagtcaactccctttaaacccctggcactgaaaacaccacctcgtgtacttacgctgagtgaaagaccactagattttctggatttagaaagacctcctacaacccctcaaaatgaagaaatccgagcagttggcagactaaaaagagagcggtctatgagtgaaaatgctgttcgccaaaatggacagctggtcagaaatgattctctgtggcacagatcagattctgccccaagaaataaaatttcaaggttccaggcaccgatttctgcaccggagtacacgtatggcatttcaaatatagatacaaccattgaaggaacgtcagatgacctgactgttgtagatgcagcttcactaagacgacagataatcaaactaaatagacgtctacaacttctggaagaggagaacaaagaacgtgctaaaagagaaatggtcatgtattcaattactgtagctttctggctgcttaatagctggctctggtttcgccgctagaggtaacatcagccctcaaaaatactgtctcaacagctggaaatataaaagatttgcaaacttctttgtttctgtctctgcattgtatgccattttatagtccacaccctgaaaatgtatttcttccagaaagtctggaggaaggacctatatttgtagaagtaaaggtatattctgtcactcagctgtattcacgtctgagcagttctgcagtaacacctgcttaaaattctccctttgcatgttttgtaaataggctccagttttgttttttaaaaggaatttattttttgcctcatcagtccacccaactgattctgaatgggagagagtctgtagagaattgattcagaaaagtgtctgtgaaagaaaaacaattattttgtcctgtttctcaaacagtgttaagcagttttgttaatagacatttttgcatcgacacttcaacattaacactttgaaagtcatggtctggtgccagatttaagaaactcgaaccacctaatatttcataaccttcttcattaggtacttgtacagattaatttctaacattgcagcagtttcatatgtgtgcaatatgtgcattctttcattttagttttgcacttggttttctataaagtacgtttttactcagttcatgcgtgaacaatttaaaaaacgacagaataaggtacaaatgtagtgtatttaataaactgtcaaccaaagaaaaaaaaggaa

SEQ ID NO: 533900 - DNA, 1630 bp, Homo sapiens
  misc_feature (9)..(9): n is a, c, g, or t
  misc_feature (11)..(11): n is a, c, g, or t
gaccacgancnctcttccgctacggctcccagaaggggccagcccgcgcctttcgcgcttctgccgtggccctctgcgggccgctccgccggtgctgtccctgggcgcctccgtgctctcagccaaccgcctctgagagcgcccactcgagcgccccgggagccagagggcgggggtcctcgccgggaccctcctgtgggcccagggggtgagcagggcagcatttccttctcccactgctgctgagatggcagaaattagtcgaattcagtacgaaatggaatatactgaaggcattagtcagcgaatgagggtcccagaaaagttaaaagtagcaccgccaaacgctgacctggaacaaggattccaagaaggagttccaaatgctagtgtgataatgcaagttccggagaggattgttgtagcaggaaataatgaagatgtttcattttcaagaccagcagatcttgaccttattcagtcaactccctttaaacccctggcactgaaaacaccacctcgtgtacttacgctgagtgaaagaccactagattttctggatttagaaagacctcctacaacccctcaaaatgaagaaatccgagcagttggcagactaaaaagagagcggtctatgagtgaaaatgctgttcgccaaaatggacagctggtcagaaatgattctctgtatggcatttcaaatatagatacaaccattgaaggaacgtcagatgacctgactgttgtagatgcagcttcactaagacgacagataatcaaactaaatagacgtctacaacttctggaagaggagaacaaagaacgtgctaaaagagaaatggtcatgtattcaattactgtagctttctggctgcttaatagctggctctggtttcgccgctagaggtaacatcagccctcaaaaatactgtctcaacagctggaaatataaaagatttgcaaacttctttgtttctgtctctgcattgtatgccattttatagtccacaccctgaaaatgtatttcttccagaaagtctggaggaaggacctatatttgtagaagtaaaggtatattctgtcactcagctgtattcacgtctgagcagttctgcagtaacacctgcttaaaattctccctttgcatgttttgtaaataggctccagttttgttttttaaaaggaatttattttttgcctcatcagtccacccaactgattctgaatgggagagagtctgtagagaattgattcagaaaagtgtctgtgaaagaaaaacaattattttgtcctgtttctcaaacagtgttaagcagttttgttaatagacatttttgcatcgacacttcaacattaacactttgaaagtcatggtctggtgccagatttaagaaactcgaaccacctaatatttcataaccttcttcattaggtacttgtacagattaatttctaacattgcagcagtttcatatgtgtgcaatatgtgcattctttcattttagttttgcacttggttttctataaagtacgtttttactcagttcatgcgtgaacaatttaaaaaacgacagaataaggtacaaatgtagtgtatttaataaactgtcaaccaaagaaaaaaaaggaa

SEQ ID NO: 533901 - DNA, 1479 bp, Homo sapiens
  misc_feature (9)..(9): n is a, c, g, or t
  misc_feature (11)..(11): n is a, c, g, or t
gaccacgancnctcttccgctacggctcccagaaggggccagcccgcgcctttcgcgcttctgccgtggccctctgcgggccgctccgccggtgctgtccctgggcgcctccgtgctctcagccaaccgcctctgagagcgcccactcgagcgccccgggagccagagggcgggggtcctcgccgggaccctcctgtgggcccagggggacaaaagtggctctcaatccagcacatgcacattgaagcaagttaaaggatttaatatgaagcacagaagcagatagtgccaaatagcaagcagtagttgttacacatttggctggaaaagcagtgtccgtgttgttatgtacacctccaaaaaaagttcaaatgtgtaggggaattgttgtgtaaagtaaactgaactgcagggtagcagtattttaatagctattatagacctgtatttactgtatttaaatgagtaaaggaacaagcagtgacacatcactaggaagggtgagcagggcagcatttccttctcccactgctgctgagatggcagaaattagtcgaattcagtacgaaatggaatatactgaaggcattagtcagcgaatgagggtcccagaaaagttaaaagtagcaccgccaaacgctgacctggaacaaggattccaagaaggagttccaaatgctagtgtgataatgcaagttccggagaggattgttgtagcaggaaataatgaagatgtttcattttcaagaccagcagatcttgaccttattcagtcaactccctttaaacccctggcactgaaaacaccacctcgtgtacttacgctgagtgaaagaccactagattttctggatttagaaagacctcctacaacccctcaaaatgaagaaatccgagcagttggcagactaaaaagagagcggtctatgagtgaaaatgctgttcgccaaaatggacagctggtcagaaatgattctcttgtgacaccatcgccacaacaggctcgggtctgtcctccccatatgttacctgaagatggagctaatctttcctctgctcgtggcattttgtcgcttatccagtcttctactcgtagggcataccagcagatcttggatgtgctggatgaaaatcgcagacctgtgttgcgtggtgggtctgctgccgccacttctaatcctcatcatgacaacgtcaggtatggcatttcaaatatagatacaaccattgaaggaacgtcagatgacctgactgttgtagatgcagcttcactaagacgacagataatcaaactaaatagacgtctacaacttctggaagaggagaacaaagaacgtgctaaaagagaaatggtcatgtattcaattactgtagctttctggctgcttaatagctggctctggtttcgccgctagaggtaacatcagccctcaaaaatactgtctcaacagctggaaatataaaagatttgcaaacttc

SEQ ID NO: 533902 - DNA, 130 bp, Homo sapiens
tctcatcttcatcccgtcatctccataatgctgaggatgtatgtcgcctcaagaccctgtgatgagttgcgttaactgtataaattgtttgtaaaacatgtgtgttcaaacaagtatcaaactctgattg

SEQ ID NO: 533903 - DNA, 470 bp, Homo sapiens
  misc_feature (9)..(9): n is a, c, g, or t
  misc_feature (30)..(30): n is a, c, g, or t
  misc_feature (51)..(51): n is a, c, g, or t
  misc_feature (69)..(69): n is a, c, g, or t
  misc_feature (463)..(463): n is a, c, g, or t
  misc_feature (466)..(466): n is a, c, g, or t
agctttcancttaatttttaaaatggaaangcatgcaagcataatccaggnactgtccttcctgaagtncccaggcatcatgctgtgcactttggtaaacgaagtagacatggttgctcccctcagagaacgttagtgccccgggttgttgtatgtaaggattagataacactgtgtatgtaaagcacctaatacaatgtttagctcagagtcattgcttgttaaatgctggggtttcctcaggggactttgtcatacccccaatttcctccccactctacatgccatccacctggggttacagtgcagtggcgtccaattcgtcatcaggaatcaccactttctggggtgtacacatctagaccccttcaggacaaattgtaaacatagctaatagcataatactgctagacagttcatatgatgcgctgtctccagtttataaactcattgactcaggccnatntatg

SEQ ID NO: 533904 - DNA, 167 bp, Homo sapiens
actacgaccttcgcgctcggtaccctttttttttttcttttcacccggttcaggccacctttggggggttttctgggtctccaggcaggcttggccacctatctgcacccaaatatccaaggtcggggcggggtgcagcacagcttcgggccaggggacatcctctc

SEQ ID NO: 533905 - DNA, 179 bp, Homo sapiens
cacctcgttggtcacggcacgaacctcattggcatcatcagcccggtagtagcggcaccatcgtgagccttctcttgaggtggctggggcaggaagctgaagtcgaaaccagcgctgggaggaccagtgtggaccacggaggtccacggagggccgggggaacccgacaggaccattag

SEQ ID NO: 533906 - DNA, 1706 bp, Homo sapiens
  misc_feature (9)..(9): n is a, c, g, or t
  misc_feature (11)..(11): n is a, c, g, or t
gaccacgancnctcttccgctacggctcccagaaggggccagcccgcgcctttcgcgcttctgccgtggccctctgcgggccgctccgccggtgctgtccctgggcgcctccgtgctctcagccaaccgcctctgagagcgcccactcgagcgccccgggagccagagggcgggggtcctcgccgggaccctcctgtgggcccagggggggaaataatgaagatgtttcattttcaagaccagcagatcttgaccttattcagtcaactccctttaaacccctggcactgaaaacaccacctcgtgtacttacgctgagtgaaagaccactagattttctggatttagaaagacctcctacaacccctcaaaatgaagaaatccgagcagttggcagactaaaaagagagcggtctatgagtgaaaatgctgttcgccaaaatggacagctggtcagaaatgattctctgtggcacagatcagattctgccccaagaaataaaatttcaaggttccaggcaccgatttctgcaccggagtacactgtgacaccatcgccacaacaggctcgggtctgtcctccccatatgttacctgaagatggagctaatctttcctctgctcgtggcattttgtcgcttatccagtcttctactcgtagggcataccagcagatcttggatgtgctggatgaaaatcgcagacctgtgttgcgtggtgggtctgctgccgccacttctaatcctcatcatgacaacgtcaggtatggcatttcaaatatagatacaaccattgaaggaacgtcagatgacctgactgttgtagatgcagcttcactaagacgacagataatcaaactaaatagacgtctacaacttctggaagaggagaacaaagaacgtgctaaaagagaaatggtcatgtattcaattactgtagctttctggctgcttaatagctggctctggtttcgccgctagaggtaacatcagccctcaaaaatactgtctcaacagctggaaatataaaagatttgcaaacttctttgtttctgtctctgcattgtatgccattttatagtccacaccctgaaaatgtatttcttccagaaagtctggaggaaggacctatatttgtagaagtaaaggtatattctgtcactcagctgtattcacgtctgagcagttctgcagtaacacctgcttaaaattctccctttgcatgttttgtaaataggctccagttttgttttttaaaaggaatttattttttgcctcatcagtccacccaactgattctgaatgggagagagtctgtagagaattgattcagaaaagtgtctgtgaaagaaaaacaattattttgtcctgtttctcaaacagtgttaagcagttttgttaatagacatttttgcatcgacacttcaacattaacactttgaaagtcatggtctggtgccagatttaagaaactcgaaccacctaatatttcataaccttcttcattaggtacttgtacagattaatttctaacattgcagcagtttcatatgtgtgcaatatgtgcattctttcattttagttttgcacttggttttctataaagtacgtttttactcagttcatgcgtgaacaatttaaaaaacgacagaataaggtacaaatgtagtgtatttaataaactgtcaaccaaagaaaaaaaaggaa

SEQ ID NO: 533907 - DNA, 104 bp, Homo sapiens
acctagaggatccccagtgtctgagaaggtgatctaagtggccggctcctccacacacacacacacaccagtggaaccaatgagaaccacgttagacatcctca

SEQ ID NO: 533908 - DNA, 385 bp, Homo sapiens
tgagatggagtctcactctgttgccctggctggagtgcagtggcactatctcggctcactgcatcctctgcctcccaggttcaaagattcttgtgcttcagccttctaaatacctgggattacaggcacctgccatcacacctggctaacttttttttgtagttttagtagaaactggtttcacaatgtaggccaggctggtttcgaactcctgacctcaagtgatccacctgccttggccttccaaagtgctgggattacaggtgtgagccacagcgcccggctcaatgactggtatttttataagtagaagacaatttggagaccgacacaggcccaggggggagaacaccaagtggacgccgaagcaaagtgaaaccttcgc

SEQ ID NO: 533909 - DNA, 1320 bp, Homo sapiens
  misc_feature (9)..(9): n is a, c, g, or t
  misc_feature (11)..(11): n is a, c, g, or t
gaccacgancnctcttccgctacggctcccagaaggggccagcccgcgcctttcgcgcttctgccgtggccctctgcgggccgctccgccggtgctgtccctgggcgcctccgtgctctcagccaaccgcctctgagagcgcccactcgagcgccccgggagccagagggcgggggtcctcgccgggaccctcctgtgggcccagggggacaaaagtggctctcaatccagcacatgcacattgaagcaagttaaaggatttaatatgaagcacagaagcagatagtgccaaatagcaagcagtagttgttacacatttggctggaaaagcagtgtccgtgttgttatgtacacctccaaaaaaagttcaaatgtgtaggggaattgttgtgtaaagtaaactgaactgcagggtagcagtattttaatagctattatagacctgtatttactgtatttaaatgagtaaaggaacaagcagtgacacatcactaggaagggtgagcagggcagcatttccttctcccactgctgctgagatggcagaaattagtcgaattcagtacgaaatggaatatactgaaggcattagtcagcgaatgagggtcccagaaaagttaaaagtagcaccgccaaacgctgacctggaacaaggattccaagaaggagttccaaatgctagtgtgataatgcaagttccggagaggattgttgtagcaggaaataatgaagatgtttcattttcaagaccagcagatcttgaccttattcagtcaactccctttaaacccctggcactgaaaacaccacctcgtgtacttacgctgagtgaaagaccactagattttctggatttagaaagacctcctacaacccctcaaaatgaagaaatccgagcagttggcagactaaaaagagagcggtctatgagtgaaaatgctgttcgccaaaatggacagctggtcagaaatgattctctacctgtgttgcgtggtgggtctgctgccgccacttctaatcctcatcatgacaacgtcaggtatggcatttcaaatatagatacaaccattgaaggaacgtcagatgacctgactgttgtagatgcagcttcactaagacgacagataatcaaactaaatagacgtctacaacttctggaagaggagaacaaagaacgtgctaaaagagaaatggtcatgtattcaattactgtagctttctggctgcttaatagctggctctggtttcgccgctagaggtaacatcagccctcaaaaatactgtctcaacagctggaaatataaaagatttgcaaacttc

SEQ ID NO: 533910 - DNA, 90 bp, Homo sapiens
gtggacacagccacatattactgtgcacggaactggaactacctcgggggactctattactcttacggtatggacgtctgggggcaaggg

SEQ ID NO: 533911 - DNA, 133 bp, Homo sapiens
aaaggctctcgcgacaccctgtacgaggcggggcgggaagtccgcacgggaaccaacaaaggccaaaaatttcctgggaacggttggatttaacagataaactttaagacccttttcgttcccccagagggga

SEQ ID NO: 533912 - DNA, 383 bp, Homo sapiens
ggagaccccatctctacaaaaaagtaaacaattagccgggcatggtgcacacgcctatagtcccagctactcaggagggtgaagatcacctgagaccaggcggtcaaggcttcagtgagccatgattgtggcactgcactccagcctaggcaatagagtgagactgtctcaaaaaataaaattttaaaataactgaagagtataactggattgtttgtaacacaaaggataagtgcttaagatgatggaaaccctatttatcctgatgtgattattacacattgcatgcctgtaccaaaatatttcatgtaacccataaatatatacatctactatgtacccacaaaaattaaaaaatgtttacaggagtgaaaaaaaaaaaa

SEQ ID NO: 533913 - DNA, 408 bp, Homo sapiens
cgctagtgaagtcatagccatgtagcatcatagcacaagttacttatgtgttgtgatgctgctataaacaaacctactgtgctgccagatgtataaaagcatagcacatacaatcatgtacagttatgtcatacttgatgacaataaaaaacaatgatgttaatggcttagtatttacaatactgtacttttaatcattattttagaatgtactccttctacttgtagaaaacgttaactgtaaaacagcctcaggcaggtccttcaggagatattccagaaggcattgttgtcgtaagagatgacagctccatgcatgttcttgtccctgaagaccttccagtgggacaagatatagaggaggaagacagtgatattgataatcctgaccccatgtagggctaggct

SEQ ID NO: 533914 - DNA, 466 bp, Homo sapiens
taaacaatagttacaatagcactatcctatcttaccctactagcagcaagcctagcatacgaatgaccccaaaaaggcctagaatgaacagaatatgatcattagtttaaaacaaaacacctgatttcgactcattagactcatgatttacttcataattatcaagtgccattagtatacataaacatcataatagcattcacgatagcccttgcagggttacttatatatcgatctcacttaatatcttcactcacgtatgcctagaaggaatgatattatcactattcatcatatcgactctaatggtcctaaacacacactatcaccctagctaacataatacccattatataactagtgtttgcagccttgcgaggctgcacggggcctatcactactagtaatagtatccaacccctccggtaccgattacgtccaaaacttaaacctcttacaatgctaa

SEQ ID NO: 533915 - DNA, 341 bp, Homo sapiens
gtggacctgagagagatgagattctcagaggcaaaacgagatctgggagcaactaggctagtggaagggagagtcctcttagaaaattctgagcaaagatgctcccattcacgagggatggggtgagcgggcagtgattctgtctgtgagctatagctcccttctgaactccctcagtgttctagggaggacacaagcctcgtagctcattaagcaaaggccctccaagtctcctttttacttcagcacttaggaaactctccaagacttaacttccgatctggggaggtactacgtggagcagacctatcccttcttattcctgttgcagtgtgcttccg

SEQ ID NO: 533916 - DNA, 184 bp, Homo sapiens
gcttactgcttctgcctggggcatggtgggtttgatcttcttccccttcttttcttccccttcttctttccttctttgatcttcttgcttcctgcttctgcctcagggcttggatttccttttctctctgcctgggtccccttcgccggatgttcacgtggctctctcctgcttcctgcttctg

SEQ ID NO: 533917 - DNA, 235 bp, Homo sapiens
  misc_feature (187)..(187): n is a, c, g, or t
caacttcgagagaagcaaacatagctcacatatgtgaataccttatgaaagtcactggctcataagaggaacgggatgcagactgcagacttctgactctcagctagcgtccctgctcatttccaaggaaatggaaagacacaatgctactgttatttgaatgtttaggagaagggtgggtggcggnctctgaacgaaagtatcccaaatcgtttgtccttgggcgaattgtttg

SEQ ID NO: 533918 - DNA, 257 bp, Homo sapiens
caaggatttacttgccttcgccttctggctccatacagtagtctctcttcttgcggtcttggccattccccccaccaggcccccagctgtggctgtgtctgggtcttggcatttgtaatgtacatgggtctaggccctttctctccacctgtccttcccctctttggacacaaaccaaaacatctgagcatctccttacagagggaggtctccctggggttgctgtgccaagtttccattgcttttgcccagaatga

SEQ ID NO: 533919 - DNA, 346 bp, Homo sapiens
  misc_feature (286)..(286): n is a, c, g, or t
gcggccgcctactactactaaattcgcggccgcgtcgacggtggccaggaaattaaaaaccaaagatgaggccgggctcagtggctcacgcctgtaatcccagcactttgggaggccaaggcagtggatcacaagatcaagggatcgagaccatcctggccaacatggtgaaaccccgtcttgactgaaaatacaaagattagctgggtgtggtggcgtgcacctgtagtcccagctgcttgaaggctgaggcaggagaatcgcttgaacctgggagatggaggtngcagtgagctgagatcacactactgcactccagcctggcaacagagtgagactctgtctc

SEQ ID NO: 533920 - DNA, 263 bp, Homo sapiens
gcatggtgggatatttcttttcatttttccctgcgcttacaacttggaacatgtgggggggtttaattcatgagcattggatactgaaaagaaaaccgaatacaataccagacccagccctacactttggtttgtcatggtgtcagcgcagcagcctacagctaagttcctaaacgccactttggactaatttaaaaaagaatcccgatatttacttttactggatggtgaaattggttgctcttgtattttatgaaaaaaag

SEQ ID NO: 533921 - DNA, 534 bp, Homo sapiens
gacattattgtattctcattaagcagaggaggaacccaaagaacaaagaaattatataatgtgctcaaggtcacaaagttaatacaagatggagctggaatttaaacacagatacatctggtaccaaatgaatgcgtttttccacatccacctgtatgcttgtgagttctagtgctacttagtgaatctcaccagaatagaatacatgacaagtcccttactaaaactggagaaagtcaaagtatattaaagcttggcctgcatatttataaacaagttttctctgacatagataaatatcaagcattagggacagaagacgaataattgacaaagtattgctaagttgctcttattgtgtagaactttcccattttaatggtgactcatactaccataaaaactttgtttggtatttgtttgtgtcttattatatagagtttgatgtaatgcttacatatggcataatgtgtctttaatatgatgttaataaacctttatttaatgcttttgttttttagcatataaaaaaaa

SEQ ID NO: 533922 - DNA, 419 bp, Homo sapiens
  misc_feature (15)..(15): n is a, c, g, or t
  misc_feature (137)..(137): n is a, c, g, or t
  misc_feature (147)..(147): n is a, c, g, or t
  misc_feature (199)..(199): n is a, c, g, or t
  misc_feature (267)..(267): n is a, c, g, or t
  misc_feature (273)..(273): n is a, c, g, or t
  misc_feature (275)..(275): n is a, c, g, or t
  misc_feature (277)..(277): n is a, c, g, or t
  misc_feature (292)..(292): n is a, c, g, or t
  misc_feature (295)..(295): n is a, c, g, or t
  misc_feature (323)..(323): n is a, c, g, or t
  misc_feature (339)..(339): n is a, c, g, or t
  misc_feature (343)..(343): n is a, c, g, or t
  misc_feature (347)..(347): n is a, c, g, or t
  misc_feature (392)..(392): n is a, c, g, or t
aagaagagattgagnaaaagaaatggaaattagaattccatatcagcgttttatttgaacgtttgtcgcacaaacattgttatcctgggctagacaggcctactttcaattccagttctgctactagttggctatgntttatttatnctccataaatcctgattttgctcattgatacagatagggatatctactttanattaaaaagtagttagtatgtctgacaactgggaataagtccttaacaaataacaattatgataattnaggccncntntactgtgataacacngtntcattcaaataactcttgacaggctcgncttctaagatcaagcnaganagtntgtgtcagttaaaatgtgaatgaaaatgtaatgaaaggaagtacnaagaaatacatactttctactctcaag

SEQ ID NO: 533923 - DNA, 305 bp, Homo sapiens
tgggagtaatatgggctagagatagctacttttcatgcagcttctgactttcaaacccataagcgaatggctattttgataaaaattaaaggccaggcacagtggctcacacctgcaatccaaactctttaggaggccgcggggagtggatcaccttaagtcaggatttcaagaccagcttggccaacatggtgaaaccctgtctctactaaaaatacaaaaaaattagctgggcgtggtggtgggcgcccgtaatcccagctactcagaaggctgaggcaggagaatcacttgaacccaggagg

SEQ ID NO: 533924 - DNA, 812 bp, Homo sapiens
attaatcccctggcccaagccgtcatctactctaccatctttgcaggcacactcatcacagcgctaagctcgtgctgattttgtacctgagtaggcctagaaataaacagtgctgagctttttatgctcagattctataccaagagaaaagtgaacaccgcatcgattgcgcagcgagaagctggccagtcaagtagtttgcctcctagcgcaagcaaccgcgaagtccatatatccttctaatagctatcctcgtgtcagacacatatacttgctccggacgaatgaagccatgaacgcaaagtactaccaagtcaatactcatcattaataatcataatggcgtatagcaataagaactaggaatagccccctttcatcttctggagtcccagaggttacccaaggcacccctctgacatccggcctgcttcttctcacatgacaaaaactagcccccatctcaatcatataccagagatctctccctcactaaacgtaagccttctcctgcactctctcaatcttatccatcatagcaggcagttgaggtggattaaaccaaacccagctacgcaaaatcttagcatactcctcaattacccagcataggatgaataagtagcagttctaccgtacaaccctaagcataaccagttcttaatttaagtatttatattatcctaactactaccgcattcctactactcaacttaaatctccagcaccacaacctactactatctcgcacctgaaacaagctaacattgatagcacccttaattccatccaacctcctctccctaggaggc

SEQ ID NO: 533925 - DNA, 289 bp, Homo sapiens
cccggtcccctgtgctttacccccttgcccttgtgtttcaggtgtggtccccgcctgcttaaagaagttgctctgttcaaccctttggtgggatcatgtgtttggaggcttttaggggacccaactgccctggggccctgcccgtggcctgggtaggacatttcccaccaaaggctggaggagtttccgtgccttcagcctgaatcaaatgtcaaaaccacccaccggtgcttcccccccttggggaaaacctgcttagttttttaaaaaatgttcccggttggtttta

SEQ ID NO: 533926 - DNA, 444 bp, Homo sapiens
cagccgtgcgaggttgccctttacagccatgaattcggttgctggcaaagactgggggatggaaccgaacagagccggggcccctttgcagttgcgattttggccctacgttttaaacgggggtcctatactggcaatggctgaagaagattttgcaatggtggcttcggatactcgattgagtgaagggttttaaattcatacgcggaatagccccaaaggttacaaattaccagccaaaccagccattggatgcagcggttttaatggagactgtcttacgctgccaaagattattgaagcaggactaaggatgtataagcattccaatattagggccatgactacgggggcaattgctgcaaggctgcctacaatcctgaattcaaggggcttctttccatactaggttaacaccataatcgtgggactggatgaagatga

SEQ ID NO: 533927 - DNA, 487 bp, Homo sapiens
ggagacaagaggcggtgatggcggtcgggggtgctggtgggagccgcgtgtcagcgggagggacctgaattgcgtcccgaaatagctgacacactatgggctgtggccaagcaggggtttgatttcctctgcatgcctgtcttccatccgtcgtttcaagaggtgagttcattcaggaacctgacattaatgaatcggacaagtttgccctggagacatttctactgttaacccttaccgaatgacggtatccagtatctccgttgattacctattcatcttgacaccacggaagattgttgctctgcacttagccctaacgaccagtagaccgatcctatgagacttggcacagagccctcaggcctaaaggatctggagaggtgacgcgaaccttgtcaagaactcacaaagcaggggaatcctgacacgagaataccctacagcaccgtgagttgttgtgccaccctggatgcacgacaaagac

SEQ ID NO: 533928 - DNA, 112 bp, Homo sapiens
ctaaacactggtaaacctctatcttagcagatcaatgcaggatctaatactttagataagttctagctctaaaagtgatagtgggactgtatgtgttctgatacggtttgga

SEQ ID NO: 533929 - DNA, 132 bp, Homo sapiens
ggccaggaatgccttcttcctgctcatgagaaacatcatcagagtggctgtcctggataaagggactgacttcctcttcctgacagtgaagtacagttttatattgtgggaaactagaaggattaaactgag

SEQ ID NO: 533930 - DNA, 217 bp, Homo sapiens
  misc_feature (24)..(24): n is a, c, g, or t
  misc_feature (28)..(28): n is a, c, g, or t
  misc_feature (30)..(30): n is a, c, g, or t
  misc_feature (44)..(44): n is a, c, g, or t
  misc_feature (47)..(47): n is a, c, g, or t
  misc_feature (57)..(57): n is a, c, g, or t
  misc_feature (68)..(68): n is a, c, g, or t
  misc_feature (90)..(91): n is a, c, g, or t
ccaacgcactagcctaatggccanctgntnatttgattatcttnacnggaaatcctnttaaaaatatntgttaccctggctggagtgcanngacgtgatcacggctcactgcagccgcagccttccagcttgggtgatcctcccacctcagtgctccccaccctgagtggctgggactataggcatgtgccaccacaccaccatgctaggctaatgg

SEQ ID NO: 533931 - DNA, 486 bp, Homo sapiens
cttgggctgtcagtgctgtgccgcattgcagcatgtcctcaacaccaagggtgaagggtccatttgtcacctggtcaggtggttacgggacattttgctatgccacgctttgaatgagtctttggataataacactctcattccgttggacgaagagctcgctacatagtcaaaaacccacagggcctatctcaactataaagtgtgcctggaccgaggtgttccagtgataaagcacttgttgtaccatttcatgaatcgaagaggtgactatgatgacccaaaggtttgtgccaacgagtttaaagaatttgtggagaatgcttgaagaaaagttcagttcagccctaaggaattctaaccttgaaatcccagacacactccaggagctgttcgccaggtaccgagttttggcaattggggatgaaaaagatcaaaccaggaaagagtatgaacttaacagcgtggatgacatccactttctgg

SEQ ID NO: 533932 - DNA, 251 bp, Homo sapiens
taacaggctcagatgggagactttcacaaaggcacagatgggacgcttcaagcatggatttgctgcaaggtcaggttgatggcggcctcgacccatgtcgacgttggccagagcgctcatggtggttttattcgccagggaaacgctgtcgttttcagtggactgcacagtgagggcgttctgccgcgcaccgatagagccacgcaccttgtccaggtaggaggccaggcggtcgttgagatcaggcatgt

SEQ ID NO: 533933 - DNA, 941 bp, Homo sapiens
tcttgaagggctataataccaactacgcaaaggcacccaacgttgtaagcacctacgggctactacgacccttcggagacgccataaaattcttcaccaaagagcccctaaaacccgcacatctaccatcagcctctacatcaccgcccgagcttagctctcaccatcgctcttctactatgaacccccctcccccatacccagcccctgggcaactgaaccgaggctcctattgatctagccagctctagaccctaggcaggtccactcaaattccgtctcgatccggtggcagcatgaaaagctgcgaagagtgacgcccctgaatcaggagaactggcgagcagtagcccataactattcttcatatagaagtgcacctcgtactcgcatgcataactcaggtatcaagcatgaactaataagtggattcctttaagccgtctccgaccttatcacagacaacctgaacgactctgatatactcctgccatcaatgaacgcttggcataatacgactacgaccgtccagcaacgtcaggaagagaacgaaagcgcagcccacattagaacattgaccagacgcgggagtccgaaccagaatgaggctacagacatcagaccacgccgagaggcgccatgagccaatcctgcaaaaacgaatacggaaacatgatacaagaacagaccctagcagagagtagtgcctggaagagatatgacgcagcaccagaggtaaaaaccgatggcacgagacctagcgacacacgaggtagaacgaaagcagcccaacgagaaacaaagccagaaagtgacagccgcaaagaaaagtagccaaaacgccccagaatccacaacaacacaagcaaaaaacgcacccgagcacacaccagaacgacccaccacacgccaaacacaacagagacaagccccactccaaa

SEQ ID NO: 533934 - DNA, 1477 bp, Homo sapiens
aacgtcaataagcggagggcggtggtcctcgaccgggaccctcctgtggtccctgggaaataatgaagatgtttcattttcaagaccagcagatcttgaccttattcagtcaactccctttaaacccctggcactgaaaacaccacctcgtgtacttacgctgagtgaaagaccactagattttctggatttagaaagacctcctacaacccctcaaaatgaagaaatccgagcagttggcagactaaaaagagagcggtctatgagtgaaaatgctgttcgccaaaatggacagctggtcagaaatgattctcttgtgacaccatcgccacaacaggctcgggtctgtcctccccatatgttacctgaagatggagctaatctttcctctgctcgtggcattttgtcgcttatccagtcttctactcgtagggcataccagcagatcttggatgtgctggatgaaaatcgcagacctgtgttgcgtggtgggtctgctgccgccacttctaatcctcatcatgacaacgtcaggtatggcatttcaaatatagatacaaccattgaaggaacgtcagatgacctgactgttgtagatgcagcttcactaagacgacagataatcaaactaaatagacgtctacaacttctggaagaggagaacaaagaacgtgctaaaagagaaatggtcatgtattcaattactgtagctttctggctgcttaatagctggctctggtttcgccgctagaggtaacatcagccctcaaaaatactgtctcaacagctggaaatataaaagatttgcaaacttctttgtttctgtctctgcattgtatgccattttatagtccacaccctgaaaatgtatttcttccagaaagtctggaggaaggacctatatttgtagaagtaaaggtatattctgtcactcagctgtattcacgtctgagcagttctgcagtaacacctgcttaaaattctccctttgcatgttttgtaaataggctccagttttgttttttaaaaggaatttattttttgcctcatcagtccacccaactgattctgaatgggagagagtctgtagagaattgattcagaaaagtgtctgtgaaagaaaaacaattattttgtcctgtttctcaaacagtgttaagcagttttgttaatagacatttttgcatcgacacttcaacattaacactttgaaagtcatggtctggtgccagatttaagaaactcgaaccacctaatatttcataaccttcttcattaggtacttgtacagattaatttctaacattgcagcagtttcatatgtgtgcaatatgtgcattctttcattttagttttgcacttggttttctataaagtacgtttttactcagttcatgcgtgaacaatttaaaaaacgacagaataaggtacaaatgtagtgtatttaataaactgtcaaccaaagaaaaaaaaggaa

SEQ ID NO: 533935 - DNA, 1412 bp, Homo sapiens
  misc_feature (9)..(9): n is a, c, g, or t
  misc_feature (11)..(11): n is a, c, g, or t
gaccacgancnctcttccgctacggctcccagaaggggccagcccgcgcctttcgcgcttctgccgtggccctctgcgggccgctccgccggtgctgtccctgggcgcctccgtgctctcagccaaccgcctctgagagcgcccactcgagcgccccgggagccagagggcgggggtcctcgccgggaccctcctgtgggcccagggggggaaataatgaagatgtttcattttcaagaccagcagatcttgaccttattcagtcaactccctttaaacccctggcactgaaaacaccacctcgtgtacttacgctgagtgaaagaccactagattttctggatttagaaagacctcctacaacccctcaaaatgaagaaatccgagcagttggcagactaaaaagagagcggtctatgagtgaaaatgctgttcgccaaaatggacagctggtcagaaatgattctctgtatggcatttcaaatatagatacaaccattgaaggaacgtcagatgacctgactgttgtagatgcagcttcactaagacgacagataatcaaactaaatagacgtctacaacttctggaagaggagaacaaagaacgtgctaaaagagaaatggtcatgtattcaattactgtagctttctggctgcttaatagctggctctggtttcgccgctagaggtaacatcagccctcaaaaatactgtctcaacagctggaaatataaaagatttgcaaacttctttgtttctgtctctgcattgtatgccattttatagtccacaccctgaaaatgtatttcttccagaaagtctggaggaaggacctatatttgtagaagtaaaggtatattctgtcactcagctgtattcacgtctgagcagttctgcagtaacacctgcttaaaattctccctttgcatgttttgtaaataggctccagttttgttttttaaaaggaatttattttttgcctcatcagtccacccaactgattctgaatgggagagagtctgtagagaattgattcagaaaagtgtctgtgaaagaaaaacaattattttgtcctgtttctcaaacagtgttaagcagttttgttaatagacatttttgcatcgacacttcaacattaacactttgaaagtcatggtctggtgccagatttaagaaactcgaaccacctaatatttcataaccttcttcattaggtacttgtacagattaatttctaacattgcagcagtttcatatgtgtgcaatatgtgcattctttcattttagttttgcacttggttttctataaagtacgtttttactcagttcatgcgtgaacaatttaaaaaacgacagaataaggtacaaatgtagtgtatttaataaactgtcaaccaaagaaaaaaaaggaa

SEQ ID NO: 533936 - DNA, 1335 bp, Homo sapiens
  misc_feature (9)..(9): n is a, c, g, or t
  misc_feature (11)..(11): n is a, c, g, or t
gaccacgancnctcttccgctacggctcccagaaggggccagcccgcgcctttcgcgcttctgccgtggccctctgcgggccgctccgccggtgctgtccctgggcgcctccgtgctctcagccaaccgcctctgagagcgcccactcgagcgccccgggagccagagggcgggggtcctcgccgggaccctcctgtgggcccagggggacaaaagtggctctcaatccagcacatgcacattgaagcaagttaaaggatttaatatgaagcacagaagcagatagtgccaaatagcaagcagtagttgttacacatttggctggaaaagcagtgtccgtgttgttatgtacacctccaaaaaaagttcaaatgtgtaggggaattgttgtgtaaagtaaactgaactgcagggtagcagtattttaatagctattatagacctgtatttactgtatttaaatgagtaaaggaacaagcagtgacacatcactaggaagggtgagcagggcagcatttccttctcccactgctgctgagatggcagaaattagtcgaattcagtacgaaatggaatatactgaaggcattagtcagcgaatgagggtcccagaaaagttaaaagtagcaccgccaaacgctgacctggaacaaggattccaagaaggagttccaaatgctagtgtgataatgcaagttccggagaggattgttgtagcaggaaataatgaagatgtttcattttcaagaccagcagatcttgaccttattcagtcaactccctttaaacccctggcactgaaaacaccacctcgtgtacttacgctgagtgaaagaccactagattttctggatttagaaagacctcctacaacccctcaaaatgaagaaatccgagcagttggcagactaaaaagagagcggtctatgagtgaaaatgctgttcgccaaaatggacagctggtcagaaatgattctctgtggcacagatcagattctgccccaagaaataaaatttcaaggttccaggcaccgatttctgcaccggagtacacgtatggcatttcaaatatagatacaaccattgaaggaacgtcagatgacctgactgttgtagatgcagcttcactaagacgacagataatcaaactaaatagacgtctacaacttctggaagaggagaacaaagaacgtgctaaaagagaaatggtcatgtattcaattactgtagctttctggctgcttaatagctggctctggtttcgccgctagaggtaacatcagccctcaaaaatactgtctcaacagctggaaatataaaagatttgcaaacttc

SEQ ID NO: 533937 - DNA, 374 bp, Homo sapiens
gtactattatctatatcatctgccctggaggcaggtcttaatcttggttgttttctgaatgggatagaccaatacccacaggtataaaatcattatctgctgttaatgatgatatagctactgctgttcctccctccatcccccctgtaattgaaggcaaagtagatagagcaggtacaggcttatatcgcaatgggtacaggctgagtaacagcttgagctttgtcgatttgagtctccatacttggaacattctggtcccaataaaagggctctacgggcccttccgagaattcacttttaggtggctcttgttgagaatcgcttagattctcatatgactgagccgccttgacatcctttacatctgcagc

SEQ ID NO: 533938 - DNA, 393 bp, Homo sapiens
agtttccatggtcctatgggatagccttcagcctctggagacccagagcttgcctgccagggcttggttctccatttccactgctgacatttgatttccagtgtatttaaattactccgtggtaaatttcattgtcttttcctgtgtaaatgttaaatgacaataccatcggtgaaggccctccacagtggacagagcaacttcctttccagcctctgctggtagcatgctgcagcttctgtgttaaaggtcctctggagctcgtgtaagacaggaagaacactttctctgtagtttctttctttccatttataatttacaaaagtaaagcatttcttagtgtctgatttaagaatgtaaagtgattctgtctcaacgtacaatacgatgatc

SEQ ID NO: 533939 - DNA, 1260 bp, Homo sapiens
  misc_feature (9)..(9): n is a, c, g, or t
  misc_feature (11)..(11): n is a, c, g, or t
gaccacgancnctcttccgctacggctcccagaaggggccagcccgcgcctttcgcgcttctgccgtggccctctgcgggccgctccgccggtgctgtccctgggcgcctccgtgctctcagccaaccgcctctgagagcgcccactcgagcgccccgggagccagagggcgggggtcctcgccgggaccctcctgtgggcccagggggacaaaagtggctctcaatccagcacatgcacattgaagcaagttaaaggatttaatatgaagcacagaagcagatagtgccaaatagcaagcagtagttgttacacatttggctggaaaagcagtgtccgtgttgttatgtacacctccaaaaaaagttcaaatgtgtaggggaattgttgtgtaaagtaaactgaactgcagggtagcagtattttaatagctattatagacctgtatttactgtatttaaatgagtaaaggaacaagcagtgacacatcactaggaagggtgagcagggcagcatttccttctcccactgctgctgagatggcagaaattagtcgaattcagtacgaaatggaatatactgaaggcattagtcagcgaatgagggtcccagaaaagttaaaagtagcaccgccaaacgctgacctggaacaaggattccaagaaggagttccaaatgctagtgtgataatgcaagttccggagaggattgttgtagcaggaaataatgaagatgtttcattttcaagaccagcagatcttgaccttattcagtcaactccctttaaacccctggcactgaaaacaccacctcgtgtacttacgctgagtgaaagaccactagattttctggatttagaaagacctcctacaacccctcaaaatgaagaaatccgagcagttggcagactaaaaagagagcggtctatgagtgaaaatgctgttcgccaaaatggacagctggtcagaaatgattctctgtatggcatttcaaatatagatacaaccattgaaggaacgtcagatgacctgactgttgtagatgcagcttcactaagacgacagataatcaaactaaatagacgtctacaacttctggaagaggagaacaaagaacgtgctaaaagagaaatggtcatgtattcaattactgtagctttctggctgcttaatagctggctctggtttcgccgctagaggtaacatcagccctcaaaaatactgtctcaacagctggaaatataaaagatttgcaaacttc

SEQ ID NO: 533940 - DNA, 859 bp, Homo sapiens
agcgaggaagccctggagaaggaccaggagaggttagaatatgaaatccagcagctgaaacagaagatttatgaggtcgatggtgttcaaacaagatcatcatgggaccctggaagggaaggtggcttcttccagcttgccagtcagtgctgaaaaattacacctggttcccctcatggatgccaggatcaatgcttacattgaagaagaagtccaaagacgccttcaggatttgcatcgtgtgattagtgaaggctgcagtacactctgcagacacgatgcaaggataatgagaaacttcacaatggcaccattcaacgtaaactaaacatatgagcggatggctttcctcgctcctttgggcgcaaatccagatgacctgaaggacccaattaacaattagtatcccacgctacgtcctctgcgggcaaggaaacggatgcacacttcgagtccgaggtcaagcttgctgcccttgcaatttcctccaaagaaactatctcggacacatacaggactgaaccgtgtgacttgctgagcagacgaagctcacttacagcaaactacctcagggcacttcttcacgcgtgcatgctccagtccgcaacatctcccctccacatcaaccaaagtgggactgactctctcgaaaccataccatccgtgagtttcacccattcttcaagacaggagtcctcgactacagcagccacgggacgggggcagagccagcggtgatggcggaaccaccaacagcagtgccctcctcgtcgaagcgggctccgatgcagggccagctccccccatgcgaggatccgggtctgcttcctcctgcctgaagacacgacatgcagcagcg

SEQ ID NO: 533941 - DNA, 339 bp, Homo sapiens
cacaccacctgagtcatttttttctcttataggaggagattcctctctagccatgtttctgttaaagcttcatgtgattgaagcccaagtttactttttactgtacatacttattttctaattggatttgaaatcagcatgattttgtttgacaaagcaaagtttaagattgaggtcagaaatactttaatggagcaaagacacataccaactttacatgacggtgtgagaaatgaccctatcaactgcatctcttcatcatttatgctctcactttagatatccaaatattaaaaggcaggctgacctgtatcacacagaattaaggcagtaattttc

SEQ ID NO: 533942 - DNA, 200 bp, Homo sapiens
aaagttgacacaagttgttgatcgataattacaagacttgtacaacagattcacagcgcctgtaaggagcctttggttggaactggtgacacctgtgacctctccggcacatgaggaaggaagtcccaccccgacatccagcagcagagagcctgtctctggcattccctgttccggtgctcccaccctcattgtggaat

SEQ ID NO: 533943 - DNA, 1028 bp, Homo sapiens
  misc_feature (9)..(9): n is a, c, g, or t
  misc_feature (11)..(11): n is a, c, g, or t
gaccacgancnctcttccgctacggctcccagaaggggccagcccgcgcctttcgcgcttctgccgtggccctctgcgggccgctccgccggtgctgtccctgggcgcctccgtgctctcagccaaccgcctctgagagcgcccactcgagcgccccgggagccagagggcgggggtcctcgccgggaccctcctgtgggcccagggggtgagcagggcagcatttccttctcccactgctgctgagatggcagaaattagtcgaattcagtacgaaatggaatatactgaaggcattagtcagcgaatgagggtcccagaaaagttaaaagtagcaccgccaaacgctgacctggaacaaggattccaagaaggagttccaaatgctagtgtgataatgcaagttccggagaggattgttgtagcaggaaataatgaagatgtttcattttcaagaccagcagatcttgaccttattcagtcaactccctttaaacccctggcactgaaaacaccacctcgtgtacttacgctgagtgaaagaccactagattttctggatttagaaagacctcctacaacccctcaaaatgaagaaatccgagcagttggcagactaaaaagagagcggtctatgagtgaaaatgctgttcgccaaaatggacagctggtcagaaatgattctctacctgtgttgcgtggtgggtctgctgccgccacttctaatcctcatcatgacaacgtcaggtatggcatttcaaatatagatacaaccattgaaggaacgtcagatgacctgactgttgtagatgcagcttcactaagacgacagataatcaaactaaatagacgtctacaacttctggaagaggagaacaaagaacgtgctaaaagagaaatggtcatgtattcaattactgtagctttctggctgcttaatagctggctctggtttcgccgctagaggtaacatcagccctcaaaaatactgtctcaacagctggaaatataaaagatttgcaaacttc

SEQ ID NO: 533944 - DNA, 264 bp, Homo sapiens
  misc_feature (76)..(76): n is a, c, g, or t
ctaaggatcctcgttttgatagggctcactaaacattctacactcactctcactgccaagaactatcaactcctgnagcaacaacttaatatgactagcttacacaatagcttttatagtaagatgactctttacggactccacttattgactccctaaatgcccatgtcgaagccccccatcgctgggtcaatagtacttgcgcagtactcttaaaacctaggcggctattgggtataatacgcctcacactcattctcaggc

SEQ ID NO: 533945 - DNA, 284 bp, Homo sapiens
atggcagtgtctctcacccagtctggaatgcaacagcgtggtctcggctcactgcagcttccacctcacaggttcaaggattcttgtgcctcggcctcctgagtagctgggactacgggcatgtgacactatgcctggctaatttttttgttatttttaagtagaggcggggttttgccatgttggcccaggcaggcggatcacttgaggccagaatttgagaccagcctggccaacatggcgaaaccctgtatcactcttttagacccttctgtcgtcttctc

SEQ ID NO: 533946 - DNA, 812 bp, Homo sapiens
  misc_feature (9)..(9): n is a, c, g, or t
  misc_feature (11)..(11): n is a, c, g, or t
gaccacgancnctcttccgctacggctcccagaaggggccagcccgcgcctttcgcgcttctgccgtggccctctgcgggccgctccgccggtgctgtccctgggcgcctccgtgctctcagccaaccgcctctgagagcgcccactcgagcgccccgggagccagagggcgggggtcctcgccgggaccctcctgtgggcccagggggacaaaagtggctctcaatccagcacatgcacattgaagcaagttaaaggatttaatatgaagcacagaagcagatagtgccaaatagcaagcagtagttgttacacatttggctggaaaagcagtgtccgtgttgttatgtacacctccaaaaaaagttcaaatgtgtaggggaattgttgtgtaaagtaaactgaactgcagggtagcagtattttaatagctattatagacctgtatttactgtatttaaatgagtaaaggaacaagcagtgacacatcactaggaagggtcagtgaaattttattcagttgagctggtattataggtttgagagacaatggctttaaagcttactgccataggctaaccatgctcttttacatttttatcagctttgtattggcggcaacattctttctactgcattaaaaaaaaaaaacgacttgttaatatgatatttaaatacagattaataggtgtaaaactttcagtccctccaaaaagtgaatacaaacatgaggatttattattacaaagttctaaactggggtattcatggcatctacagtcattaggagaagttaagttgtatgatgtgat

SEQ ID NO: 533947 - DNA, 907 bp, Homo sapiens
  misc_feature (26)..(26): n is a, c, g, or t
  misc_feature (442)..(442): n is a, c, g, or t
tgataacataacttggttcccgatanggatgatgaagaaggagaaggagaagaagatgatgatgatgatgaagaggaggaaggattagaagatattgacgaagaaggggatgaggatgaaggtgaagaagatgaagatgatgatgaaggggaggaaggagaggaggatgaaggagaagatgactaaatagaacactgatggattccaaccttcctttttttaaattttctccagtccctgggagcaagttgcagtctttttttttttttttttttcccctcttgtgctcagtcgcccggtgttcttgaggtctcttttctctactccagggttctcaatttattgggggggaaataccttgagcagaatacaatggggaaaagagtctctaccccttttctgtccgaaggttcatttttatcccttcctgtctgaacaaaanctgtttggaatcaacaccaccgagctcgttgtgggaaaaaagaaaaaccgtgttcccttcgctctgcgtggaacgctggagggtgctaggccccgtgtgtagtagtgcatagaaattctagctttttcacctccttctctcgtgtaatatggggcctcagagagtacacgtggtgtctctagtgtgaatatggacagttagctatttaccaacattgtatctgtctacttcctcttgtttaaaaaaaagaaaaaaaaccttaaaaaatgggggttatagaaggtcagcagggggtgggttcgacaatgttggggggggtaacaggggcttttggacaacagggcttccccttgggcatgttaatggctgatattggacagacatccttgcagcttaagatgacctctttaaataaattctctcctaatgatgacttgagcccctgccactcaaggggagaaatca

SEQ ID NO: 533948 - DNA, 270 bp, Homo sapiens
  misc_feature (26)..(26): n is a, c, g, or t
tgataacataacttggttcccgatanggatgatgaagaaggagaaggagaagaagatgatgatgatgatgaagaggaggaaggattagaagatattgacgaagaaggggatgaggatgaaggtgaagaagatgaagatgatgatgaaggggaggaaggagaggaggatgaaggagaagatgactaaatagaacactgatggattccaaccttcctccccttcatcatcatcttcatcttcttcaccttcatcctcatctcacttcttcgg

SEQ ID NO: 533949 - DNA, 398 bp, Homo sapiens
  misc_feature (259)..(259): n is a, c, g, or t
ggtctaagaggagacaagtatggcaaatggtcggcgtggtccctgtgtccagtcggagagccagcggactctgtacaagcgtcatgtccagatgactttcgccactggtggaaggcgggccaaagcccagcgaggtgtttctgggaccttcgtccacttggggcacccgtggaggccggtggctggcaacagtcggagttgcgtgctggcgatcgtctaggtatggtagtatgggaatgtccatacggggtagtatccnacttcagagtgcggatatgattacagcgttcttctcgacaatcaatagatgacacgaaatttgcgactagtagctgcaagtcggtttcatcacagtcgccgtagcagtatggggcaagattcatctgttcctcgcgatt

SEQ ID NO: 533950 - DNA, 122 bp, Homo sapiens
tagtcggtccgacttatcaatgccggctgacatgcatcagcgccgctgatcatccaacgccgccgactgcatccaacgccgctaagagggacggcgggggcattcgtattgcgccgctagag

SEQ ID NO: 533951 - DNA, 197 bp, Homo sapiens
taatgataataaaatccttttccctgtacaataaactgtgtatcacttccagatcagtctgacactcaccaacaaaaccaaatacatatcggtatgaggcaacacaactatttttttttttttgagatgtattctcgctacttttgtccagtttgaagtgcagtgttgtagatcttggcttactgcaacctccacct

SEQ ID NO: 533952 - DNA, 318 bp, Homo sapiens
gcacgaaccatggtcagaagcactgcactggccacttgtacacaacaggtaggcaaaacaacatgcatatggaggcaagcaattaacactcagatatactaatgacagtcacatgggtataacaattatgaacagatgaaccatattcataaagaaatacatcagaaagggaagtgtagaaatacacattactatggctggtattgtgtgcatccagctttgtaactgaaatattgtcatgaacagcagtatttttcaaacagtcatttgatgagatggatcgaaaaccgccatgggtcaccattgcatatacagtcg

SEQ ID NO: 533953 - DNA, 120 bp, Homo sapiens
tccagctataatatgcaatatgcacccacactctcctcactgcctccaatccttctctagcaaagaattgttggctatgtgtttccctttacttcctgcatcttacacagcatgtcccca

SEQ ID NO: 533954 - DNA, 184 bp, Homo sapiens
cacgagggctgtttaagtgcgatgagtgtgcaaaattgttcagccgcatagagaggctaaagcagcacgtttcctacatgcacagcaggaacgaggtggacggcgagtacaggtaccgctgcggcacttgtgagaataccttccgcatcgagagcgctctggtgttccacatctgcaggacatg

SEQ ID NO: 533955 - DNA, 316 bp, Homo sapiens
  misc_feature (60)..(60): n is a, c, g, or t
  misc_feature (114)..(114): n is a, c, g, or t
  misc_feature (119)..(119): n is a, c, g, or t
  misc_feature (158)..(159): n is a, c, g, or t
  misc_feature (171)..(171): n is a, c, g, or t
  misc_feature (216)..(216): n is a, c, g, or t
  misc_feature (240)..(240): n is a, c, g, or t
  misc_feature (245)..(246): n is a, c, g, or t
  misc_feature (272)..(272): n is a, c, g, or t
ccaccatggcctctcaaagtactgggattatgggcatgagtcagtgcacccagccacaanttgtatctttaaaaagatagcaagatggccaggtgcggtggctcacgcctatantcccngcactttgggaggccgaggcgggtggatcatgaggtcannagtttgagaccngcctgaccaacatggtgaaacccgtctctactaaaaatacaaaanttagccgggcatggtggcactcgnctgtnntcccagctgctggggaggctgaggcnggagaactgcttgagcccaggaggcagaggctgcagtgagccga

SEQ ID NO: 533956 - DNA, 113 bp, Homo sapiens
tcttttgcggtgctttccactcagctctctactagcacacctggccatagcaacacagccgggtcaaatgccacagcttcctcaccaggctccttgctcctcgtcaaactgcc

SEQ ID NO: 533957 - DNA, 322 bp, Homo sapiens
agcctctaacacctgctttgtctttagtcattcttagtaacctgctctgtccttagtcatccttagacacctgctctgtaactgtctttcccgctgaaactactcaccctgccactccagctcatacccctgccctctttaaatagccaatctgaattggcttagagtgtgcagtccaaccctatccaatagggaaaagacacaacagtagggactagctgcgttagaaataagaacactttcccctcccttgtccggtgtgatcttgccattgctccatctgcaagaccactcttccatagaagtaaatttgccttgctgt

SEQ ID NO: 533958 - DNA, 986 bp, Homo sapiens
cattatgacggtctggggggcgcggtgagtcgagcattttccgtccgcatgcccctccctgtgagctgaccgatctgctggaccgagtacgtgccgagtttccacagctcgtagttaaagggtagggcggcagtcgattgctctttagagtcagactatcaatgataatctacgcggtcacttcaatgagtcaatgggacaggaggtccagagcggtactcttgatcgactcgcacccatccggtggtgatgcctccgttgaaggccccgagggcgagggtgccgaaagcaacagtaatcactgtgtccgatattgtcatgaaaccatcaacctgcaggaaacaagtttcacaaaaagaagcctacaagaagtacatccaaacgcattaccttggaacatcaactcaacaagggacaccttgaaggaacagagaccagaacacagagtaaaaccctttttatgacaggggcctgcaggaacaaatcaagcacatcctttgctaattttcaaaaaactaccagttctttatggctgaaaaccattgatccagatggcattggttgctctatggaacctaaccgtgacggatggtgtgacccatatatgattcttaaaggatggttaccaactggcacacttgtcacaacttgtgcattatttgtgtctatcacgtgtcatcattaacttggttctggtggtcatccaaacaaaccaggacttaaggacaatgggcactgtgtcatcttgaccctcaatattggcggagtactggcggcgggcatgtctacaaaacacttgctctcgctggtcacactacaggttttaccctgggagaagcttagtagcctttaacacaacgctcgggcctgaagaagccggtgggccaccccaaaccaacgcgcccttggggcaacaccctgtttgtcaagcacacccacgtgcgtccccgggccgaaaacacaacaggcgcgttccctttccgcgt

SEQ ID NO: 533959 - DNA, 304 bp, Homo sapiens
atcagctaccagctctggttaagtcccacaactctgacttataacctcatgttcaaactttttaattttatttattttttgagacggagtctgctctgctgcccaggctgcagtgcagtggcacaatctctgctcaccgcaacaagagcgaaactccgtctcaaaaacataaaataaaataaaataaaaataaagaagaaaggcaaaatagcacagctacaggctgttctgcctataaagtagccaatatttatttctttactttcctaataaacttgctttcactaaaacaaaaacaaaaaca

SEQ ID NO: 533960 - DNA, 458 bp, Homo sapiens
ggcagactcgcctagcatcaaatgcaggaagacttgagttcctttctcaccacaatgttcttctcgcagattctgccggggccacccacagtgtgtggctaaccctgatagctgtcctgtgtcccatcgggagtgtgtattattcctgactcaagggcagggcagagacctactgcctagacctgagcccaggtctgggctgctatctagtacaagcagattgtgagaggcagagagagcacagggcagctagagagagtgctagaggaaaggagggtgagggcatgcttcttctttgataggttttctgaagactggggaaacagcattttggctgtgatctgaccccacagtggtaaatgttttgactccttctgctacatttagaacactgactacttctgtatgtgcacaacggtgttccaggtcctttagacgcactaatttacccctcacag

SEQ ID NO: 533961 - DNA, 649 bp, Homo sapiens
cttgatgtcctgcatataagggagccacataagagaactggtctagcctattagaaggtgagaggccatatggaagagaacagaggttccctgacagccacaccagctggcaggcatgtgagtgaggcatctgggatcttccagcctagtgcatgctccagacaaatacggccacatgagtgagcccaggcaaaacagtaaagagctgcccagccaaccctcagaataatgagaaataatatgttgcagtgttctaagccactagattgtgaggtagcttgttgtacataagcattaacttccactcacatccaaaaattcattgagaggccaagtgcaagaaagaaagtttcaaaaacttcattttttaaggccttagtttgaaggccgtagttgaagataaatgaaattgcttactttttggactgcgtttccctttttcatgagacccagaaacttgcagaggaagaagttccttactctcttgtgcggctgagaattaggaagcaagggagctacaattcattaatgaagcattattcttagtgtttcctggaactgcctttgagttcttgggagtaaataggctttattcatccaaagaattatacaggaaagttgctgaaaatatcactggctttgtttcttg

SEQ ID NO: 533962 - DNA, 234 bp, Homo sapiens
atctcagtgtgacttagagtgatcccccccgactagccctgacaggtggctggagctacacagtaatgctctgacagtgtggctgtgagctcacacagtaatgctctggcagtgtgtgtggagctcacagtaatgctctggcaggtggcggagcgcacacagtaatgctctgacagggggcggagctcacacagtaatgctctgtcgggctagtcgggggggtcctacgctcga

SEQ ID NO: 533963 - DNA, 152 bp, Homo sapiens
ggaggtaccaaggccgtcaccaagtacaccagctccaagtaaacattccaaggggagacaacagctatttagacataatcttttccaacagtcgtcactgctaggacactagtatcatctatgcaaaatataaccaattgaaaatgcagtag

SEQ ID NO: 533964 - DNA, 102 bp, Homo sapiens
atctgcccgcctcagcctcccagagtcctgggattacaggcatgagctatcgcgcccggcctgaacatttttgtcttaagttctaacctgttgtgttctacc

SEQ ID NO: 533965 - DNA, 249 bp, Homo sapiens
aagggtacatgagacacagcgggtagggtggggtgaagggagaaagggaaggagggtaagaaggagaacatcctttatccaacccctgaaaaagccgcaggcaggtagctgattgtccctgagtgggaacctgggtcagatgaagaaaagaaaaaagtagtggcactctcctttttacaatgaaacatgaaattcaaaccttaaagaacaacaataggttctcacaagaaaaaattgtcccaaatttgg

SEQ ID NO: 533966 - DNA, 910 bp, Homo sapiens
  misc_feature (193)..(193): n is a, c, g, or t
atggcaaggccaccgccaattatgcagtgaaccgttatcacgaaaaatactattaccgtctctataccataattgctcacctacataatgctctctgtaacttactaaacattcacatgccaagaagacacataatcgttagttattagtatcttcgttcggaagaccgacagcttctactcgctcctactcnttggcttatatcatctactccgattggatggcaatcctatacaaatgatacagcctttgaatacctacaaggagacaccaataactttccctaatttcataccaccaactaggctaaggcctcccctatggccctttaatcaattcgcaacatgataatatttatcatcatacaacaaaacaacccccgaggtacatactagcttagatactattctcttacctcatgttcaccttacttactatcatgtctcactaagcataacttagtccatatcttccgtgaggctacatcaattcatgtaagtatggactagaacttataggaattagcttggtactaggtaaagaattaccctctttaagcgaggacctccacttatggtctcccgtagaaggcccaatggtacagtatagatccccccacttagccttagtgagttctaggttaagttaaacatctgacacggcaatcttaacatcttattgataacctgaggccggcctgactcgtggtactaatttaccgtcacttcagcaacatctaatttgctttcgaaaacaccctgaatttatataacacaacaataggtccctgaagctcctttcccgttgtaattattggcctatagaggtcgttaattgtaacaaggcgtccattctggctaaagaaaaaacaggacctaaaatcgcccagtggtaaactcatttcgatcag

SEQ ID NO: 533967 - DNA, 773 bp, Homo sapiens
  misc_feature (52)..(52): n is a, c, g, or t
  misc_feature (74)..(74): n is a, c, g, or t
  misc_feature (174)..(174): n is a, c, g, or t
  misc_feature (221)..(221): n is a, c, g, or t
  misc_feature (260)..(260): n is a, c, g, or t
  misc_feature (263)..(263): n is a, c, g, or t
  misc_feature (286)..(288): n is a, c, g, or t
  misc_feature (304)..(304): n is a, c, g, or t
  misc_feature (331)..(331): n is a, c, g, or t
  misc_feature (362)..(362): n is a, c, g, or t
  misc_feature (365)..(365): n is a, c, g, or t
  misc_feature (386)..(386): n is a, c, g, or t
  misc_feature (399)..(399): n is a, c, g, or t
  misc_feature (401)..(401): n is a, c, g, or t
  misc_feature (429)..(429): n is a, c, g, or t
  misc_feature (442)..(442): n is a, c, g, or t
  misc_feature (444)..(444): n is a, c, g, or t
  misc_feature (480)..(480): n is a, c, g, or t
  misc_feature (488)..(488): n is a, c, g, or t
  misc_feature (493)..(493): n is a, c, g, or t
  misc_feature (503)..(503): n is a, c, g, or t
  misc_feature (509)..(509): n is a, c, g, or t
  misc_feature (550)..(550): n is a, c, g, or t
  misc_feature (554)..(554): n is a, c, g, or t
  misc_feature (568)..(568): n is a, c, g, or t
  misc_feature (578)..(578): n is a, c, g, or t
  misc_feature (581)..(581): n is a, c, g, or t
  misc_feature (596)..(596): n is a, c, g, or t
  misc_feature (657)..(657): n is a, c, g, or t
  misc_feature (722)..(722): n is a, c, g, or t
cacgagagaacaaggggggacaaaaaagcaggcgcgggaccgggccggaatncccgggagtccaggcaccatgngccccgcgggcccccccagccacagccgccgccggcgcccccggcggcaggggcggcgacggggggggcaggccggggggagggggcggggccgcgccanccggccgggggcccccgggaagaggggggcagcgagagggaccacanccccagggccggtccccgggaagggcagaggggggagtntgngcgcgaccacgacaacggcacgnnngaagagggcaagaagnttgattcaagcgatgagcgcaacaccntgggggccagcgggggggggggggggcgccncancactggcatggaccgaggccncatgggcaggggngncaacgagcggcgacgcctcattgtgccnccccaccggggcnangggagcagcggcctggcggggcgcattccaccggangccacccnctacntcgagggggngctgcnggagggggggaacaaggaagacaccgggcaggggagcacantgcngcgcccgccccacngcccccgcanggnccaggacggcgacgntgtccgcgaccactacaatggcaccctgctggacggcacctccttcgacaccagcgacagnaagggcggcacttatgacacctacgtcggctctggttggctgatcaagggcatggaccaggggcngctgggcatgtgtcctggagagagaaggaagattatcatccctccattcct

SEQ ID NO: 533968 - DNA, 112 bp, Homo sapiens
cccccccccccccgttttatggggccctgggggcgggggttttttcccttcccccggggggttttggggggggggggggggggtttccaaaaaggttggcccctttttttta

SEQ ID NO: 533969 - DNA, 465 bp, Homo sapiens
  misc_feature (22)..(22): n is a, c, g, or t
  misc_feature (29)..(29): n is a, c, g, or t
  misc_feature (75)..(75): n is a, c, g, or t
tctcttgaggtgggaaattatntcttaangtctaaaaccaataccaaacttccagtccaggaattccatgccaanggggggatttagcccgtttgtccaaaggattgggcacatggaatgtgcagtcacatgtttttaaattaaaataaaatgcttatattttatcactttgtgattccccattttccttggtcttttaatcatttaagagggtgttttctttatacatatatacatgcatacattacctatacatatatactgcatataacatcaaatctgacttcatggtgtttcccgaactcttttttatctctttaataatatatcttcaccccatatttaatgttattttaaattaaaacaaaattaaatattattgcttaaaaagtggtagaatgaagttctgtatctttttctccatctttcttttagaatctaataaatttagtttccatcctggtt

SEQ ID NO: 533970 - DNA, 147 bp, Homo sapiens
gcccagcacaggaaaaaggcagagaacctcttccttttgcaccatagaccatgtcctcagaaccaaagaaattatcttttgagaaaccattgtgcaaaatgaagaaaaaagccagaggtggttaaaaagaacaaaaattttgccccc

SEQ ID NO: 533971 - DNA, 171 bp, Homo sapiens
gggcgatggtcccaaccagtgatccattctcagtgtgttaccaggctcagtgaagatccttgggctttactgtgtctcttgaaatttacacagcgttctcagtctgccgggacacacaaccattgtttggctgctgacgttcaggaactgggaggcaggaaagggtgattg

SEQ ID NO: 533972 - DNA, 816 bp, Homo sapiens
gttctagatcgcgagcgtccgcccttttattttttttttccaagggtaactaactccaaaatcctttatttagtaaaattgtcacatttgatgtcaatggaatacccaaactcaagtgtgctacaaacaagaatgtacagagcatcacagcttctgggcagtgcagctcagtgcaccttgcctctcatctccccgctgaagtggcaagttcaagctttggtttacgcccagggctgcctggaacactagtgcccagcaccatttctgccaccttctgtgcccccagaagcccgcacagggctggtgaagccgtgggttgggtgaacctgggaaagcgcgtggcagctctacaaaattcttcctccgtgcccgtagcatccctccctccacccacttccaaagctgcagggttcccttaaaagttttcttaagaaaacggggcttggggcctgacttgggctggttcaccaggggctgccctgcaacgccatccatcagaggagggagggaaacaccgtgggaaaccttccaagggccctaccccaccacatctgaaccccgtgggcacgcagggaggagcactccaggaaggcgccgggcccacccccgcaggactctggctggcattgggctcaccaaggcctccagacctccgggcaattggggctgtggctcaggttgcccaggtcttggggccccaggtcgggcccctcagcaggagcctgcactcagtcagcctcaggggcctcctcacaggtcgcgagcacaggtcgtcccgagacccgggagctggatattggggatcccggagtcgcc

SEQ ID NO: 533973 - DNA, 643 bp, Homo sapiens
cggcctatgagcccttagtgtgttctgttttttttcttttgaagttgttaaattgtcgtaaatagctcataagacatactgtcttcagccactttgttaagggcaccacgttcagtaacgttaagctggtaaaacacttcataatgctgtgtggccgtcaccccccgtccattctccataggcttcctcagcttgtaaaatggaaactgtagcccacttaaaccacgtaattcccaactcctcccacgcccccgcagccacccactttctgctttctgtctctctggttttgactatttctcagtattctcatataagtggaatcatacacgtgagcttgtctttttgtgactggcttatttcaccttagcataatgtcctcaaggttcatccactgttgtgtcaggtgacacggatttccttcctgtattatacatataatggaatgttccgttacatgtgcgtaccaccacctctgttcctccatcagtgaacaccttggcttgcttcctcttgactattgggagtagtgctaatacagacacgggggtgcaaatatctctttgagactctgcctttaattcctttaccacccagagttttatctttagccaaataacccttaaagttgtttgccctttta

SEQ ID NO: 533974 - DNA, 210 bp, Homo sapiens
gccaccggaagcatttctttctaggaaaggtggagtcggtagtgagaagccggagtgcccctacagacatacaaggagattgttcactgctgtgaggagcaggtcttaactcttgccactgaacagacctatgctgtggagggtgagacaccatcaaccgcctgtcctgctgctctttggccgggtcgtgtgaccagatggcagtttctg

SEQ ID NO: 533975 - DNA, 1126 bp, Homo sapiens
gacgctgaacacggagctcaaggacaacctgaagtgacaccatgtaccaagcgctaccaccagccgggccatgagtgcttgtgaccagcgctgtgcgaccagctgcagcaggagttccacatgctgtggcagcaacaacatcacagagactggctgagacacgtgagctggatccgctcacaggaggccggtggccgtgtgttcccagacagctgctgctcttccggtggtggctctttgtaggacagcgcagaccatgcctaccaacatctacaaggtggagaggcggcttgcatcaccaacgttggagaccttcatccaggagcacctgagggtacattggggcttgtaggcggatcggcaatatgcctgtagtagcaggtctcaagagccatgatctctcacgatgcctgacctagatacaggagatctacaaggctggaggcacatactgaaccctgaccattggcgcccactgcctgcctgcttgccaacaccaaagcttacactgagccttgagacgcaacatgaatgataccaatgaggggaccatggacgcatacacacatgaaatgaaacagcaccaatccccatgatggaccaactacacacgatcaaccctccatgtggggaacacccaaaccctcaggagcgacacgcgctttaacacgcttagacctatattcctgccatcgccgacaaccaaattatggcccccagagcaacagcgtggaatggagttagagacgagcggtgacctttgacacgtagagccagaacaccacatactagagggcacataggcatctggtaggagcagcaaccacatcgtgagacactacagcatcaccgacctcgcgacgaacaccgcactagaacaacaaagaacacagaaacaccattaaaattattctgatacctcacagaccccagaatcattcccatcaacacaatctcgagaaacacaccaactaccagacccccaacaaccttcaacaacaacaatatcatgaatctcccacagcacacaatcaaacatgaccacataacacacgaaacaagacacagaaccaaaataagaacatcccacacctcatactccactcataacatcataatcacattc

SEQ ID NO: 533976 - DNA, 881 bp, Homo sapiens
gactccatctctacaaaaatatttaaaattagctcagcatggtgctgcatgcctgtagtaccagctactcgggaggccgaggcgggaggatgcttgggcccaggaggttgaggctgcagtgagccgtgtgcctaccactacaattccaagcctgggcaacagagcaaagactctgtctccaaaaaaaaaaaaaaaaaattcaagaatagcattattcattagagggtaaaggggcaaaaaaagaggggcaaagggggctcttaaaggggtatttgggatagggccaataaaaaccaggggttcccagggctcaaaatttagttattaacctatttaattttttggccatttatgggaggacctctagggaaggtctctcctccttcctcgagtggttttcccatttttggaagatggacggacaacactatcctctttaagggtttaaacaatagctcctcactctcccttctaaagaataccaaggagactggatttcatggattccacgcacgtgggtctaccaaataatttggagcatcttgtctgtccaaatataagctggtctgcgggtcaggtgttggcacccagaaacggatgtgacccggggcctgagcaatagtggtaaccgttttgcaaagaaaggaagaccgacagggacagacggcggcgggcagacgcggggcaggcacgacgggaggcggcacgacaggcgggagagacacgagcagatggagagcccagaaaagcagagacgccagggcttccaacacaacaaaagtggggcgcgaaataaactgggcccaatagagcgtgcgaccaaggtcaaacggccgtcagtgtgtcgcacagcgcaacaaagactgatcaaaacgggcaca

SEQ ID NO: 533977 - DNA, 155 bp, Homo sapiens
aggaaacatttcagcctggccaacatgctgaaaccccatctctactaaaactactcaggaggctgagacagcagaattgcttgaacctggaaggtggagggttacagtgagcagagatggcagctaggtgacagagcaagctccatcccctaaac

SEQ ID NO: 533978 - DNA, 527 bp, Homo sapiens
gcggcacgaggtgacttcctgggctcaagcaatcctctatctcagcctcccgggtagctgggaccacaggcgcccgccactacgcccggccaattttctgcattttttagtagagacggggtttcaccgttttagccgggatggtctcgatctcctgaccccgtgatccgcccgcctcggcctcccaaagtgctgggattacaggcgtgagtaaatttttgtatttttagtacagatagggtttcaccatgttggccaggctggtctcgaactcctgacctcaagtggtctgcccacctcggcctcccaaagtgctgggattacagatgtgagccaccgttgcccggctcagttgcccatctttattggctaaggagagaagggtgtcctaaggggcgtatgtgttgcaggggatctcccgtgatttggcgctagagtcatctgaattatcctccagaagaagatcttatgtttcgccatcagaggctgggaacagaacgtgatgctctggacagcctattgaccag

SEQ ID NO: 533979 - DNA, 152 bp, Homo sapiens
tttactaacaacaaagtatgcttactttatttacatagtgccacgggtttctctttttactggttttgtccttttaaaaagcttgggcaacagagggagactctgtctcaaaaaaaaatttttttcataaagcttattttaaatctaataag

SEQ ID NO: 533980 - DNA, 281 bp, Homo sapiens
ttttcctggggggtttcgaaaaccctgtttttcagtggccatttgttgtgtcccccagggggttaatgactcaaaatttggggtccttcccctttcagaccccccttttttagtttagaatttgggggacctataaaaaagtcccagaatcccctgaaagggaatggggcaggagacaggggtgttttttcccagtgcagggttgtgtttttgtgtttctgtttttgtgactgtaaatcctgccctgcccccctcccaataaaagctttggtgtataggca

SEQ ID NO: 533981 - DNA, 247 bp, Homo sapiens
atggggggggttaacccccggggcccaccccagggcccctgctttaaaaaaatgggggaaaggggcccccttttccccccccccccccgggtttggggtttggggggggggtttttccccccccacccgggccccccggggacccaaggtttttttttaaaaaaccccctggggcccccccttggcccccatttttttttggggggtttttttttttgtttccccaaaaggttccccctggggggga

SEQ ID NO: 533982 - DNA, 197 bp, Homo sapiens
ataaatatcccacatgtaaataccccatatatattgtattcctttaaaattgtacatagctttgtggcacgcgcctgtgatcctagctacttgggaggctgaggcaggagaatggcttgagcctggggggcagaggttgcagtgagctgagattgcgccattgcactccagcctgggcaacaagagcaaaactccat

SEQ ID NO: 533983 - DNA, 908 bp, Homo sapiens
  misc_feature (4)..(4): n is a, c, g, or t
  misc_feature (63)..(63): n is a, c, g, or t
  misc_feature (70)..(70): n is a, c, g, or t
  misc_feature (93)..(93): n is a, c, g, or t
  misc_feature (107)..(107): n is a, c, g, or t
  misc_feature (125)..(125): n is a, c, g, or t
  misc_feature (161)..(161): n is a, c, g, or t
  misc_feature (179)..(179): n is a, c, g, or t
  misc_feature (198)..(198): n is a, c, g, or t
  misc_feature (215)..(215): n is a, c, g, or t
  misc_feature (227)..(227): n is a, c, g, or t
  misc_feature (234)..(234): n is a, c, g, or t
  misc_feature (259)..(259): n is a, c, g, or t
  misc_feature (295)..(295): n is a, c, g, or t
  misc_feature (304)..(304): n is a, c, g, or t
  misc_feature (308)..(308): n is a, c, g, or t
  misc_feature (324)..(324): n is a, c, g, or t
  misc_feature (330)..(330): n is a, c, g, or t
  misc_feature (423)..(423): n is a, c, g, or t
  misc_feature (519)..(519): n is a, c, g, or t
  misc_feature (537)..(537): n is a, c, g, or t
  misc_feature (553)..(553): n is a, c, g, or t
  misc_feature (648)..(648): n is a, c, g, or t
  misc_feature (731)..(731): n is a, c, g, or t
  misc_feature (733)..(733): n is a, c, g, or t
tttnggaatggccaccctggtgtttgcatattggccccactgttacttttgggggcttcccgntctagcnacaccctcggatggaaagacttnactgcataaagatntcagttctccctaagttnatttataggcttaatggtcaccctaaaaacacccanatatgcttttcgatgganccagataagttcacgctcnagttcttatggaaaaanacacacgctatngctaggnaaaaacagggagagaagagttctgngcagggcctagtcttagccaatatttacacatactntgaagcctntganacttaaacagcatggngctggnacgtaaatagacaaatgaagttaggtggctctttccgaaactctggggaaaaaagtagtaaaaagctaaatgaaatcaatcagaaaaaaaaanaaaaataaaagagccaaagggcctccttggtggtaaaagagggttgcatatcttgcagccagaaggcagagaaagtgaagaccaagtccagaactnaatcctaagaaatgcagnactgcaaagaaattgntgtggtgtggtgtgtgtgtgtttaatttttaaaaagtttttattgagatacaagtcaataccataaagctctcacccttctaaagtgtacaattnagtggtgtgagtatattcataagatttatacttggtgtctattcataagacttatatccagcatattcataactagagccatntnacagatgcattcatcataataattccagacattttcatcaccctaaaaggaaaccctgaaacccattagcagtcattccccattcctccaacccattctctccctaatccctagaaaccaccaatctactgtgtatttcatctattgccaacatttcatataaatggaatcatac

SEQ ID NO: 533984 - DNA, 460 bp, Homo sapiens
gagacgggggtctcaccggtcgccagggagggtctcgatctcctggacctcataatccggccggcctcggcctaccaggagggctggggataacagggcgtgagccaccgcgcccagccgaactttctggtttaaacaactggacaaatggtttactcccataaaaaaagccacaagaatccccatatatgctattcccttaggaggtaagggatacctgaattcccaaggaatatgtccttggtcacttctggctaaggctacaataagtagaacatctgagctggtataatggaatacatttctattgggcatttaaaaaactacgggggagtcttctgtctggtataagcatttactttggaattaaaactgggtatcaagtttattccctaaaacttttacacaaattactatggtcactcgagtcataagattttcttttttaacttatagtgca

SEQ ID NO: 533985 - DNA, 948 bp, Homo sapiens
  misc_feature (4)..(4): n is a, c, g, or t
  misc_feature (63)..(63): n is a, c, g, or t
  misc_feature (70)..(70): n is a, c, g, or t
  misc_feature (93)..(93): n is a, c, g, or t
  misc_feature (107)..(107): n is a, c, g, or t
  misc_feature (125)..(125): n is a, c, g, or t
  misc_feature (161)..(161): n is a, c, g, or t
  misc_feature (179)..(179): n is a, c, g, or t
  misc_feature (198)..(198): n is a, c, g, or t
  misc_feature (215)..(215): n is a, c, g, or t
  misc_feature (227)..(227): n is a, c, g, or t
  misc_feature (234)..(234): n is a, c, g, or t
  misc_feature (259)..(259): n is a, c, g, or t
  misc_feature (295)..(295): n is a, c, g, or t
  misc_feature (304)..(304): n is a, c, g, or t
  misc_feature (308)..(308): n is a, c, g, or t
  misc_feature (324)..(324): n is a, c, g, or t
  misc_feature (330)..(330): n is a, c, g, or t
  misc_feature (423)..(423): n is a, c, g, or t
  misc_feature (519)..(519): n is a, c, g, or t
  misc_feature (537)..(537): n is a, c, g, or t
  misc_feature (553)..(553): n is a, c, g, or t
  misc_feature (573)..(573): n is a, c, g, or t
  misc_feature (575)..(575): n is a, c, g, or t
  misc_feature (590)..(590): n is a, c, g, or t
  misc_feature (688)..(688): n is a, c, g, or t
  misc_feature (771)..(771): n is a, c, g, or t
  misc_feature (773)..(773): n is a, c, g, or t
tttnggaatggccaccctggtgtttgcatattggccccactgttacttttgggggcttcccgntctagcnacaccctcggatggaaagacttnactgcataaagatntcagttctccctaagttnatttataggcttaatggtcaccctaaaaacacccanatatgcttttcgatgganccagataagttcacgctcnagttcttatggaaaaanacacacgctatngctaggnaaaaacagggagagaagagttctgngcagggcctagtcttagccaatatttacacatactntgaagcctntganacttaaacagcatggngctggnacgtaaatagacaaatgaagttaggtggctctttccgaaactctggggaaaaaagtagtaaaaagctaaatgaaatcaatcagaaaaaaaaanaaaaataaaagagccaaagggcctccttggtggtaaaagagggttgcatatcttgcagccagaaggcagagaaagtgaagaccaagtccagaactnaatcctaagaaatgcagnactgcaaagaaattgntgtggtttggggtttggggntntggtttggggtttgngggttgggtgtggtgtgtgtgtgtttaatttttaaaaagtttttattgagatacaagtcaataccataaagctctcacccttctaaagtgtacaattnagtggtgtgagtatattcataagatttatacttggtgtctattcataagacttatatccagcatattcataactagagccatntnacagatgcattcatcataataattccagacattttcatcaccctaaaaggaaaccctgaaacccattagcagtcattccccattcctccaacccattctctccctaatccctagaaaccaccaatctactgtgtatttcatctattgccaacatttcatataaatggaatcatac

SEQ ID NO: 533986 - DNA, 211 bp, Homo sapiens
tagcagtgacagttttagtagtagcacgtgctgttgggacattcgcagtagcctggattgcagacagttctgtgaggcagcctagtttgcatatgaatgctgctgcagcttcccgagacatcacctatgtttcacgctatggatacatagtatagacacagctatgatgtgagcagtgccattagtgtcttagtaccagtcgaaggagctg

SEQ ID NO: 533987 - DNA, 140 bp, Homo sapiens
ccattcccatcgggctgtctgcctgtcgcaattgggaaagcgccgggagcaactgaactcggcaggcgcgtgttcgtgaagcctattgaggcatgggctcgcttttgcttttggtgccgcacgcccgcagttctttgccc

SEQ ID NO: 533988 - DNA, 110 bp, Homo sapiens
ttatgatgagtaggtgatggtttcgataataatagtatgtgggataggtgtgtaggtgtgcgttgtggtaatgaagtgtgctaggtgatttttaatctatagagcgaaag

SEQ ID NO: 533989 - DNA, 287 bp, Homo sapiens
cacgtcgcaaagctcattcacgtcgcaaagctcattcacgtcgcaaagctcattcacgtcccaaagctcattcacgtcgcaaagctcattcacgtcgcaaagctcattcacgtcgcaaagctcattcacgtcgcaaagctcattcacgtcgcaaagctcatttaactttttttttatattttatttttttttttttttttttttcccccccccccaaaggcctctgggcagggggccccccgctgcaaatccaaaaactgggtaaatcttgttcccggggaaaaatg

SEQ ID NO: 533990 - DNA, 217 bp, Homo sapiens
  misc_feature (24)..(24): n is a, c, g, or t
tcggtacctgatagactggcatanttccactcaatccaaaaacaagcatcccagagctgaatatttaggtgaaaatatatcaggaatgggaggcattcaggtttaattttcatgttttggtagagttaggatgtgagttttcatttaaaaatattctttattttttttgctactattgtggtttctgtattgttactatacaatctgtcaatcataa

SEQ ID NO: 533991 - DNA, 350 bp, Homo sapiens
aagcgcagaaggcgcgtccttgtgttctcatcattctgcccccacttatacgtgagaacatgcgttatttggttttctgttcctgcattagttagctgaggataatggcttacagccccattcatgtccctgcaaaggacatgatctcattccttttaattgctgcatattattccatggtgtatatgtaccacattttccttatccagtctaccattgatgggcatttaggttgattccatgcctttgccattgtgaatagtgctttgctactgtgaatagtgctacatacacatatctttataatagaatgatttatattccttggggggacgcgccatcgtgcgctt

SEQ ID NO: 533992 - DNA, 1230 bp, Homo sapiens
tggggttgggaatctcgttcttctctttgggtataaaggggggaaaggacagtgtggagtggcgggttacccccagggtgcaggggaggcatgtgcaggacagccccagacaggcaggcgcgtggaacggccggtggggaaagagtccgtggagttttcccaacaatcctttatctctctgtgcaagggacacaggacaaccgcgtggctagtgcacgagggggtgtgggagaagagaggcaagggccccgtgggagacgggggcgggggaggccacggggcgcgtgggggcactcaccacataccagtggcaacagtcacagttggcgccacagagaacctccaggtgggctcttctgagaaaacgcggaccacaagtgtacaaacaataaccaaagagacaacgggccaaggcgcgcacaccatggcgggaagagggccccggaatcccccataagaggtggggggggctacagaaggcctgtgcgcggggccccccaaaagagaaggtccccccaaaggcagagggaaatacaaagcaaagtgaccacacggcaccggggtggggtcccttccaaaggggaaaccccactgggggcactggggcgagagggagacacgagagtgcgggtcaatccgaaaaggggaacagggcaagcgggaagaagcctcagagaaccagaagaggggcccggcacaagagcaccccaagagccaagcctagaaaaccaaacacccagtggtcgccggagggccccgaggcggacccaaagaaccatatgcggatggtggggccaaatatggagatgatacgggaacaccaagaaggtgatccccagggacatggaaaaaactccggagacaaaccacacactcgaagaggacacccggaagaaccaacggggggtgcacaacagcacaaagggggtcaaaagtggcgcccggaacaaacagtagcttcacacccgggccccaggagagacacgaggcacctgcaaagagagggcagagggcacccgcatataacacacggcacacacgggaacggcatggacccgagtatacgaggcggagtaaaaggcgaacaagaggtgacaagcaccgaaaaagggagtacgacaacaagcgaaaaaagataagatagagatgacccaggagaaagccgagagaaaagacacaaagtagagaagacaaagagaagaaaacgacacatagaacacaggaagagaa

SEQ ID NO: 533993 - DNA, 302 bp, Homo sapiens
ccctacgtaagcccgcagagcacagcacctcaccatggactgaacctgtaggatcctcctcttgatgacataagctacaggctctgactccgaggtccaactgctacagtcatgagctgagttgaacaggcctgggctacatggtctcctgctgggtttctgtatacaccttcaccgactactacatgcgctgaatgcaacgaccccctggcgcatagacgttgcagcgcagagtcactatccgcgctcacgactacagacacagactacatggagctgaccagtctgagatctgaggaccg

SEQ ID NO: 533994 - DNA, 431 bp, Homo sapiens
ataacaaagttattctttttgttaactgcatcatactgcattttgtgaatgtcccccagttgttttcagctggtcccctgttcaaggctacatgtttattagtgaagacttggaactgtactatatttttcttggtatattttggtgtacaatttgtacaatttagttgttgaatatcatcttttttttcccctctgaaatgatagtttagctgggtatacgatttttgggttgtagtccttttgttttgttggtcaatagatattgtgcccacttttatctagctactggtattgcagttgagaattccaaagccaatagtatatttttccctttgataggagaaatcattcgatacaatgagagcatgtaaacatgaggtttagagaaaaaagtaaaactataaaattacttaatcacgtcaagaagaa

SEQ ID NO: 533995 - DNA, 122 bp, Homo sapiens
cattagacacggtactgtgtgaaccttggatttttctcctctgccccgagtcgtcgtctgctttcttttttgggtttcttctagaagattgagatgtgcatatgacaggctgagagcacctc

SEQ ID NO: 533996 - DNA, 205 bp, Homo sapiens
aggggggggggggggtttgccccttttttaaaacccccctttttttccctttggtgccccgcggacttttttttagggggtggcccccggaattgggggtttttgggggggtttttttggggggtgggcctttaatttacccgggggattttttttgttgggtttttaaaggttttttaaaaataaactttttttggccccccga

SEQ ID NO: 533997 - DNA, 509 bp, Homo sapiens
cagagcgctattgtgggacaataaccccccataatcccagcagccacagagccatgtctgtgcatcctcactggtcctgggaggccacagccaccgtttgcagctccagcctcttctggatgtctgtcagcctccgactcctcatcctcagtttctctggcatagtgctctcccagtgacgggcaaggccctgtgtctgcccctgtgcttccgtccagctcctggttctctgagacagatgcctctccctcctcagttccacatcccgcgtcctggtttgtcagcccctccccgcctgcctctgggacttctgatagttcagactctcggtctctttcagcctcagccgccagggtctggcctcccgcagtctcctcctcctcccgttgctcgccatcggctgaatcctcctgagtatttcctctctccatgtccatactcgttgcgtttacccaggctccttgaaagcctcggaggcctcagtttacagaccccgtgtgctgggactg

SEQ ID NO: 533998 - DNA, 462 bp, Homo sapiens
  misc_feature (78)..(78): n is a, c, g, or t
  misc_feature (459)..(459): n is a, c, g, or t
gatgctggcgctttgggccctgccaatgagctaaagcagtgtataattaagggattgcgcaggcttccttccccaggncaaagcagcgcgcataataattgaataaatgtcatcttacagcaataattacctgtggataatagattatattattggaagggcacacacgcttgctgccagccacgttattcttggtgggctgcccacttctgctcagaattgatgagcatcatgccagcgaagaagagcttgagcctaggaacgcaatgatgggcttggtgtcatttggagagaatgatgggctcatctttaccagcactgggcctagtgtctggaacaactaaaagaaaaatgccaatctcttcccagctcacgtaatttaaatggtgcctgtttaaatttcaggccaagtaatctagctgaacatattcctctagcaccagaaagctgaataaaagnaag

SEQ ID NO: 533999 - DNA, 110 bp, Homo sapiens
taatacagcaaataactttgccacaggcagcagcccaaagctcaagcaccccgcaacaccagcagcagctcactcaagcaaccagctcaaacagcagcaccaccacgtct

SEQ ID NO: 534000 - DNA, 915 bp, Homo sapiens
ggccaggcatggtggctcatgcctgtaatcccagtacttagggaggccgaggtgggcggatcacttgaggttaggagttcgagaccagcctggccaacatggtgaaaccctgtctctactaaaaatacaaaaaaaaaaaaaaaaaaaaaaaaaaaaaatgggggggggcccgggccccggaaaagttttcaaaaccatcggtatggggcgccgcgggggccccgagtagggcacgagagacagtggcccaaagcgtggtcttcccatagaaaaccgcggccaagaacaagggcggggattccacaccataaaaaaaggcccggggggcaaccggagcgttctggaaacaactccgaaagggagatcgggaaggccataacgggggactctaaacaaaagggggaggcccaaagggagacgccagagaaaataaaattaacgccccgccgtgtggagacacacacagcgagcggacaacatacacgacgacatccaagcagacaagacaacagccaagagcgaagtcacaccacaatgaccagcaaaaaacgagcaagagcgacaaagagagcaagagggaggaagacgaggagaagaggagggaggcgagagcacggcaggcgaacaccggagacaggcaggaggacggaagaggaacgaggagacgaggagaggagagacaaaagagagaggcgaacagacaggagtccagcaggcgagccagccaaggagaacgggcgacagacagcacagcacgacgcgccacgaccagaacagagcggcagccacagacagggacggagacgacaagcggctaccagcagaggacgagcacaacaacacaggaaagcaaagagccagaggcaagacacaagaaacaagagacacaacgcccaaagcgaaggacacaccgac

SEQ ID NO: 534001 - DNA, 193 bp, Homo sapiens
gacgttgtggtgtcttggccgggcacgatgatctcacacatgtaatcccagcactttgggaggccaaggcaggtggatcaccaggtcaagagttcaagaccagcctggccaaaatggtgaaacctgtctctacaaaaaatacaaaaaaaattggccggcctggtggcagcgacctgtaatcccagctgcgtgg

SEQ ID NO: 534002 - DNA, 174 bp, Homo sapiens
cccgcgtacagttgcggctccagctccggacgtccctgctcctggcttttgcctgttctgcttgcctggtttcaagaggctggtgcggtccaaacctgttcctgctatccaggctttttgaccacgcctatgttccaatgcccaatcgcgcgcacctagttggcctattgacac

SEQ ID NO: 534003 - DNA, 488 bp, Homo sapiens
  misc_feature (18)..(18): n is a, c, g, or t
  misc_feature (46)..(46): n is a, c, g, or t
  misc_feature (64)..(64): n is a, c, g, or t
cctgaaataaattggccntcttgtaaacttaagtgtgtgtaccttncccttttcccaacccccnagatatagtggaagagaatgacccttccttagatggtcaccttcctatgcttttaaaagggtatgcatgaaagctggaaagtctcccaacctgaactgttttaaaaaacaaagatgcccagctgggcacctattgctcctcaccctgtaaatccccaacactttgggaggccgaggaagaaggatcacttgaggccccaggagttcgaaacccagccctggtcaacagagcaagacccctatttgtacaccccaaacaaaaattagcccaggtgtagttgtgtgcacctgtagtcctagctactggggaggcagcggtgggaggatctcttggcaggagttcaaggtttcaatgaaccatgattgcaccaccgccctccagcctgggtaacagcaagactttgtctctaaaaaaatgaaatgaa

SEQ ID NO: 534004 - DNA, 299 bp, Homo sapiens
tccatcccccacgcgtgtgcatccttttttgtgttcatcccttccggtggccatccccattagtacagatggcttgctgacggagaggagggagattgtttgacatagtatgaggaggactccgtaccctactgcttaagggactaatggggatggaccatggttgtaagggtggctaagtacaaccataccagctaaggggacctgggagatgatggcttatttccacccgaccctaggatttccagagcgcacttccacaggcctggacctgggatgattataaacgaagggggatg

SEQ ID NO: 534005 - DNA, 182 bp, Homo sapiens
tttcaaattcctagctcagcaacctcctgccttggcctcccaaagtgtagatattacaggtgtgaaccactgcacctggcctgatagggtgtttctggtgtcaataatgtattaattttctgttgatgccaaaacagattctcacaaacgtttagcagcttgaaacaacacataatggggta

SEQ ID NO: 534006 - DNA, 148 bp, Homo sapiens
ctaggtggaagcgacgtctaggtggatgatgtgtgtgtgtctactaattacaaatggatcactctgcagaagtactgtgaaggcaaacaaaggaattactacaaaaccaaacagacacaacggaggctcagaccctgctgcaaccccc

SEQ ID NO: 534007 - DNA, 530 bp, Homo sapiens
gaattcactagtgattgtgagctgagatcgcacccggcctttttcttttttgagacggagtcttgctcctgttgcctaggctggagtgcagtggcgtggtctcagctcattgcaacttctgcctcctgggtccaagcgattctcctgcttcagcctcctgaatagctgggattacaggagcatgtcacccatgcctggcttatttttgtttttagtagagaaggggtttcaccttgttagccagggtggtctggaactcctgacgtcaggtgatctgcccgtctcagcctcccaaagtgctgggattacaggtgtgagccaacacgcctgaccagataatcaattttcattgacctaatgacttttcctcttttaaaaaaaaaggaaatagggtctaaccctaatgcccaggctgaagtgtagtgtgcaaagccccaaaaagctgggcttaagaatccgcccatctcagactacaggcatttgcacccaatccaggtacatcagcatattcgtaaacgcaaaatgttgct

SEQ ID NO: 534008 - DNA, 525 bp, Homo sapiens
gattggagaagtctcttcctcatctgttcgatatggagatattaaggggcgtattccttcacgcaagcaaatgagctttcaaaggtagtgaaccagcaggttcttggtggcccacttggtccccctcaggtaactataaaagggttttccatgccagattcaattagcagagcctccccgacaatggcccaatgtgtcaaagctgtcccaaagggggccccggcagtaaaggaaccctccatatggtgaaggtttttctagggtcccagttttgccccagataattaatgggcacctgtagggcggggatcctttccaggtttttttttttgtaaaaaaaaataataataatttgaatcaggtaatatttaggggtatactatgcctttttgaaaatgaaattggttatcccctttgcagtttgaaaaacatgtattgggggtaaaggttaaataacaaaactatgcagaggtttttaaaagcattgataacctttgtggggaacataaagggatcctttattta

SEQ ID NO: 534009 - DNA, 157 bp, Homo sapiens
tgtctcagtccggggtgaggatgctgggacacgatgaggacaagactcgcatctccatcaggggggtgcctaggggaacggtgtgccttttttgactgaagaggagcttagtgccgttctacagcagtgctggcgggcggacgtgtccggcatggac

SEQ ID NO: 534010 - DNA, 636 bp, Homo sapiens
gacaatcgaccggaacaatggcaggacaaggctggtgggaatcggacgagggcggaagggcgggagcttgcgtgctgctgggcctgagctgtctgtctcgtttctgtcgcgcgcctgcatccggcccgggcgccgctgaggtcgcgaggagccacagggctgactggtctgctgcccgggccaggagtgctggtgtagcagtcgcggagccatcccgggtctgtgcatgacgatctcccctcagaggagatcttcctcagcggtggctgcagagacagatgagcggggctcctggccgcgggacgtgagacgggtcgtggccggccatttagggggacgctgcgacaccgctgcgcccctccggactggttccttgggccccggaagctcgcgggggccctgcgggaggcggcattgctcccggcggagggcctggcttggccccgccccttgggctttgggccggggggaaccgccggggggcggggggggcccttgctggcgctttctggccaatcagtgccgcttcgtcacgggcctgcgcgtgcggcgcgcgcagcagatcgcgcagtctacggccgctctactccgagagctcacgccgcgtctcctcggcgctctgcgccggtgcacggc

SEQ ID NO: 534011 - DNA, 479 bp, Homo sapiens
  misc_feature (34)..(34): n is a, c, g, or t
  misc_feature (111)..(111): n is a, c, g, or t
  misc_feature (134)..(134): n is a, c, g, or t
  misc_feature (161)..(161): n is a, c, g, or t
  misc_feature (181)..(182): n is a, c, g, or t
  misc_feature (319)..(319): n is a, c, g, or t
  misc_feature (351)..(351): n is a, c, g, or t
  misc_feature (358)..(359): n is a, c, g, or t
gacgctctctctgtggggcgccccaggcaccagngcgtgatggtgggcatgggtcagaaggattcctatgtgggcgacgaggcccagagcaagagaggcatcctcaccctngaagtacccccatcgacgcacgntgcatcgtcacccaactggtgacgaancatggagacaaatcctggcnnaccacaccttctacaagtgagccgtgcgtgtggctccctgagtgagcacccctgtgcgtgctgacctgaggcccctcctgaaccccaagggccaacgcgcgacgaagatgacccagaatcatgtttgagaccttcanacaccccaagcccatgtacgttggctatccanggctgtnngctatccctgtaccgcctctgtgccgtacccactggcatctgtgatggactccgtgtgacggggtcacccacactgtgcccatctacgaggggtatggccccccccaaagagagagcgtt

SEQ ID NO: 534012 - DNA, 258 bp, Homo sapiens
ctgcacacgaagctggcgtgcgctcgatgatgtggtgattttagcggttggtggcacctccacgtcagatgggacgctcaatacctaagggggccacgaagggctcttcattttcctctaaattttcgggctcatttttttctctctgtttggaaggctcctcctcctccgtctggtctgacgggtcgtaatagtcgctaccgtaagtgaaccccacgggatttgtagctcccatcctctgcgtagtggtttactcga

SEQ ID NO: 534013 - DNA, 220 bp, Homo sapiens
ggttctcgaataccgaacgtacacactattttttcatcatcagataccctcttttcttgtgggaaagtcctccctttgtagccttatgggcttctccgtgtgcacagtgtagcttcaatgagtgaagagtcgctacctgttgtccctgtagaggactagtagtcagtccattaatcttatcttcttgccctggtgccaggggaggtagacggctgcagta

SEQ ID NO: 534014 - DNA, 125 bp, Homo sapiens
tctagaggatggttggtgcatgcatgtgaaggacatattttgtatttttaacatctttaatgccacacaaaaataatcatatggaacagccccatcccaagaaactgagtcggtctcagacctag

SEQ ID NO: 534015 - DNA, 201 bp, Homo sapiens
taaggatagtacaaggaaagggtaggctatgtgttttgtcaaggggttgaaaatgaatgtgaagcgtattataccataaccggctaattttaaaaatactggggcaagtactattgacccaacgatgggggcttcgacatgggctttaaggaatcataaatggaatccctaaagaaggatctttactattaaaactattgg

SEQ ID NO: 534016 - DNA, 450 bp, Homo sapiens
  misc_feature (177)..(177): n is a, c, g, or t
  misc_feature (251)..(251): n is a, c, g, or t
  misc_feature (358)..(358): n is a, c, g, or t
  misc_feature (365)..(365): n is a, c, g, or t
  misc_feature (399)..(399): n is a, c, g, or t
  misc_feature (420)..(420): n is a, c, g, or t
  misc_feature (439)..(439): n is a, c, g, or t
ttttgtagacctgggatctcaccatgttgcccaagctagttctgaactcctggcctcaagcagtcctcctgcctcggcctcccaaagtgctgggattacaggcatgaaccaccatgcctgggttgttcttttggtttttttttttttttgagatggagtctcgccccgtcaccaggntagggtgcaatggtgtgatcttggctcactgcaatctctgcctcccaggttcaagccattctcctgcctcagtntcccgagtagctgggattgcaggtgcgcaccaccacatccagctaattttttttatttttagtagagatggggttttggccagggatgggctcaatttcctgacctnatggatnccgccttgccttggccttcccaaagtgctggggntttacaggtttgagccaccgnaacccaggccgtctggggnaacagagcgat

SEQ ID NO: 534017 - DNA, 315 bp, Homo sapiens
ctggggatgactacatgaccatgcagatgagttgtccccgtctgagctacgtggacacctcgccagctgcccctgtaagctatgcttgacatgctgaacaggcatatgctgcagcaggaggtgagcctgcccagggacaccatggcttgcttgctcctcatcctcagcagcctctgcttccccgacttgggcctcaatggtggcagcatgagctgtgctttccactcgtccctgctgcgtggcccacaaggacctgggggccatgagcgccttacaccgggtgaacctacagtcctaaccgcaaccagagtgcca

SEQ ID NO: 534018 - DNA, 781 bp, Homo sapiens
  misc_feature (725)..(725): n is a, c, g, or t
ctggccgatcaaggtttattttgtcaagggtgaggacgcatgcccatgacacagcctcaggaagtcctgatgacctgtgcccaaggtggtcagggcacaacttggttttatacactttagggagacacaagacattaatcaatacagtaagaagtacactggttttgtccaaaaaggtggggagaacttgaagcagggaggggtcttccaggtcacaagtaggtgagagacaaatagttgcattcttttgagtttctaattagcttttacaaaggagccaatcagaatatgcatttacctcagtgagcagagggatgactttgaatagaatgggaagcaggtttgctctgagcagtttccagcttgaattttacttttaacttaaagattttgggggcccaagatattttcctttcacttaacctatacatacctctgatacctacgtgttaataactagacacatgctgaaatgtatcaagcctgatattccccatcttttgtagggtggcgtgatccactgtttattatttatttttggtctcgtttggtttcgttatatccctatatctccactactcccccctctcataccttcttctccttctccattcctctcacgctcaatttctcctttattatttttatccgctttgtttgtctttatctatcatagcaccgatatttttttattctctcctccccccgtctctcgatctctctcntcctctctctctcactgtaatacttttcttttttaaattacaccacttttcacatg

SEQ ID NO: 534019 - DNA, 972 bp, Homo sapiens
ataatcacttgttccttaattagggaccttgtatgaatggctccacgagggttcagctgtctcttacttttaagcagtgaaattgacctggtcccgcgaagaggcgggcagtgacacagtcaagacgagaagaccctatgggagctttgattaatataagtgcacacaggtacctaacaaacccacaggtcctaaacattaccaaacctgcattgcaaatttcggttggggcgactcgagagcagtaacccgaaacctccgagcagatacatgctaagaccttcaccagtcaaagcgaactactatatttcaggttgatccgaataacttgaccaacggaacgaagtttaccctagggatagcagctcaatcctattctagagtccatatcaacaatagggtttaagactcgatgtaggatcaggacatcccgatggtgcaggcgctattagaggttcgtgtgtcaacgattaaagtcctacgtgatctgagttcagaccggagtaatcgaggtcgggatgctatctacttcaaattcctccctgtacgaaaggacaggagaaataaggcctacttcacaaagcgcctgcccccgtaaatgatatcatgctcaagttagtataataccgcacacccacccacgaacaggtttgtaacgatggcagaggccggtaattcgccgtaacttagaacttacggcagaagtcaagtctctattaacagatacccatgggcagctcgtaatcctgatggtccgttgtaattcgcatggaattctaagctacgaagaaacatgggtaataagtgacgcaagcccagttgggcccgtgggtcaagccttggggggaaattttcagagcgtaaaggaattgaaacttaaggcgccattgacatttcttaagcgccgccaaggatctggtgatacagtatatagaaggtgacagggaagaaaggaacggagtcttaagagga

SEQ ID NO: 534020 - DNA, 350 bp, Homo sapiens
taacgcatttcctagcttaggatcaaagtagattgctttagattttgaaagttgaataattttcaaaataattttagtaaggtaagatttccctctacctgttttacccgtaatcataatattagggctagttgtgctggtggatccgtctaaaatttcgttggtaatcaacggattaaaaaagaccaagcgctttgaactatctaatgcgtcctggggtactattggcaactgtttttggtgcaccacgtccaatataaaagccaatgttactaccaacttgctgattgacgcaaacaacaactcacgatacctcactggtcaataattgcaccaatagcggtttcggg

SEQ ID NO: 534021 - DNA, 311 bp, Homo sapiens
catgcagtagctcctctccatcactgcctccctacccgctgattattcttcataacctttacaccatctgacttaaaaaaaaaaaaaaaaggaaaaaaaaatatttaggcatggcttaaaataaagacaaggataaggggcagagagcccaatttgggggaaagagaaagagaggacaaaaaggcaaagcgggcctctccccctctctgcttcacccatgcaacagattaaatataaacaaaaggctacctcttaacagcacaaacaacacggggaaattcttccctgggaggtaatggggcttggggtac

SEQ ID NO: 534022 - DNA, 185 bp, Homo sapiens
agccccctccctgggtttgagcctggggtggtttatgtaaatggggatttttttgggggatttatctttgaagggcccccacttcagaattgcctgggtggggccagtttttcccaccccgaaaaatttttaaacattctccaggtggcccctctcaattaaaggattcttgctgcccccccata

SEQ ID NO: 534023 - DNA, 395 bp, Homo sapiens
aaaaaaaaaaatgaattttaaccccccccccttttagggaaaggggggggggggcttataatggggggttttttttccgggaacccgtttatatgccttcccaaaaaatttggaaatcaggggggggccctttgccccttagccccaaattttttcctttgggggggggttaattaggggggcggtccttaaggaggggggggaaagggagggggttcccccccccccttttgttttcccctcttgggggaaaagcgggccggggttttcccctcccccccccggggggggggggtttgggggggggggcccgcccctgggcaaaaatgggccggggggtttgcccgggggggggggaaaaaaccggggcggggaacctttgccctttcggggca

SEQ ID NO: 534024 - DNA, 712 bp, Homo sapiens
gatcgacgtgggtgagcgcagccactcaggctgatcgtgggtgtggggctgtaggggaaagttgcttaaagctcgtgtgatgatgctggtggatcaggcctgataatcccagctacttttggtgatgtgcctaaaggccaaagtgcagttcaccatgaaggggaccggggaggtacaaagacctggcgctgaaactaatcatgtgagtaacactcctcgagtctgctactaagaagaatacgagaaactatggactaggtcattgagtgatgcagtgccaatgatagatcccaagcgtaattcgcgtgggcggtgaaggcaattgagagagttctgcgttatattccggggaggtcccaggttgcttgttacgcctggagaatcgacgaccgttcctcagcctgggataaccaagagagggaaagctccggtctcgaacatataaataagactaaaatctccaagacagaaaagcgtactacatgaggtttatcaactctgggcactggtgcattcattagaattcacatcgaacaagaaaggatgatcctgggtggagcttcataaatgttttcccccatccctttgaggtggagtcctcgatgacaaccttagtgttccagcgtcatggaggtgacctgggcgagtacaatacgttggccgcagcccggaatgtccattttaagccttgccctagagggtcctgtgccct

SEQ ID NO: 534025 - DNA, 938 bp, Homo sapiens
gggcagcgaacaacacgccgatggggattattcggtctcttctcggggtcgttcgaagttttctgacaatattggcgcctctctcatcaatttgtgtttggaatgtatgtccctgcacatgctataactacggcgacgcttcccataatggcgagccgtgtcctcgaactccgaggccctttcgggggccccccacggcgttggatccagcgcacgtacctcttggctggccaagggataccggctcttggccgtgtggacttcatttccgggccccgtcactgccattctgagggttttgaatcgtcgccggctgtcttattattgcgcggccacctttttgctcctggagggcaaccaacccacgtgctagaaactggggggagacaacccgcgggggcgcacagcagtttcccccaccccgccggggggtagagaaggcccatgttgccacgctactcatgcgccgggagagccaacaaactcttctgggcctaagaattggggccttacccccccccggttctatggttaaaggagtttcctgtttcccccctgggtgacgccccgcgttgtgtcaccggattgtgccgcagatctgaattggggaatcctctctttgatcaccacatttcttttcgtcttccgtcctttattcaagaaatatgtgttcacccctctctcttaagaaatgaaatcttgtactaaaaagtgaagaaggacccaaccttcttttccgccccccctagagaagttttcactctcctcagagatttgctgcgccctcatgtgtttcccggcagtcaatttctcaaacacgccacagcactcgtctattatccaaaaacgtccacgctcccattcaattaaagcgtaccctgggatactataaaaatagaagtcaccacttcgcaaaaaggcaccacgaccacaaaacg

SEQ ID NO: 534026 - DNA, 112 bp, Homo sapiens
cgcacgtgtctggacgtgcagcagaagaccgaccggctggctagaggtgaagctgcgattcaaggactgcctgggcgagaaggcacaggaggagaagcggctcagtctggcg

SEQ ID NO: 534027 - DNA, 124 bp, Homo sapiens
tatatagctggtacccgtagttttttggagcagtgtctctctcactctgtgcaggctggagtgcagtgatgcaaacacagctcaccacatcctagacatccccagctcaagcgatcctcccacg

SEQ ID NO: 534028 - DNA, 806 bp, Homo sapiens
  misc_feature (467)..(467): n is a, c, g, or t
  misc_feature (781)..(781): n is a, c, g, or t
gaggttcatcccgtggtcaatcacccgaggtcctactcgtctgtgcaggctacaccgagtattcagctcgtcgctatcgcgaacttgtgcagatgccggggtgcccaaagtgggcctggactccggttccgctgctgcgtgtgtgcactctgcgctcgttctggctttgttgcttcctaccgcgttgaacgagttggcctccggcgtgttcgcgggcagttgggtcggtgtgtctacgtggcctcatagagtggggacccgcgttgcggtcgccgggacaatcccggggcatggtcgcctgtgtacttccctcaggctccttgcattgtgggcccgttcgtagaccaggtgggtagttggtgtcgtgcacctcgcttctcccttccccagtcaggctcgtgccgttcaggggggtgatgcagtgagacgccagcttgccaggtagaacctacatagtatactacacntttgctcgggcgtgctcgtgtccacttcgggagctatatcgcgtgttgacctgcgttgaatactcgtcgatgtcgacgggggagcaacaccccacagtccttgttcgtgcgcttgttcaccctgaggaggcttggggaacacggcctgtgggccttgtacaccagacagcgcgaagggaaagtgttagggagtcctacaaataaggcaagggacgatcctcgggcatatccacccgaatgaatccagttcctttgggggaagcgcggtcgccacggtaaatgtggcatggagtgcacctaccgagaggcgagtncatggcgttagttgagggttaccct

SEQ ID NO: 534029 - DNA, 157 bp, Homo sapiens
  misc_feature (101)..(101): n is a, c, g, or t
gcatcccccctgtcagctcacctaggctcctatttattctagccacctctagcctagctgtttactcaactcctctgatcagtgatgagcatcaaactcanaactacgccctgcatcagcagggatgcacaacacccggtaaggttaccgagtctcg

SEQ ID NO: 534030 - DNA, 768 bp, Homo sapiens
aagaagcccttagcctaatgaagcgataagatttatcagcaagactgttgaacgcataactgcccaagatgctgtctccctccagacccgcgcccgacgttgcctggcatacgaaactacctgaatagacagagcagctggaaaatgtctccttctgatatcacagtgcgaactagaaacggcacaatgacgaagtgccatatggacaactaaggactggtgctgagcggggtggtggtggtggagggggatggggaggaggtggggcggcgcggggacagtcggagggggcggactccagtctgggaggattgtccaggctgaatgacgaaactgagatacacggcaacagggcatactgatctggaggaagccgacaccattgtgacaccggaggaagatacacatctggagacctatacacccccaagtggaccagcgaggtgaccaggacttctacagcgcacagaagtggccacacagagcctcaagaggaaccgaatgccgcccccaaggccgagagggctcaaagcctgaaagcatgcatcctacagtactagtcaccaagacccagtcagtcaggttgcagagccggggtcacaccatgcacgagccatgaagccagagccgctgcaaacctacccttcatagaaaccgagaaggaagagacgaagaacacaaagaaacaagacacaagaaatacaccacgaaacagcagagaccaaagactgacaaagaccacacacgcgacagacacgaagcagtgag

SEQ ID NO: 534031 - DNA, 228 bp, Homo sapiens
aaaataaaagccagggctgttgttttggggcccttcaaggcaaaaaaccaggctgattggaaaatggaaacccccaggaaggaagcggcccctgatggtgattttggccctttccatgttttctacaaaaagctgtggtgattggccctgtggtttatcaggcgaaaaccccaaattccccttttagttagtaaaggggacttaataaaaaaggaaaaaactcttcca

SEQ ID NO: 534032 - DNA, 176 bp, Homo sapiens
acagccacagttgcagtagtgagtagcatcttcttgggtcagggggatgggggaggcagaataatcttaaaaaatcccctctgcttttctcccttttagaagttatctctctctctctctctctctctctctctctctctctctctctctctatatatatatatatatatatatat

SEQ ID NO: 534033 - DNA, 198 bp, Homo sapiens
atattctcatcgtttcagtctaaaaacagtcagctattttattagtgtttttgtagaccattaaaatttttcttgcaggctgggcatgatggctcacacctgtaactgcagcacttggggaggccaaggagggaagacggcttgaggccaggagttcaagaccagcctgggcaacacagtgaaaccctgtctctacgg

SEQ ID NO: 534034 - DNA, 173 bp, Homo sapiens
gacaaataacccaagtagcattcaaatacctaattatttgcttgaacagcacatgaaggccaactatggaactcagtggctccaccagagagaagtctggactagcgtgctcacggtgcgcgtgtcctagagccattcagtaggctgcagccctgtagaaaacagcgcattca

SEQ ID NO: 534035 - DNA, 361 bp, Homo sapiens
  misc_feature (1)..(1): n is a, c, g, or t
  misc_feature (32)..(32): n is a, c, g, or t
  misc_feature (53)..(54): n is a, c, g, or t
  misc_feature (56)..(56): n is a, c, g, or t
  misc_feature (204)..(204): n is a, c, g, or t
  misc_feature (238)..(238): n is a, c, g, or t
  misc_feature (319)..(319): n is a, c, g, or t
  misc_feature (348)..(349): n is a, c, g, or t
ngcacgagaagctgaggcacgcagagagcgtnggcgacaggcgagcgtgtganncnagccgcgagaagcacgccctgctggaggggggaccaaggagctgggctacacggtgaagaagcatctgcaggacctgtccggcagactctccagagctcggcacaacgaactctgaaggcattggggagcccagcccggcagaaaganggccagcgtgaaggacctgggctcttggcagtgnaatttccgtggacagcccgccgtcaggttggctggggctggcaccgggtgtcgaggcaaggaaggatttgtttcttgggtnactgcaagccgctgcccgtcgcgacacannggctttggtggt

SEQ ID NO: 534036 - DNA, 171 bp, Homo sapiens
gcaggtggcgtggtattcacttaaaccctttaaccagttgctacgctcctaccttcttcccgcagaagaaaaaccccattaaccccagaaagctcgggtttgcctggtgctggaactttttgtttatttgtatttatttgcattgtgtttggctgtcttggcagtgggggc

SEQ ID NO: 534037 - DNA, 306 bp, Homo sapiens
  misc_feature (149)..(149): n is a, c, g, or t
tgttttcaagattttttgtttgggctgagcgtggtggctcatgcctgttatctcagcaccttaagaggccaaggcaggtgcatcacttgaggtcaggagttcaagccaccgcgcctggtctatttttactttaaaaatctcaatttggntttcctttttcttttttttttttttttggagagggggcttccctttgtcccccgggcggggccaggaaaaccatttaaccctgtgggccaaagcctccagtggcccaagtttcccccattcccctttacccggggggaaaagggcgaacctcttttt

SEQ ID NO: 534038 - DNA, 615 bp, Homo sapiens
  misc_feature (226)..(226): n is a, c, g, or t
  misc_feature (355)..(355): n is a, c, g, or t
  misc_feature (386)..(386): n is a, c, g, or t
  misc_feature (470)..(470): n is a, c, g, or t
  misc_feature (547)..(547): n is a, c, g, or t
gcttcccacacaagaggcctcatttcttatatcccaagtcccgcttggtccgcagcctcatgtctccctcccactatgggcctccgagcttccacaacatgttccagcctttctttgagatgatccaccaggctcaacaggccatggatgtccagctccacagcccagccttccagttcccagacgtggatttcttaagagaaggtgaagatgaccgcactgtgtnaatggagatccgccgcaactccacaggatgcctgaagatgaagggccagtgtgaaaaagtgccaaggagatcttgtctgtggactgttcaaccaacaatcctgcccaggctaacctgcgccaggagctngaacgactcgctccaggtggccgagacgtgnaacaagagcagtacaaggagcttgctgcagtccttccagtcgaagatgctcaacacctcatccctgctggagcagctgaacgancagttcaactgggtgttccagctggctaacctcacacagggcgaagacaagtactaccttcgggtctccaccgtgancaccattcctctgactcagaggtccctcccgtgttactgaagtggtggtgaagtgtttgatctgaccc

SEQ ID NO: 534039 - DNA, 135 bp, Homo sapiens
cccacgactcgatcgccctcccatccctacgcatcttaacataacagacgagtcgtgggcaagaaacgtcgtgggcaagaaacgagtcgtgggcagaaacgagtcgtgggcaagaaacgagtcgtgggcaagaaa

SEQ ID NO: 534040 - DNA, 1052 bp, Homo sapiens
tgtccctcaggtgggacccgaccgacttgagatactcaccacaatgtcatgccacatagatctttgccaagttggagaaaatcacccagatgattttgatcctgacatggaggatgggaacgaccatacaagggttatatttgcctggagtactggcgtgccccagcccaagctgtggatgcggctgaagaatccgccgagcggctacagagcttgacgagcaacacacattccgggtcaccctctttacggatttcgacaaggtatatgacgatcagtgacgagtgggatattccagagaagcaggctttcaaagacctggggaacattacgttactggcttgaagaggcagaactgcagagatcagtcacagtcgtgaatttgcgagagtgggagaccgcaacttgccatactagctggaatgcactgtaccaacgacccctgtcctcaaaattgagtgaaaccagacacgagatggacatgacgacgataatgtgcagttggggcttcctatatgaggcgatcctaaccttgggccttagcctgttcatctatacatgcggggccatcgcgtctaactgcgcgcgtgccagaagacaccacaccccatcgcgacttcagcagatttccgcacaccaaacgggcgttccaaactcaccaggaccttcaacacccgttgctctaaacccgcgtccccttgccttgaaccgtcaagacacgccctgggaggggcagcgacgagatggaaacccacaggccccaatcaacgcacactgacgagcctcccttccccggcgcagcccaaccaggtcagggatcctcccacggagcccacgaccccaacccaccggcggctattgcgcacaagtcggacagcaacgcacggccaacaccttgcgcaacatgacccccggcaacccttcgccatctacagacacaccgccaaatgcgaacatgcggcccaccaacaactcggagcaccgtgggacaaagacaccctgcgcctccgcggcatcaccacgccctccgcgcgcgcgacaacaaccaccac

SEQ ID NO: 534041 - DNA, 738 bp, Homo sapiens
  misc_feature (23)..(23): n is a, c, g, or t
  misc_feature (210)..(210): n is a, c, g, or t
  misc_feature (216)..(216): n is a, c, g, or t
  misc_feature (339)..(339): n is a, c, g, or t
  misc_feature (471)..(471): n is a, c, g, or t
gtttttattaaaactatgctttngcttgcctaaatcttttgatcttatatttctctcatctcagagcctgtcctgagttgtaaggtatttcatactgtcttacttaaaagttttttaaactactagagtcatttgatacacacagaagttacctaataatccaaagatgtccatcaagggaggaagggtgggtcatcagactttgccttngatgtngtagactaggctcctgagttaagcagcagagggacagaagtgccatgtgccttcactgtgtcccaggaaatctgggttggttccagtgggaaataccagtgtttcttggttctggaaagtagnacaagagtaggagatgggggaaatagggatggggagagcaagccccgcatgtccatggggagtcaggtggggagcacgggtgggaagggcccgcttgttggcagacagactaagctgtgtggggttcttcgncgccctccctggggtacagaggttggagaaaactgcaggcccacccctcccctctgtttggtcaggggaaagccaaaggccaccccaggtcttctgattgggaagttgaaggaatcagcagagtcccgatggctgatcaaccccaaaattaatttaagcccgccctcccaccaaatgcctctaatctctctgcctaatagaaggggcagcggggttgctcccgccctttcaatcccagccggcccccctattcacccagagggcccc

SEQ ID NO: 534042 - DNA, 177 bp, Homo sapiens
  misc_feature (57)..(57): n is a, c, g, or t
gtgctgcggtgatctcgcaggctccccgcggggcaccatccattggtggctgttccnttggctgtccctccagcttttccacttccaggtccatcctcattggttccactttggctcaggtggcctcagccaacacagtgcatggttccccggcgtgggtcaccgcagctcgcacat

SEQ ID NO: 534043 - DNA, 92 bp, Homo sapiens
cttgtggagtcggatcacgtacctgtgcagaaaccgcctctgtggctgctgctgggtcgggttttatttcaaatgcagccacagaggcggcc

SEQ ID NO: 534044 - DNA, 203 bp, Homo sapiens
tggaacgggcagaactcatacttgtacgtggactccaccaggctgaagcacttgcccgagagtcggaaaagatgcacgggtccagacacgggtgaaggatccctctttggctgggggcgactggcctggggccagaacgggttgtccacccaaacgcgttgggctcctccaccaccttcatcttcgctggcctacagcacatg

SEQ ID NO: 534045 - DNA, 217 bp, Homo sapiens
  misc_feature (145)..(145): n is a, c, g, or t
gtatagaggatcctgagtatgctgacaggtgcgcgatctgttggggggggtccttcagagaccaaggcggtggatcgggcggagtgccaggttcaagtgcagttgtggtcgggtcattttggaggtggtttcctccaatcatgantgggtctcgaagaggacgggggtaggaaatcctccaggatcttatttctttcaaacaaacaggggggggggg

SEQ ID NO: 534046 - DNA, 855 bp, Homo sapiens
  misc_feature (632)..(632): n is a, c, g, or t
agcggagtcgtacttgcgccgagagtcgtcagggtttgctggttcaactgtgcttaggacggaacccggtgctcgttgcctgacccggtgggtcgacctagacagccctccgtctcaccacatttaccgcactcatcggactgccaactggggactcgcgggcttgatcgctccaacaggcagatggagcacactcggtcgtgcagactctcggtgtcgtcagtatatctccgccagacaatgaacagattgagcggtacactggtctgtcaaggtgcgtacataatgtgattggtaagtgactcaaaggcacgttcctctgaacctgtctgatcaatgatgggagctcaaagctgtccatacgatagaaccatgtgacagagatgattaatctagaataagacactgtcgcagtgatggttggactatatgagacgtagagcatatttgggcataatatatcatgttgttgacacaaatcttcagtgcagtgatgacgtgagaaacatgcttggagacaagaatgattgaacaggatgtgaagaaaccattgagatggatggtgacgtacagtggtatacttgcatgtatgattcgaggaaataggctgaatgtgaggattgaattagagngagtagtcggtgagcatagatagtagtcgattagggaagatagttggcaaatgaaccatttgtttggcaagcaaatagattggtttgaaattctatttctgcttaacctaggaatatcgttgttactaatagctgtgttcactttgtgctataagataatgcattcactcctagttaagtaggtgaatttcactctgagtagtccaatataacctggtaatgg

SEQ ID NO: 534047 - DNA, 761 bp, Homo sapiens
  misc_feature (419)..(419): n is a, c, g, or t
  misc_feature (526)..(526): n is a, c, g, or t
  misc_feature (533)..(533): n is a, c, g, or t
  misc_feature (538)..(538): n is a, c, g, or t
  misc_feature (586)..(586): n is a, c, g, or t
  misc_feature (589)..(589): n is a, c, g, or t
  misc_feature (635)..(635): n is a, c, g, or t
  misc_feature (637)..(637): n is a, c, g, or t
  misc_feature (671)..(671): n is a, c, g, or t
  misc_feature (736)..(736): n is a, c, g, or t
gcacgaggttccttcaccccgcgtgtcgccagcctctgagtacagccagagcccctggcttctccgccacccacacccttcccaccctgctgcggggccctgcctttgtggcgagcagccagccctctgcccctgcccagggctccccaactataggcctgtgacccccgcccagcttgtggggctgctcgtacgagtgtagacactgcgcccattgtacgtgctgataactactatctacatttcccactaccgctctctgactgtcggagtatatttacatctactattctttatattatcgaaggctgagttatggatgcttaggttaagatgctctcgagcgttgagcaggcacagctctgtcgaggtccctggtcaccacctgtaggtctggcctctgaggtcgtggactactngattccaccccagagtactgcagccaagtcatgagtgatgagcagctgggccatagctgcctatgcctgagagtccctgtctggataagtcactggacctggatggntctcagngtccnctgactcctgctgcatctgcacgtggatatcatgatcatgcacgagcncanactggtaccagtagtggcataccttaccagcacaggtgtcctgccnangacagtcagagcagtgcatctgcataggataggngacctgaccaatcttgtgaagagccagtgctgtccagacaggcagctacatgctgcagaactgantgacgcttgccaccgagctgactgc

SEQ ID NO: 534048 - DNA, 2072 bp, Homo sapiens
  misc_feature (148)..(148): n is a, c, g, or t
  misc_feature (362)..(362): n is a, c, g, or t
  misc_feature (365)..(365): n is a, c, g, or t
  misc_feature (411)..(411): n is a, c, g, or t
taaggggatccaacgacaatgccacatcggtgatgctatatgctcggagagaagaaggcacaaggacaacttgtggttccaccctgcagggaagatgacacgtgctccaatgcacacacatcacagagtagtggtctgttcaatcgcncgaggtggcgagaatggtgaaagccataaaccagcagacgggagccttcgtagagatctccccgcagctgccacccaacgggaccccaacttcaagttgttcatcatccggggttcaccccagcagattgaccacgccaagcagcttatcgaggaaaagatcgagggtcctctctgcccagttggaccaggcccagtgtgcctcagccctgctngcncaatgggcccttcaatcctgggcccttcaaccaggggccacccggnctcccccacatgccgggggccccctcctcaccagtacccaccccagggctggggcaatacctacccccagtggcagccgcctgctcctcatgacccaagcaaagcagctgcagcggccgcggaccccaacgccgacgtgggccgcctactactcacactactaccagcagcccccgggccccgtccccgggccaccacaccacggcgccctgccgccacccaccggactccaagcgccagccagtcccccacccggctcgcggtagatgccaccgcaccagccagagcactacgacccatcgcgccccgcgccaccgcacactagcctcagcccccgcaacgtccaacacgcggccaccccctgcagcacaaccccgcggacccccccgcagcatcctcagcagcaccccaccccagccccccgagcccatcgcccgagcacccaacacaccatcacccccccggcccacaggaccctgagcccccccgcgcaccgccaccaaacaccacacgcaccaagcccaacctcgcgcgaccgcaacacaaccacacccccgaagccgccccaccaccccccaccacgacaccacacgcagacaagagccgggcacccccactcagaacgccacgggcacacagcagacgacaaccagtcacaaagcaccaacaagcgcaaccgcgcgaccccacccccacccagaggacgccaacgcaaaggcacacgaaaacactaagggcccccaaacccaccccctctcccaccaccccggcacacacacattcacaacatacaccacaccacaccccacccttgacaacacaccatcatcacccacacacgaataccctcaactacaaccaaccaacaaccccaaataccaccataagatacccacactacaacttcacctgtgcccactctacacaacccctagacatcccataccacacacaaaacccacacaaaagcttaatcaacagcccagcgatgtaaacagcccttcgcgcaaacggcacctgaaccctacgtcacagacgagaaagaatggcacaccattagccccaatggcaacacgacacagcgcgccgcgccccacccgtctcgcgcatgggcggaacagtcagaccgcagaagagtgacagatcaggataacaccgacaggacgcgacgagcctacgtccccgcgaatacccgccccacagatcaacgagggacgaaccaagcagagagagaaacgcgacagcacggaaactcccggcacacatgtagagaacagccgtccccgcaccccgacagccacgcactatacatcacgccgacggctgatagaacgacagcagagggcgcacacagtgcccgaagcccggtggggcaagaacagacgcggcggcacattggagccgactagtgcaccagcagacaccgacgacagtggcgtggtgcaccccctcccccatgacattactggacatccacacaaccctgagcacttgacagagcggagcaccgtgcccgactgaccgacggccaccgctacatcgctaccccaatgacacacagtcacgcgcaggcaaacagcacacctcccgcgagacaacaacgggcacggcgcctgtcgacaagcgaaacagaagcacagaccgacaagcaagagagcaca

SEQ ID NO: 534049 - DNA, 179 bp, Homo sapiens
gttgaaatatgtcgagatgacaatatgcggttttgccccttttacgactgctgctgcatccatgatcaacttgttcctttggccactgctgtggctgaattaggcttgaaggatacacaagaatgcaaacactaatttttaataacggatgggtaccgatgctcgtaattctgtaatcg

SEQ ID NO: 534050 - DNA, 103 bp, Homo sapiens
ctttggatctactgtacagtatataatctatatttgatgtactttcatatttaatgtacctaatgtaatatatatttgatgtaatttcatattttatgtacag

SEQ ID NO: 534051 - DNA, 641 bp, Homo sapiens
  misc_feature (148)..(148): n is a, c, g, or t
  misc_feature (362)..(362): n is a, c, g, or t
  misc_feature (365)..(365): n is a, c, g, or t
  misc_feature (411)..(411): n is a, c, g, or t
taaggggatccaacgacaatgccacatcggtgatgctatatgctcggagagaagaaggcacaaggacaacttgtggttccaccctgcagggaagatgacacgtgctccaatgcacacacatcacagagtagtggtctgttcaatcgcncgaggtggcgagaatggtgaaagccataaaccagcagacgggagccttcgtagagatctccccgcagctgccacccaacgggaccccaacttcaagttgttcatcatccggggttcaccccagcagattgaccacgccaagcagcttatcgaggaaaagatcgagggtcctctctgcccagttggaccaggcccagtgtgcctcagccctgctngcncaatgggcccttcaatcctgggcccttcaaccaggggccacccggnctcccccacatgccgggggccccctcctcaccagtacccaccccagggctggggcaatacctacccccagtggcagccgcctgctcctcatgacccaagcaaagcagctgcagcggccgctctagatatcactcgaggctaagctaggctaccacagcctttctggctataaagctcgtggctcatagcgatctcaattccctcctgcttgttctcgtttgtgtgttgtc

SEQ ID NO: 534052 - DNA, 1501 bp, Homo sapiens
tacagacattagagaggagctcaccatgtgcactattggcaccagttacgcacatcgctaggaccagcttcatcagtctcttggtattggtgactccatgctgtgcgattctccattgcatggtccgtccatggctgtggtgaagactcgtgcatagggcgaagggcgtgtatgcacaaatgagctccggacctaaagttattactagtcctcggtcaaggcgcccctgcaacattgacgtacaaacgaatgctatggttgggtaggagagattgaaacctgctcgtcttcgatagccagcactatacgttatctatttcgaaaagcagcagggcgcagacgtagagctacaggccaaccgctcgtgctcgcgtggagtcattgttcgttttgggattaggaaacggtttggactagccctctatcaatggttccctttcggaatagacactctagcagcgcagatggagcaccgtggcgcccaacagagttcgtcccctgtcaccaatgtcgctgtggaaaagtccaagccttcacgatcttacaaggagaccaatgcggcacatgggctcgctggtgccacaggacatacaagacctaagttgccacgcggtatggtgtgtcactctatatggcccaaactctgagccttaaaaagcgaagaagcactcccaagtattgtaattcccaattttggtacgctcctgttgtgacccaccgtgttacacgcttgtcccggggctaccaccggtggtggtgcgccggttgcaatgggcgaagcgaagagcaaacccagcggttgtgccttttgtggaatggggggcgggctttgtcaactctcggggagcccccccctcctgagacaaaggaactttccgtgtacggcgttttggggcggccggaggtacacttcttagggggaaaattaccttgaagtttgcaattcttcacgagcagcagttgcagcgtgctgttggtgaccctccaaaatgaggccacaagccgcgattccgttgcgataacgtagtctcatgggaaacttggtctccataggaggtctcagatgggggaaaaagggttgtccacccaagtttttggtctctgttggggagttggtaataccccttttcctcacggttctttgtagtgtgccactagtggtccattaccttacagcaggggggttctcgtcccacgagaagttccttctaggtctatggggctttgtgtagggggcctaccctgacacgcaaacggttccctattcttctacttccatggcctggccccacaattgtaaaggcaaacgaagccggaatggagaattgggcgcccacattcgcaatgcctagcgtaccgagctaaacgcttgttgtcacaacatgtggtactgcagacatacacagtgggtttgtgaaaaagcgcgctccccaacacatggggttatacttgggatcccagttccataggggtccgagttttgtgtgcgaaaacgcaatag

SEQ ID NO: 534053 - DNA, 469 bp, Homo sapiens
tggaaacaaagttatgttctggtggcccagccgggagggcaaaagcgctatctcggctcacggcaacctcggcctccggggttcaagcgattctccattctccggcctcagcctcccaagtagcggggaatacgggcaccgggctaggggcttatggtatactcgttggccctttttctgaattaggaaaaatgatctaatctttaaactacggtatgatgcatgcttttctctatggccatggtttaatactattctccattcagttccttggcaacctttggctactttcaacattggttgggctctcattatgtcagtccgggagaaaatgacttgggttctttggaaacagggaagtatgtaatatgatacattcgggggggtttttcccccagaagaaatagatagccaaggggcttaatttggacattcaagctgatactcagaagacaagtttgtctgtggg

SEQ ID NO: 534054 - DNA, 100 bp, Homo sapiens
gtttataatctagtttgtagagataatatacgtacaatacccaaagagataacagattatctgaagcatgtactcattgttcagaatgttcccatctgta

SEQ ID NO: 534055 - DNA, 1050 bp, Homo sapiens
aactaaaggagtgattcatgctgtctgctatacagcaagagacatggtgtcagtgaggaatcggacggtgaaggatggatagcaaggaaagctgcattaataactggccgtcgtttacatgctcgaagaagagggacagtagaaatcattggagtagtataacccttaaggaacgatgtgatgtcagataggccttgaaagatcatctctgtatgaagaggatgacgaaggagtaatgactgattctagaaagcgatatcccacacgtgcacagaggttagaaaacaggcatctttgagttgaacactagattaattagggaaggttgaagttactgttggtaagatctgatgagagagcctagaatgtccttttaaattcacaagcagtttggggggcatggcttgggaagttatgtggttagtgttttaaagaagcttagttaacatggtggtgacatacaggtaaaattgtagaaaggtctgtcaataggatggaactagagtatactggttctcagctaagggtgactttatgcaatcttggggacacattaaagttgtcacaactgggaccagagagagatgagatacagcctattggcatctagtgccataagaaagctacgaatgctgctgaacatcttatacatacaaagggacagttcccacaacaagaataatgtggcaaaaatagtcataagtagtcaaggtaagaaacgcctaagctaaagtaatactataataagaaacaaccccaaggtcttaatagtataaaccaagtacaatgtctttatatgctcaaaatcgctagtacattacgatacctcatccaaattctgagtccaagtaatagaccaccattgctacaattaatctacatggatatgcagaaatgacaaaacctctaacaaaaaaagaaatcacctacctccacgaagaacttgaatcaacaaaaccaacagtttacacttacaaaattgatcttcattacccaaaacataaaaaacgccggaacacgacaaaaacaacaacaccaaacaacatacag

SEQ ID NO: 534056 - DNA, 80 bp, Homo sapiens
tgccctatcagaaatcgcggtcttagcagcaccaacttcctggccataaatatctcttctgttatttccaaaacaaactt

SEQ ID NO: 534057 - DNA, 737 bp, Homo sapiens
gaagatcagcgtgcaaagctaggtcggcaagacgtgcaaggtgcacccaatgcataacaatccctccccagaccccaagcgtgtcctcacggtggtgggcagtggccccccggactacagaagaacaagtgcgaggggagctcaagtgcggcgcatgaattgggtggtttccggatacaagctccccagttcaaagaaccccggaggagctctttgatttccatctctcagttagggggtcccttgaaaaggtccccaatgccgtgatcttggaacagggaccacacagggggtttctaccacccctctgcgttctggtgaccagggaacagaagggggaacttgaacaacacaaggccaaattgccttgcaaactccattttacaaacaccggccttaaaaaacgtggccggggcaatagtggaggggggattcacgtgcccctgggtaaggtccaccacacggacaagtttcgggcgcgttggcggacttcgaacgcggcggggagtatggattccccacccatgggacggggtctccggaggagaaacggttaacagaaggaataccaaaggcgctttggatccccaacaccaagcgggaaattaaaaacgccccccattatacatcactaagtttaaacaacaaaaaatttaagccagacaagctctacaggggccgggcggacaaacacacagcgttgggggcatccaaagggcccatgggtaaagaatccg

SEQ ID NO: 534058 - DNA, 1600 bp, Homo sapiens
tgtgccttttaaatattttctttttcccctctccccccctctgcagggggggttggaacaggggaaaacccccccccctctcttgccgggaaagcgggagaggtccaatttttactctcatctctctttttcgccacaaagtgccctctgtgtggccctgtgggggttgggaaatgaggtggtctctacagcccctcttttcttctcgtggccttgggcccccctctctcacacaaatatcacacgcggggggagagagagctgtggtggtgtgtggagagagagagccccacagagaaacacgaaagagtgaaaaaaaaagagtgttctctctctcccgagagagaagagagaatacagagtgtgtctctctctcccgcgctctctgcgcccccgcgcgcgccgcctctctctgcgtgagagagagagagagtgagagagagagagacactctctccacaagcgggagacacacagaaaaaagagtgtctctctctcgagagagtgtgtctctctctcatcacccgcagtgtgtgcgccagagagatgagagacaccacacacacatagagtgtctctctcacacgctgtgtgagaagcaggtagtatctccacacacacacatatatatctctcgcagagagagagagcggggagagacacagataatgtctcccacacaaaaaaacacgcgctgtgtgtctcaccacggtgtgtgtatcactctctcacacacacacacacacatagagaaagatagttctctctctctctctgagacacagagagagatcgcactgatgaacactctaaagaacacataccctgagacctctctgaggagaaaaccacaagaatcaaagaaagtggtgtgtgtgtgtacacaccctctctatgagataaaacactctctctctgtgcgaacaaaatataaagtgtgggaccacgctgtagaaaaaggcgagataccactctgtgtgtggtgtgcgctccaacaattatgttcccccacaagagagggagtgtgtgcacacacacatttgtgattataatacaccccacaaagaagatccaaataaagaagcaaaaaaaaaaaaaaaatccaccacaaaaaaataaaccccgtgagagaaccaatcatgtgtggttgatgtttaccccaacaatttattactttgacaccacataattaattaaggtgcttgtcaccaatttgacttccccccacagattttcgtatgaaaataatctaacactgtgtgggttagcacaaacaccaccaaaaaaaaaaacttgtttggttgtttactgtggtgagcacccccaaaaaaaaaaaacacaccctacacctattataacacaagaggaggtacgtcagtggtagtctaaccacccccccataaaaaatactacgcttgcagggggggggcaaccactaggtaagacaaccacccctgggaagaggatgagagttattgcaacaatgcgataactaacaaaactacggcgggcaccaaccaatgttgtgggagtactcacgcgagaaaacctcattttgtttgtgtatgtagttctaccttcataaaatgaacccactcaa

SEQ ID NO: 534059 - DNA, 208 bp, Homo sapiens
gtcaactgcggttcgataacactgcgagagatgagggggattctcagggcgactggtggagtccaagcctctatcgtttcccacttgtggtacttctcataactgtgtcctgtggcacgaacccggctatcaaactgagcctccaccacattcctcaggttgcttatcagtaccttgtatggtagttcaaccgcagttgaaagacgca

SEQ ID NO: 534060 - DNA, 692 bp, Homo sapiens
  misc_feature (692)..(692): n is a, c, g, or t
caattgttatgaaaggcagtgcctgaatctcagatacaaactccattctatctgctttctggaggcattccatatgctgcttgatattcaatcaccctgtccttgttattactctgttccacacaaattagtaaaccaactgcatctgtagtacctagagctgtcaactcggtccgaaatgctgctagtaaaacactacgctcttctaagaaaacttgttgaagggcaagcagtagttcacctcgccagtctgagaagctctcatgagattgagaactatcataaacctcggcttctctttgcagttgcatctttgtaattaaatcctttagagatgagattgtattgatgtaagcttttctctcttctagccaagattctgaaacctgctgaatagaatggtcctctccatcactatagggagactcagtgagagaaagcacctgcatgccttcattatggacagctctcagtaatccctttattttctttggaaaggaatctgttgcactttcactttcttctcctcggccttctgatgctatgtcaaatccctgactgtgtgtaagataaattccctgaccccagtctgatccagaatcactggagcatatttctctagtctggtaagcatcagaatgtgctaactcaggaattgaggatccctctttacttctcagacactgtatccn

SEQ ID NO: 534061 - DNA, 446 bp, Homo sapiens
  misc_feature (434)..(434): n is a, c, g, or t
aattagctgagtatgatgccacgtgtctgtagtcccatctattgggaaggctgaggcaggaagatcacttgagcctacgagtttgaggctgcagtgagctatgatggcaccactgcactccagcctgagcaacagaacaagaccctgtctcaaaaataagtaaataagtaaataataaaataaataattagccaaacatggtggtacacaccaataatcccagctatttgggaggctgaggcaagaggatctcttgagctcaggagttcaaggctgtagtaagctatggttgcaccacttacattccagcctgggcttacaaggacaagaccctgtcttttaaaaaataaatttaaagggaaggaaggagactgtgggggctcccacctggaattggactgggagggaagggagaggaaacccccagttggggnaaagttaaagtt

SEQ ID NO: 534062 - DNA, 113 bp, Homo sapiens
  misc_feature (9)..(9): n is a, c, g, or t
  misc_feature (103)..(103): n is a, c, g, or t
ggacattcngggcacggggcctcctgggccctcgttcggttggcagggcctaaggcccaaagcaattcagtagggccccttttaggcgccccaggaaccctangggtccccaa

SEQ ID NO: 534063 - DNA, 286 bp, Homo sapiens
ttggagcgtgtgcttaagacttcttggtatgtgagcctgacctccctttcttattgggtattccccttggtattttctggtggctgaagacccaaagcctctaaccagatgccttactactggctccaaataaagagggtgcttgaaagaagctgcattagaatgtaactttccgaggatgggcatttttgtccgctttgttccctgctgagttccctggcccctagaatagtgtctggcacatagtgactgctccataaatatttggtaaatgaaccaaaagaaa

SEQ ID NO: 534064 - DNA, 175 bp, Homo sapiens
ttgtccacagttggcaaagtgtgtttttaagggaaaaacaagagacactttttgttgtttttgagacagaatctcagtccgtcacccaagctggagtgcagtggcacgatctcggctcactgcaacctgcgcctcttgagttcaagtgatattcatacgtcagcttcccgagtag

SEQ ID NO: 534065 - DNA, 355 bp, Homo sapiens
tttaacattaattcctttagtttcttaacttataaaactgagagaaaaaaaatgcaaactagaccaggctcggtggcttacgtctgtaatcctagcacttcggtaggccgaggcggtggactgcctgagctcaggagttctgagagcagcctgggcaacacggtgaaaccccgtctctactaaaatacaaaaaattagctgggcatggcggcgtgcacctttagtcacagctacttgggaggctgaggcagaactgcttgaacccgggtagcagaggttgcagtgagccgagatcgcgccactgccctccagtctgggcaacaaagcgagacgccatctcaaaaaaaagtcgacg

SEQ ID NO: 534066 - DNA, 171 bp, Homo sapiens
tgtcagcaccctgctcgacgtgtcgacggaactcgtacagagaggcatgcaccgcagtggtgaatacacgtcgaccaggctccatcttaacgatatttggaggtcagcacggtagtctcacgtgtcgaaggaactagtccagggaggcatgcaccgcagtggtgaatacac

SEQ ID NO: 534067 - DNA, 1091 bp, Homo sapiens
  misc_feature (222)..(222): n is a, c, g, or t
  misc_feature (552)..(552): n is a, c, g, or t
gcttgtcgcgtgcggtgtgtccggtcggagactcgattggtcgggtgacagcgagagaacgataacgaagatgccggacgcgagatagtgagccgtttctccaatcctgtgggtcgcccgagtggcaccacgatgtggatgaatgcactctacatccttccaagcagaatcaagagactcagccaattgtacagagcttgcaggagagacttacgtacatgnatccctcctagtggactgggaccgtaccgtcgtgctacccaagccgtatctaagctcgacgtcacccagtgagcatgccacagggagtcacgacatgcatggcatcgtagagtacccgacgtcgggccacgcaaaggtagcgagaacccagaagacacgtatatgtatgccgaagcatgacgccaaactagagagagatccgagacgcagaggagagaagcggtagcaggacgaagtgagcggaggtatcgtgcgcgaagggaaacggaggatgattggtatggtgagacagagaagattatactgcacgatcaacgcgacgcttgtaantgaggagaaacaaaaggacatagacgttaatcgtggctgtgtggagttcggcaaaatgcatgatgggagtgacaaatagtgagagctgggtatggatgcatatgcatggagagaaggaagcctttggatggctcaggggaaagattactcgggagggtgttcctcgggtgatggtggtgcacttttatggcaaaagggaggaaacaggcgagtaaagggacttgggaaaaaggggtttcgtggagatttcagcagttggcatggggaatttcctagaacaaggggagttacttggaatcggcactggattttacattttggcggcggggggtttggaaaaagttatcggaagtagaacggaacggaacggacaaagggagggggaggacccttgttggagggttggtgttaaaagacgctgttgcgcgcctggagggaacaaaagcggggtaaaatttccaagagggaaaaaacaaagagggtatttatgcacgaagggttggttacccagttggaaagtaacgccggtaaattgggac

SEQ ID NO: 534068 - DNA, 594 bp, Homo sapiens
aaaccttcctcggacccgttaacaacccccctcctaattagtaactacctgactcctacccctcgacaatcatggcaagccaatgcaacttatccagtgaaccactatcacgaaaaaaactctacctctctataataatctccctacaaatctctttaattataacatttacagccacagaactaatcattattttagtatcttctccgaaaccacactaatccccacctgggatataatcacccggatgaggcatccagccagaacgcctgaacgcaggcacatacatccatatctacaccctagtaggctcccttcccttactcatcgcacttaatttacactcacaacaccctaggctcacgtaaacattctattattcactctcacggcccaagacctatcaaattccggagccaacaactaaatatgactatgctttacacaatagctttatagtaaatgatacctctaacggactccacttatgacccctaaagcccatgtcgagccccatcgcggggtcaatagtactggccgagtactctaaaactagcggtatgtatatagctcgattcatctcaaccttgaaaa

SEQ ID NO: 534069 - DNA, 1080 bp, Homo sapiens
ggagagaactagtttcgagtttttgtatttatttttttgggacaggaagtaaaattatgggggagtatataaaaggggggcagaacatgggaagccctcatgagtgcagggcccgccatttgttccagaaaggccacgaacgggggaatgtcacttgaccccacagccatcggggaatgagccgcttttcagcccaccagtgtcttcaaattcatcagcatgtgacactgggtgaaagccccatttcttgtgaaaatgtggatctactcgtggccggcccaggaacacttgtgaacttgtggccctgtgcgcaggggccctcaactcaccattgctctcacttgggtcctgtgcagctgtggatcgcgagattgcgacatgtaaatacacttgggcccaatgtgtaaacccctggggccacagtggcctcgaggggactataccccaagaaggcccacccacggcaatggccgtggtagggagaacccggttcacaagaccgcccagaacacgagggaacaaacaatcctggccaggaacacgcgcggaatgcaacggtggaacagcggggggaagacagaccgacaaccgcgggaaatacatgaagaaaacgccaacaaccgtgatacgcgccaaccacaccatgtaagaacacacagaggacaccgtactaatggggccaacaacaaattccggcggccaagccccctccaagggcgacaacacaagcaaggcgaaccaagagagagacgccccaatactcaacagtcgtcgaacacacgcaagtgagtgagccccaaccaaacacgcggagcaacaatacagtcacaacagattgggaccataaattacccagcccccgaagggcacaaaacggcgcccaaaacccctgaggacactcaggggggccccccacgccggcgccacaaacagccgccagaaacaaaggggacacacggcacagcggaccctacaacaaataacccgggaaaacacaccggaggcgagcgacgcgcagagccccaagcggccaaacacccaaagaacacacacaaagcacccagcccgccaaccccccag

SEQ ID NO: 534070 - DNA, 234 bp, Homo sapiens
tgatttcatgatcttatatcgatccagatgtcatacaggacacgccgctctctggtctctatggcctgggcagcccgacaaatggcgagattcagcaaagtggctgggccaaccccgctggcctatttgcccaaagtctttctgcgtcacacatggcagcttggttggcacgcaggagtcggtagcaagcagcgccaatcaaagtggacgtggctgtctgtccgggttaccgag

SEQ ID NO: 534071 - DNA, 260 bp, Homo sapiens
gatgagccggtaccggcagctttgatctagcacagacccttcacccctcagcctcccgagtagctggactacaggcgtgcaccaccacacctggctaacttttgtatttttagtagagacggggtttgcatgtgcccgggctggtctcgaactcctgaccttaaatgagcctcctgcctcagcctcccaaactgctgggattacaggcgtgtgccaccatgcctggctaatttttatattttcagtagatcaaagcgtgg

SEQ ID NO: 534072 - DNA, 190 bp, Homo sapiens
cctgcgcgggttgttctctggagcagcgttcttttatctccgtccgccttctctcctacctaagtgcgtgccgccacccgattgagggtttgatgggacaatggacaagaggccccttagggcccaagaactaattttttgggttgtaactctaagggccgcaagagatatatacaattaaggttggtat

SEQ ID NO: 534073 - DNA, 622 bp, Homo sapiens
gagagaactagtctcgagtttctgttttcactgcgctgtttagtttttccctacgctcctgactatcctcaactaggggacccttttcttcccccttgccttgcggaccttttctatcaaatctttcaggtactggatctccttggccagggaatccgccctatcttttagagcctcggtcttcttttccaggtctttgcactcaccagtaagagcctcctgctccgcccttttcttttggcggtacctagaggctgctggcttgttttgctccatttttttcaggttcttatccagtatatcaccctttacttttgctggtaccatattgtctccaggaggatcgtaaggttttggacgggcagacccacagagaacacctggagatggaaggctcctatttggagagcgcctgttagaggggctgagctgaggagaccccagaatggactatgggctaatacagatgcccctatcattatctgaagggaggggtaccttctttatgcactggggaacatggcaacgtaagcagtggaatctgggtttctaactcccttagtggaatccacttaattgccagctctttaaggaatgattggagtggaggacgcccctgggt

SEQ ID NO: 534074 - DNA, 946 bp, Homo sapiens
ggacctgtaattccgggtgtgacgagagaacgagatttaccttcctgaattagaaaacgggtcattaagcttgggccctgactcttctatgtgagaaggtacagagatggaaaccttacaagccgagactaaaacgagggtccgttcctctcatggcgtgacgagcaccaggtggcatacaagagaatgtggcaccaatgaaggcccccaagaggatgagaatggcagcagtgcctagtggcagcagcaaggtgctgactagttctggttcatgaatgactccgtgcgaatctgactccctgcgacaaggactgtgtacttgcatgaatgaaggctgagactagttgagtgttgctctgggcaatcctgacttgatgagccgctaaacaggaacacaggcctgcgagcagccggccctggacgaggaggcttggataaccactagaagcacgtccgcctcgcctggcgtccgtagtcagcgcgtcagcacaagttgctgggagcagcagtgaggaagaggacagtgggaagacaggcactggactccaggccgtcagcggccttcccgagaggccggggggttccagcgtctgcctgtacgcagtgagccctgagcgaggaggaggaagaggatgtgctgaatctacgtaccgggagatctttttcatgctagggcataaaactgtgcactgaactgtctgccgagagcagctggaggacagctgagcttccactggtgctgctgggccgcccgcctgtgggacatgggggctctctgtgctcctgacctttgtgccttcttgtggcctggcagattcacctcaggccagaagcccctggacactccgggcctggggctgccgttctgactgtgcggaaaggcaggactcagattgagatcccatttgagtcctctgtatgtactgtgccctttcctgggctcttg

SEQ ID NO: 534075 - DNA, 627 bp, Homo sapiens
  misc_feature (521)..(521): n is a, c, g, or t
cagggtgtggacctgccatctgcccagcaggccagtcccggcaattccatgcttagtcactgcctgcaaaggtcatgtgcgtgaggccttatcagttcattcttagctcttaatggtacagttcggagctgaaagtgcgtgcattgaaattttaaccaagaacatgtcgtcctatatcctggtttctgtagccttccgtccacaatcgctttctaaactaagattttaacagacatgtgggtgtcgtcatctgtaactctaaaagatcctttttaaattcagtcctaagaaagaggagtgcttgtcccctaagagtgtttaatggcaaggcagccctgtctgaaggacacttcctgcctaagggagagtggtatttgcagactagaattctagtggctgctgaagatgaatcaatgggaaatactactcctgtaattcctacctccctgaaaaccaattacaaccaagctctctgatctactcccaagtatggggttcaagagagtaatgggtttcatatntgcttatcaccacagtaagttcctactaggcaaaatgagagggcagtgttccttttttggtacttattactgtaagtatttcccagcacatgaaaccttatttttc

SEQ ID NO: 534076 - DNA, 105 bp, Homo sapiens
ttttggatattctaggagaaagcctataatttcccatagtttctctttttcatgtagctgtaacctaaatgtactacctctgataggactatatatcaaatgtca

SEQ ID NO: 534077 - DNA, 82 bp, Homo sapiens
  misc_feature (64)..(64): n is a, c, g, or t
tcgaagtcacgctgaggccgaggcctggcccagggtgttggaggcctcacagatatagacaccntcatccgcttatccaatg

SEQ ID NO: 534078 - DNA, 252 bp, Homo sapiens
agagcaaatactagactaaagaaatgatcatctcaggtacaatgttacaatagatgaaagctcagtccagttttttggcgattttatttattcaacagtgtcctcacataccactcttcagtctatcaatacatttctgactagctcaagcagaaaggtcctctgtcatcgtttcccagagatccagtgtcaatctcagacttccaactttacctccgtgaaatctcccgatatcagtttctcaacaatcat

SEQ ID NO: 534079 - DNA, 398 bp, Homo sapiens
  misc_feature (2)..(3): n is a, c, g, or t
  misc_feature (33)..(33): n is a, c, g, or t
  misc_feature (36)..(36): n is a, c, g, or t
  misc_feature (229)..(229): n is a, c, g, or t
  misc_feature (267)..(267): n is a, c, g, or t
  misc_feature (275)..(275): n is a, c, g, or t
  misc_feature (293)..(293): n is a, c, g, or t
  misc_feature (295)..(295): n is a, c, g, or t
  misc_feature (297)..(297): n is a, c, g, or t
  misc_feature (326)..(326): n is a, c, g, or t
  misc_feature (352)..(352): n is a, c, g, or t
  misc_feature (355)..(355): n is a, c, g, or t
  misc_feature (360)..(360): n is a, c, g, or t
  misc_feature (382)..(382): n is a, c, g, or t
gnnctgtccccgttgacctttctttttggtatnccntgggggttctgataatgtgtggagtctcattatggctgagagtttaagtgttttcaccagtgaagtgcagacatttgatttctttatgagttcccctgtgttagaaatggctatagaaaaatttgtcataataatttcatttgcatgaaatcctgaggggtgcattaaggaaactaaaagcaccacttacccnatctatcggcagaactgatgtgaggtaagtgagcatgncccccccnataggagctcacatgganananttatgtcactgagttgtcagaaattatgnccccatgaaaactgtttgtttcatgnccnattanatagtctataaattaaactggnagtaattattacttta

SEQ ID NO: 534080 - DNA, 266 bp, Homo sapiens
ggtgggaaatggtggatgatatctggcctccatcttcggcaccgagaaagacaaagtcaactgttcattttatttcaagaatcgggagcatgtcgtcatggagagcggtgctctcggttgcacaataaagcgacgtttagccagagcattgccctctatgaacatgtaccgtaaccctcaaaactcttcccagtgctgcggatggtttgcgctgtgccgtgatgcgatgtggagagtgcggaatactaatgatgagtgcggagagg

SEQ ID NO: 534081 - DNA, 167 bp, Homo sapiens
ttttctatacagcaaatactatctccggtttgatcaagtcccctcacagcttacattttttttacaaatccttgccttcccattagatatgaacaaactccggtttctcatgatcgtttagttcggttagctctgtacaggatcacattggccatcgaaggactata

SEQ ID NO: 534082 - DNA, 241 bp, Homo sapiens
tactgtctatacttgctcaatggtttagaggaggtgggagggaagaaattgcaaaagataatatgctagtgtgttcatacttggacattttcagacaccatttttctgtatgttttgtgcattttgttttgctctgtatatagtgtatataatggacaaatagtcttaattttttaacatctagaggttgccagtgtatgacaaagtagtaaaattaacatattttgtatgctttgtgttg

SEQ ID NO: 534083 - DNA, 372 bp, Homo sapiens
tggggccttcagggctttgggacattttgtcctcaaccctctccctagatcagtttgtgagggtccctgtaaatattgtgtacaccatgcccacgtatatacaagtacacccagatgtacacacagatgtacacatggtccagccccagttttgcaaacctgcacttgcaccccagccttggcccctgcttgggtttggcttaaaagaagcagctccaacccggcttttgtccccttccccacccactgcctgagccttttgagcagaccaggtaccttgggtgcaccggtgtgtggcccgctttcacccaggcacagccccccccccatggatttccgtgtacactatcaataaaagtgggtttgttccca

SEQ ID NO: 534084 - DNA, 630 bp, Homo sapiens
agtgtggatgccccacccagaacatctctgcgtgggcctacccctacgcctacccgcccatgccagccatggatgccacaccattggcattcgatggacatggatcccatgaatccgcataccacatgagtcacagaaagtgagaaagtgtgagaagagaagcagatgagcatgatcaagatctgaggcactctaatcaataacgcctagtaataaacccattgagagtcaccacaccgcgcctaggagggcggagacggcggagagccgcacgagcgcccgcaaggcggcaggcgagcagcggaccacggagcccgagcgcaaaccacgaaccaggggccgcgcgccacgacaacacccaggcgacaccacaccaacagcaccagcgacccacgcggacgcgcgcgcgacatccgataccgttcacacacccacagtgcagatccgctgtgcatcagagacatctagtcaatgtactgccgtaacatcacacaatcaatgatgacccagcactgctcgacacacctgcactttcatcacagtgccaatgtgcgctcgcactaggtcctacactacagaggccgccaccaacaatgatcgtggtcatagtatctgcaccaacaccagcat

SEQ ID NO: 534085 - DNA, 321 bp, Homo sapiens
  misc_feature (55)..(55): n is a, c, g, or t
  misc_feature (65)..(65): n is a, c, g, or t
  misc_feature (92)..(92): n is a, c, g, or t
aggctacctccacaaacagaagactaagggtatgttaaagtgcttgccatgagcntgggttacancggggaatttgcaaatactacataacnattttacaatttgccatgtggtgtaaaaacttaagggaaattttttctaaaaccatcataagaaaaaattggaactaggccagatgcagtggctcacacttgtaatccccgcactttgaaggtcaaggcaggtggatcactggagcccaagggttcaagatcagctgagcaaaggaaaatgtcatctctaaagaaaatacaaaaaattagctgttagtggaggtagact

SEQ ID NO: 534086 - DNA, 349 bp, Homo sapiens
  misc_feature (1)..(1): n is a, c, g, or t
  misc_feature (87)..(87): n is a, c, g, or t
  misc_feature (90)..(90): n is a, c, g, or t
  misc_feature (93)..(93): n is a, c, g, or t
  misc_feature (215)..(216): n is a, c, g, or t
  misc_feature (243)..(243): n is a, c, g, or t
  misc_feature (280)..(282): n is a, c, g, or t
  misc_feature (290)..(291): n is a, c, g, or t
  misc_feature (329)..(329): n is a, c, g, or t
  misc_feature (333)..(333): n is a, c, g, or t
  misc_feature (337)..(337): n is a, c, g, or t
ntggtcataacgcattgtatttattttcaagtattttcttgaaagtctgtgctcataaaaatcatgaaaagttggaaagactgtttnatncgntgaaacttcaaatatatcttacacaatcttgtttgtacaaaaatacaagttaaatataaacataaagcaatcatggtaattttatgcaaatctgttttatgtgatcatcagttatatataannctttctcagttctgttatttgtcaaangatcaataccagattgaatgactacctattggcaaannnccctaagnngcttactttagccctcatcttttacatggttaaatgcntttnctantttgggatcacc

SEQ ID NO: 534087 - DNA, 197 bp, Homo sapiens
gtgctttggctaccagtctgtccagcctccaccagttgctcttggagacaggtgagctgattgtaggtgccagcaccttaggtacaggccactagttggtgaagtggactagggcacacgtgtgtatgcttgcagcaagtacacttgtgtgtctgaacgtccctgatgtcgctctgtcctgatggtggcacagctct

SEQ ID NO: 534088 - DNA, 277 bp, Homo sapiens
taaccttcgcaccaagaatatcaggcggaggctacttatacttcacccggcatgagggcggccacccgggccatctctcctacaagcacagaagcacaaatcgaacagggatggaaaacagaagaaagtgcttttggactacgtgaaacccagtcagtctttacaaggtgtagtccaatctccgggaaagaccaagggaaatgggaggacttccgggccggttcttcagtccatggccggcaaatctctaaacttcccctggtgcctgcgggaattg

SEQ ID NO: 534089 - DNA, 101 bp, Homo sapiens
gatctacaggatccttacgttgacacttcagagcaaaaccaaaaaaataaaacccaacccaaacaaaaactttggtgggtctctcccccccatttgtaagt

SEQ ID NO: 534090 - DNA, 559 bp, Homo sapiens
aagtaaaatgctatcagacagatcacatgctatagagaaatcttttattgttgtctgattgtatgaaattgccacagccatctcatgccttcagcatgcagcagccctatccctggatcagtcagcagccatcaacatggaggccagaccctccaccagcagaaagattacgacttgctgaaggctcagatgatcatgagcattgttgagcgataaagtatttgttaattgagatacactctggaaatgattaaactagtaccacgtaatgagagtgcctggaactatttgaaagggatttggcaggatcgtggtctttccaaatatcctaatcggtgaattcagttacttgatttgcaaccaggtcatagttgctccctgggtaattgcctttcttgtggatatctatgaagacgtgctagaaaatcagtgtgacaataaggaagacattcttaataaagcattagagttatgtgaaatcctagctaaagaaaaggacactataagaaaggaatatcggagatacattggaagatcccttcaaagcaaacacagcaca

SEQ ID NO: 534091 - DNA, 1129 bp, Homo sapiens
cccacgctgtcggccaggaggagcgcgcgggcacagagatgccgctgaccgaggcgtgcaaagactccagaattggaggcatgatgaagactctgctgcatgtttgtggggctgctgctgacctgggagagtgggcaggtcctgggggaccagacggtctcagacaatgagctccaggaaatgtccaatcagggcacagtcacgtacgtcccatcaccaggaaattccaaaatgctgtccaactggggtgcaaaccagcatacaagcactcgtcatcagcaacaacaacgaacacgcacagcagcgcaagaccactgctccagcaaccatagacagcaagccaaagcacagcaagcaacagcaggatagccctaaaatgcagcacccaagggcaaatcaggcagaaaaaagctgcaaggcagctccacaggagatgtggcaatagagaccaatgcatggccctactggcgcagagtgtaagcacctgacctgaaacagacctgacatgaagtactacgcacgcgtctgcagaagtggctcaggacaggttggacgacagcttgaggagttcctgaaccagagctcgcccttctacttactggatgaatggtgaccgaatcgactccctgctggagaacgaccggacagcagacgcacatgactggatgtccatgcaggacaacttcagacgagcggtcagacatcatagcacgagctcttccaggcaaaggatcttacaaccgggagcacccaggataactaacaaatacatgccatacaacctggccacaccggaggactacatatttacatacccaaaggacccagcaatagaacggcaagaggaaagagccaacatcaaccagaacagagcccaggcaaagaccaaggcaagggagtaccaagcacccgtccatgagacaggaacaaagaatggccacacgacggcacacagggacacacccaagtacacaaaagcccaggcagcacaaaaacacagcaaaacgaaaacacaacagagaaaggacgaaaagacccaaaaggggacagagagacacggaaacacaacgaggagacaacgacaaaaaagagaagagccaggcacacaacatagagcacacaacaaaaa

SEQ ID NO: 534092 - DNA, 179 bp, Homo sapiens
aatctcagtacatctctagctagtgaagaggccgagttagtcccttagaaaccgcacccagcctgaattgtcgaactcaatgcttgggtcacctccagattcattttcacagtctttcctgttcttggtcatactaccttgtatttctgctgccatactgactgatcttttttttgtta

SEQ ID NO: 534093 - DNA, 501 bp, Homo sapiens
  misc_feature (299)..(299): n is a, c, g, or t
  misc_feature (316)..(316): n is a, c, g, or t
  misc_feature (476)..(476): n is a, c, g, or t
  misc_feature (485)..(485): n is a, c, g, or t
gatgacccagatagtctattccttagggatatacccaagggaaatgaaaatatacatccacactaaaatttgtacacaaatgttcatagcagcattgttcataatagccaaaaattggaaaaaaaactcaagtgcctatcaacagaggaactgataaaatatggtatatccattcaaaagattactcagcattagaaaagagtgaagtgctgatatacgctacagcatggataaaccttgaaaacactgtgccaagtgaaataagtcaatcacaaaagaccatatgtagtaagatttcnttctgtgaaatctcccngaaagagctaaactcagagaccagaaaggttaagcctagtttattggccaggggacgagagggaaaaggggaattaaggatgactggctaattggggtattgggatttccttggtggacttgatgaaaatggtcctgaaaggtatcctagacacctgtcntgggttggngtggttctgtggacat

SEQ ID NO: 534094 - DNA, 504 bp, Homo sapiens
  misc_feature (97)..(98): n is a, c, g, or t
cccaaaacatgttgcttaggtcaagccagtctcccccagcaggggtgaacaatttttcccacagcctgcctggcccaccctttctccgagggacggnntccagtgggccttatcttccccatgccaggtgtgatggttaatactgtcaatttaattggattgaaggatacaaagtattgatgctgggtgtgtctgagagggtgttgccaaaagagattaacactagagtcagtgggctgcggaaggcagacccacccttcatctggtgggcaccatctaatcagctgccagcgaatgtcaaccagaaaaacgtgaaaaggagacgaacagcctcgcctcccagcctacatctttctcctgggctggacgcttcctgccctcgaacatcggactccaagttcagctttgagactcgggctggctctccatgctcctcagcttgcagacggcctattgtgggaccttgtgatcgtgtgagttaatacttaataaactccccttcat

SEQ ID NO: 534095 - DNA, 1080 bp, Homo sapiens
gaccaagaccagattgtgactgttgcggatggagatggacacctagatgaatgatttaatccaccaacaattgtggcacacatggcatcgtcttccccacgccaggactcagaggctgagcccagggtgcatgagaggctgagcccacagactccggggtgcggaatggagctccccgagcgcggcttatcttatcaagggagctcacactcttttacaatcaacccatcgaggatgagggctccattcagcacatctcccaagctcacacccatggacaacagacctccggggcagggctcactgattccatacccacacacactcaagctccattcatcatcacacaatgacccaggcataacgttagccacactggcagcagggggaacatgaccctgagcagacaggcgctggacccatgatccaagcccatgcattaccgagatgaactcttgataccagctggaatcgtcatccgggatgcttcctccgacagaccacaggtcaagtgcaggtacagtgtcttagcgcgtcagcatgtccagtcggagccaggctccagccattcaatccccacagcaaaatagccagcttcgacaatcaggctcactatgacacggcgtcattcagactcatctgccataactacactggatatcctacactccatagctaatgtacacctatagcacagctgaagggttcaacaatacgcatcgcaaggaagacattgactaaacgatacactacatcggcattacaacatagcacacagctgcgcgatcgaccacaaaaaaaacagaaagagacaccacgacaacacaatgaccacagaaatagacaacaggacccaaaaacacaatgaacaacaagcacagaaacgaacacacaaggaacaagcaccaaaagagaagaacacaaccactgaccacaaactagcccacaccgacacagaaccacacaaaaaacacaccaagaaggataaagcacaacgacgacccaaagcaagaacaaaaggacacagaacacgaaccagaaggaaccaaacaaaacataaaaaacaaaaagcgaacagaa

SEQ ID NO: 534096 - DNA, 428 bp, Homo sapiens
aacatgcggaacggggtagacttgttgagaaggaacagggcgcaaggtcgcaacggtgtgcacgtagatgattacggcgatgtccagtagatgaaaagcttcatgtactgccctggaagtatgggctgcccgcccacagctggctggggcatgggcatcgatcgagtcgccatgtcactcacggactccaacaacatcaaggaagtactttctgtcccctgccatgcaacccgatcacgagaaagtagaatgtagtcaagccacggatatcactggaaaacagcaacgaggtcggcactgctgtctagaaattagtaatcggcaaggtgtataactcaggcgtctctgggtagctgcgagagatcaaggtctgcaagggaagtcttgtgtgctgcgtttccattgtgacaccggatgtccgcttgggg

SEQ ID NO: 534097 - DNA, 1337 bp, Homo sapiens
ggcctgcatctgcgccgcccaatgctggcctgcctgcacccccagccccgccaggcccgcactccgctgcccctggcctcctgctaccatgtggcatgcctgcaatgctgctgccctgccctgccctgcctgacccctgtgactgctgaccatgtgccatgtgccatctgtgccctgcatggaagacttgcaggcttgtcggtggacagatggtttccatgccccaggtaccccgcgaggccccagagcagtcccaagactgaacagcttcgtccggtgccagaacgactaaaggaaatccagccccgtgcagacaggtcaagccggaccccagccatgacaatccgcagcaggaccatggacaccatctctgagacttgcagtcatgcctgcaaactggccctgggagcttgggtgtgcaatgagtcctgggcaggcttgaatgtgccaagtgcccaggatgctaggggagtccatgccaccccagacggccgagaggacctgacctgaggacgccatgtaggctgagaagagcgcaacgactaccagacgctatccatgaccctaggacccagaaccggacctgaccggggctcagtgcttgcccctacagatgttaccaaggttgctaggctggcagattgttcctgcaggcactgtgacaaccatacgctggagcagtagcttccaaaaatacagcatccagaggaacgcccaaccatatatagccaaatggtaccataccgatcgctgtccagcgaccacgtgactgccagataaccggcagatacaatggagacactccgcaaaaaggacgagcaccagaacaaaaagcacagagcaaaaccaggagcatcatacccagcatcccggcccagggaacagcccagcacaccccacgcattcgacaacagacagccagcccacgagcaggccacgaaaacaaacatcgaccaccagaccaacatggcggtggcgcactgaagagcaggacaggagtacaagaccccccagagcacaagcagtcaaggcgcgctcctacagacagagagaaggagacttatagacacaaaagatagttgttgccacgcgccaagagaagccaccaggcccccgcacaccctccaccaccagcaacgagagcgcaacacaacgactacacaagcaccgcctaacaggaacgaccaagaacaaccaaccggacacagccgcaaacaacaccgacagagagacacaaacaacaaacaaaaaaaaagcaggcacaacccgggactagatagcccaagacagagggagaaaggagagcatgagcacaagaaacaaaagacgcgcacaaa

SEQ ID NO: 534098 - DNA, 695 bp, Homo sapiens
agcgggaggtcaaggtgggcggataacctgaggtcaggcatttaagaccagagtgaccaacatggagaaacccattctctactaaaaatacaaaattagccaggcatggtggtgcatgcctgtaatcccagctacttgggaagctgaggcagaagaatcgcttgaactcaggaagcagaggttgcggtgagccgagatcgtgccaccgcactccagtctgggcaacaagagcaaaactatctccaaaaaagaaagaaagaaaaataggccaggcgcggtggctcatgcctttaatatcaacactttgggaggctgagcttggcagatcatcggaggtcaggagttggagaccagcctggtcaacatagcgaaaccccatctctactaaaaatacaaaaaaaattagcctggcatggtgatgtgtgcctgtaatcccagctactctggaggctgaggcaagagaatcacttgaacctgggaggtggaggctacagtgagccaagattgtgccactgctctccagcctgggcaacagagcgggactcggtctcaaaaaagagaaacttaaacaaattaaaccgggcatggtggacatgcacttatcatcctaagctattcacgtgagaactgaaggtaggacgattgcgtggatcctgaagaggtcgacagttgcattgaagcagtgaatgtaccaa

SEQ ID NO: 534099 - DNA, 1373 bp, Homo sapiens
gggctggtgctcgacggttccgagagcgcggagtagacgatagcctgagatcagagtctcgcccttgggggccggccatgacgtgggtcgaagctgaatgcttggatcgtccactgtgcggtcaatgaatgtcagtgctggactgatggaatgcatcatgggcttcaattgatcggaccgacgcttaccctgacattacgtcctagcagtcagcccagaacggacgtcctaacagagcttccgtgagagcgtgtgtgagtcagtttacgctcagcttccagccatggaatccatcatgcgtgggctacgtctcccatactttcagcggacgatggtgggcctacagacggacccccgaatcatacgaatgtacttctatcacccaaagcacaaggagtccgatcgttacgctccatatcttgacttgcgcagtgtgacttagcctgaaagaatcgagcgcgtacagaaggcaatggatacggaggcgaaggctcaagagcttgctatacaacccttccccagatgcactccaagaaagagcttgcgatctcttcgctgagaggatcctttcctgggggagcagccatggatagccctggaagaggggtggcccccattcgtaaccttcttacctaggggggggacgtaggaaaccagaaaggtaggaggggctccaagacctaccattagcttgaagccaagggccgtgggtgtactattcaccgcgactttgagaaacctaggaggcgcgacggaaaggagagttcctggccagaggaaccgttttcgttggtgagaccacagaagggcggaaaaaccaaattgttgtggtcgggaagagttttgcaaaaagagccaagtaacattctaaaatgggcaccttttccaggatccccggtgggcgactttggtatgcctttgaacgcaaatccctacactgtggaaccctcggactctggcgcttaggggtagattatatgggccaaacggctcagattgggggaacacgttggctttggcatagacatgccttgggagcgcatgaggatcccgcgttgtgcgaatgaatttcctttcccctggtgaacacacttcgggcggccccgtggatagcacgcctgactacggagaaatgacaatcggagttttgtggttcagaatttccaagttggccccccgggggcgttaaccgtttggagcagtttctgcgatagagcgggtcacacacagctacccaggcccacacactaaaaaggaattccgcttccaaagggcggtgagcccaaggcaggggacgacgcgctccggaagcaaacattggcgatgcggatggccgacgccactgggttggcttgggcaagctggttcaacag

SEQ ID NO: 534100 - DNA, 141 bp, Homo sapiens
  misc_feature (20)..(20): n is a, c, g, or t
aaaaagaaaggaatttttancttggggtttttgggggcccccccccccccccggggggcccaaaaaaaaaaaagggcttttcccttttttcaaagggggtttttgggggggggggcccccaccccccccttttccccccca

SEQ ID NO: 534101 - DNA, 266 bp, Homo sapiens
tggatgggtggttccgatggggaggtggatttcatgagcggatgtgatcagtgatggaggagtgtggcgtaagcatgagatgggattgaggtgtccactcttgtataggacatgagtgtgaacagatgcagtccataccatactgtacccaaacatgtacccaaatcacaggtagtcctgggtgggtgataactaggtctcgatggcagcttagggacgaggagtatcaggccaggggtggtcgtaacactgcaatattgtgtgac

SEQ ID NO: 534102 - DNA, 2114 bp, Homo sapiens
gtggacagaaaattcaatcctttatttttttctctgtaaatatgtacagtgcacgggctatgagatagcaacaaaaaatgcatagttaatggtcatagactttattccaaaacataattggaaaatagaaactgagccattgccaaatggtaaagaaatgaaaagttttcacagtgactactgaatataccaagagcttttggcagtactgctggctttctgggtgattaattaggtaaacttgaatattcccagtaaatgtttgagaatgcataaaattataccaatttaaaaatataaatttttgccactgttttgtgaacggaggatttgtacgctaaatttcatccttatttggcgtcaaagttgatgcaaagtttatgtaccatgagacttctagtgattgcctactttcacatttatttaaatttttgtgaaagaaaatacagttttaaaggctataggaatgtgttatatgtaccttaaacagataatttaattttagcaatttatcataactgatacttagctaacaattgtccataacttgtttaagtgtaagaaataccatttcaggaatgaaaaagaaggaatactactttctaagaaagaagatcttataatagacatatttagtaggttaaactactcctttgaaagaataagttttggttcaaagtcaataatgaagacgagatttgtttttctcttctctggctgatttttaaggatattatgtagttcatttagttaacagaattgaaatgtttgatatggcaagataggtatggtaatttcaaagtgaattgggaattcctctggctcatagaacccttttttttttcctttaagtattcttgagatacaaaaaaaaaaagtaaataaaatttcaaaaaaaaagttccggatctgtttttaagctccatctggtcctcataacctgcaagatttttcttaaaacctttcagctgaaagtgggggtaaaggtggagtaatctgtggatttgtttctgttgtcttttaaaatgtcaaatatataatatgtaatttttttaaaaaccaccagatacagaaatgtgctttaacatcagttgaaacctaaattttcttatgttgtggtgattgtattaaaaagggataaaagaagagtgtcaaacatggttaaatatattgtactcatttatgttgaatacgtattaaaattaagacaaatggaaaattatactttgagtatataatttgttaaatattactttatatggtaattttatgtataatttcatatattggtaaaattcaaaactacacttgagaatttttttatcttaagtttggggtgaatggggtggatgagactgattgaatagaaaagggctaatggcccaaacattatatagatttctttttttcagtcagaggccttatttgatattttataaataaatgacagtttttatttttaaactttttattgtttttgggaaagtattccttaatttaatgacacattcattcagatacttcttatccctgctaataaaggaaatctatttcaagctacaccattgagattaagtctgaggcagttcattgaggcagctctactataaaagcttacttgataaactgcctcagacttaatctcaatggcccaaacattatatagatttctttttttcagtcagaggccttatttgatattttataaataaatgacagtttttatttttaaactttttattgtttttgggaaagtattccttaatttaatgacacattcattcagatacttcttatccctgctaataaaggaaatctatttcaagctacaccattgagattaagtctgaggcagttcattgaggcagctctactataaaagcttacttgataaataattatttttgtaaacaagttgggttaacttattcttcgtctttttgcttggatatgaatttaaggtcttcatgtttaaagacatttactttgttatttagtgacacatttccatcctattttttttttttttttggttgttgttaaacagaaccttaagtttatgtttgaggtatgtactgcataggaacctattttattattaaagatgaatgatt

SEQ ID NO: 534103 - DNA, 491 bp, Homo sapiens
  misc_feature (134)..(134): n is a, c, g, or t
  misc_feature (176)..(176): n is a, c, g, or t
  misc_feature (202)..(202): n is a, c, g, or t
  misc_feature (207)..(207): n is a, c, g, or t
  misc_feature (212)..(212): n is a, c, g, or t
  misc_feature (215)..(215): n is a, c, g, or t
  misc_feature (231)..(231): n is a, c, g, or t
  misc_feature (234)..(234): n is a, c, g, or t
  misc_feature (236)..(236): n is a, c, g, or t
  misc_feature (240)..(240): n is a, c, g, or t
  misc_feature (247)..(247): n is a, c, g, or t
  misc_feature (257)..(257): n is a, c, g, or t
  misc_feature (260)..(260): n is a, c, g, or t
  misc_feature (268)..(268): n is a, c, g, or t
  misc_feature (271)..(271): n is a, c, g, or t
  misc_feature (275)..(275): n is a, c, g, or t
  misc_feature (277)..(277): n is a, c, g, or t
  misc_feature (284)..(284): n is a, c, g, or t
  misc_feature (294)..(294): n is a, c, g, or t
  misc_feature (302)..(302): n is a, c, g, or t
  misc_feature (304)..(304): n is a, c, g, or t
  misc_feature (306)..(306): n is a, c, g, or t
  misc_feature (317)..(317): n is a, c, g, or t
  misc_feature (319)..(319): n is a, c, g, or t
  misc_feature (321)..(321): n is a, c, g, or t
  misc_feature (338)..(338): n is a, c, g, or t
  misc_feature (355)..(355): n is a, c, g, or t
  misc_feature (388)..(388): n is a, c, g, or t
caccagcacccacagaaccacagtgccctcaacaatgacacccatgctcgtgacagacacagaggctttctggcagccacagccctggtttgtggtggtgttgacagcaactggtgctcttctcctcttggccntaggctggcttcttggcaggctcctccaggggttggcccagntgctgcaagcacccagcaaaccagcncaggntttgntgntaaacagcatccaggnaantnaggnatccatngagggtttcntgnaggcaccnaanatgnanatgtccnaggcacccancagtgtanantntgcgcattttnangncagagcacaggactccngtccggaagagactacntgtttaacacacacacaggagcccggcgctggntctgaggccaagtagctgtcttactatgtgtggaatttctttttcacaccatcatgggctgtattttcaagttgattcataataaacaaaattacaaaaagaa

SEQ ID NO: 534104 - DNA, 1161 bp, Homo sapiens
  misc_feature (25)..(25): n is a, c, g, or t
ttttcttagtgtctgatggcctggntgtctaattgggactccgagccggggctatttctggcgctggcgcggctccaagaaggcatccgcatttgctaccagcggcggccgcggcggagccaggccggtcctcagcgcccagcaccgccgctcccggcaacccggagcgcgcaccgcaggccggcggccgagctcgcgcatcccagccatcactcttccacctgctccttagagaagggaagatgagtgagtcgagctcgaagtccagccagcccttggcctccaagcaggaaaaggacggcactgagaagcggggccggggcaggccgcgcaagcagcctccggtgagtcccgggacagcgctggtacgggagtcagaaggagcccagcgaagtgccaacacctaagagacctcggggccgaccaaagggaagcaaaaacaagggtgctgccaagacccggaaaaccaccacaactccaggaaggaaaccaaggggcagacccaaaaaactggagaaggaggaagaggagggcatctcgcaggagtcctcggaggaggagcagtgacccatgcgtgccgcctgctcctcactggaggagcagcttccttctgggactggacagctttgctccgagtcccaaacacgacgcacagatccatatagctcggcctgcactgaccgaaatcgtagtatagagagccaacgcagaaccacacaaccgcaacacgcaccacgacccatgataaccaaaagggaccaggaggtaacccccagcgatagaaaggagcaaacaaacagcacggcacgaaccaagagaaccaccatacacacagagaactcaacccatcacgagaacaataaccgaccaagaccacacgccaacaccccaatgaacaagaacccacacagcgcgacgataacaagctcaaagcagaagcgcggacggcgcggcgacgaggcccagacgccacacaacacaacagacagagagcagccgggagaacgaccagaaacccgggcgacaccagcaaagccacgagccgagagcacaacacacagagcaaagcaacagcacaaacagcaaccagagagacacaacagcaagcaaaacgagcagcacaagaaagaccaccgcactgaggccacagacacggcgaaa

SEQ ID NO: 534105 - DNA, 1128 bp, Homo sapiens
  misc_feature (25)..(25): n is a, c, g, or t
  misc_feature (787)..(787): n is a, c, g, or t
  misc_feature (806)..(806): n is a, c, g, or t
  misc_feature (819)..(819): n is a, c, g, or t
  misc_feature (882)..(882): n is a, c, g, or t
  misc_feature (895)..(895): n is a, c, g, or t
  misc_feature (898)..(898): n is a, c, g, or t
ttttcttagtgtctgatggcctggntgtctaattgggactccgagccggggctatttctggcgctggcgcggctccaagaaggcatccgcatttgctaccagcggcggccgcggcggagccaggccggtcctcagcgcccagcaccgccgctcccggcaacccggagcgcgcaccgcaggccggcggccgagctcgcgcatcccagccatcactcttccacctgctccttagagaagggaagatgagtgagtcgagctcgaagtccagccagcccttggcctccaagcaggaaaaggacggcactgagaagcggggccggggcaggccgcgcaagcagcctccggtgagtcccgggacagcgctggtacgggagtcagaaggagcccagcgaagtgccaacacctaagagacctcggggccgaccaaagggaagcaaaaacaagggtgctgccaagacccggaaaaccaccacaactccaggaaggaaaccaaggggcagacccaaaaaactggagaaggaggaagaggagggcatctcgcaggagtcctcggaggaggagcagtgacccatgcgtgccgcctgctcctcactggaggagcagcttccttctgggactggacagctttgctccgctcccagcggccccgccccttccccaggcccaccatcaccaccgcctctggccgccaacccgcatcttccacctgtgccctcaccaccacactacagcagcacaccagccgctgcagggctcccatgggctgagtggggagcagttttacccntggcctcagttcccagctncccccggccaccnatgcatacagacatgccctcctggacaaggctaacatcccacttagccgcaccctgcacctgntgcgtccccactnccnttggttggtggggacattgctctcctgggcttttcggttctggggggcgcccatctcgtgcttccgcttcagctgtttcccatcgtggcttcccatacgtggggccatgggaggggttacccctggcctttaaaaggtggcccaaagccccatctcaatcctggcaacgccactaactccaattgccccctggatatggcagacaggttgtggagcaattgggaggaagg

SEQ ID NO: 534106 - DNA, 408 bp, Homo sapiens
gcggccccgacctactactactaaattcgcggccgctcgaccctgcattagtgagacctggcctgccacaggagtaggtcaagtactaatctagcatactcttaggaagttgaacattgtatttctatttttatattcatcagaactaacatggccacactcagctggaaggatatctgagaaattgagtatatctagggaagaaatttgcccagttaacattcagaagttctgttactaaggacaaagtggagaatggattttatagtactactagtactagtagaattctctactagagtggatgcattgaaaagtgtttcaatttaatacatgtttcagagaaaacactaatgcatataaaggaagcacctactctgtgttagagactacattgttagtcgacgc

SEQ ID NO: 534107 - DNA, 336 bp, Homo sapiens
tgggttgggccagggcctttgggtcccctccttgcttgggcctttcacagtgcaagccccccaccctaggcccttttgggtggtggtggaatggttgggaaggggcaaaaccaggtgaggagtcctccctgggggggcatactttgcattacagctggggaggttaaaacctggggggccccagttggtttttggactccaaagcccaggacccttccaaatcctgcttggggggccccgtggccaggagcccacccagcccttcccttttttgcgagggttttttgtttttttgattataaaaaaacccctgttggtggggggaaaaaattacca

SEQ ID NO: 534108 - DNA, 1057 bp, Homo sapiens
  misc_feature (25)..(25): n is a, c, g, or t
  misc_feature (716)..(716): n is a, c, g, or t
  misc_feature (735)..(735): n is a, c, g, or t
  misc_feature (748)..(748): n is a, c, g, or t
  misc_feature (811)..(811): n is a, c, g, or t
  misc_feature (824)..(824): n is a, c, g, or t
  misc_feature (827)..(827): n is a, c, g, or t
ttttcttagtgtctgatggcctggntgtctaattgggactccgagccggggctatttctggcgctggcgcggctccaagaaggcatccgcatttgctaccagcggcggccgcggcggagccaggccggtcctcagcgcccagcaccgccgctcccggcaacccggagcgcgcaccgcaggccggcggccgagctcgcgcatcccagccatcactcttccacctgctccttagagaagggaagatgagtgagtcgagctcgaagtccagccagcccttggcctccaagcaggaaaaggacggcactgagaagcggggccggggcaggccgcgcaagcagcctccgggagcccagcgaagtgccaacacctaagagacctcggggccgaccaaagggaagcaaaaacaagggtgctgccaagacccggaaaaccaccacaactccaggaaggaaaccaaggggcagacccaaaaaactggagaaggaggaagaggagggcatctcgcaggagtcctcggaggaggagcagtgacccatgcgtgccgcctgctcctcactggaggagcagcttccttctgggactggacagcttttgctccgtccaccgcccgccttcccaggcacatacacgcttgtgcgcaccccatttgcactgtcctaacaatagaagcaacacgtgagggctcccatgggctgagtggggagcagttttacccntggcctcagttcccagctncccccggccaccnatgcatacagacatgccctcctggacaaggctaacatcccacttagccgcaccctgcacctgntgcgtccccactnccnttggttggtggggacattgctctcctgggcttttcggttctggggggcgcccatctcgtgcttccgcttcagctgtttcccatcgtggcttcccatacgtggggccatgggaggggttacccctggcctttaaaaggtggcccaaagccccatctcaatcctggcaacgccactaactccaattgccccctggatatggcagacaggttgtggagcaattgggaggaagg

SEQ ID NO: 534109 - DNA, 1094 bp, Homo sapiens
  misc_feature (25)..(25): n is a, c, g, or t
  misc_feature (753)..(753): n is a, c, g, or t
  misc_feature (772)..(772): n is a, c, g, or t
  misc_feature (785)..(785): n is a, c, g, or t
  misc_feature (848)..(848): n is a, c, g, or t
  misc_feature (861)..(861): n is a, c, g, or t
  misc_feature (864)..(864): n is a, c, g, or t
ttttcttagtgtctgatggcctggntgtctaattgggactccgagccggggctatttctggcgctggcgcggctccaagaaggcatccgcatttgctaccagcggcggccgcggcggagccaggccggtcctcagcgcccagcaccgccgctcccggcaacccggagcgcgcaccgcaggccggcggccgagctcgcgcatcccagccatcactcttccacctgctccttagagaagggaagatgagtgagtcgagctcgaagtccagccagcccttggcctccaaggcacggaaaaggacggcactgagaagcggggccggggcaggccgcgcaagcagcctccgggagcccagcgaagtgccaacacctaagagacctcggggccgaccaaagggaagcaaaaacaagggtgctgccaagacccggaaaaccaccacaactccaggaaggaaaccaaggggcagacccaaaaaactggagaaggaggaagaggagggcatctcgcaggagtcctcggaggaggagcagtgacccatgcgtgccgcctgctcctcactggaggagcagcttccttctgggactggacagctttgctccgctcccagcggccccgccccttccccaggcccaccatcaccaccgcctctggccgccaacccgcatcttccacctgtgccctcaccaccacactacagcagcacaccagccgctgcagggctcccatgggctgagtggggagcagttttacccntggcctcagttcccagctncccccggccaccnatgcatacagacatgccctcctggacaaggctaacatcccacttagccgcaccctgcacctgntgcgtccccactnccnttggttggtggggacattgctctcctgggcttttcggttctggggggcgcccatctcgtgcttccgcttcagctgtttcccatcgtggcttcccatacgtggggccatgggaggggttacccctggcctttaaaaggtggcccaaagccccatctcaatcctggcaacgccactaactccaattgccccctggatatggcagacaggttgtggagcaattgggaggaagg

SEQ ID NO: 534110 - DNA, 357 bp, Homo sapiens
acgtgccgcaacgcttcaacggcgcacgacaggggccgactctactcctagggtcccgagtcgccttccctcaccccgtaagtgacggcctgggacattctaacttaccccctcagcgtcagccactgaccggtcccatctaccacttttctagtgtctccttaggccccagcacctccctcctctcaaactccagtatccagcacacccgtgggtgcccagcactgccttagaggaggctccttctacctaaaccaggtgtcctatgggctatctcgtatcagctaggctgtggacaccaagaatccagaatctgggttcacttagtgtactgcaccccttttctgctccctgata

SEQ ID NO: 534111 - DNA, 1160 bp, Homo sapiens
  misc_feature (25)..(25): n is a, c, g, or t
  misc_feature (284)..(284): n is a, c, g, or t
  misc_feature (301)..(301): n is a, c, g, or t
  misc_feature (819)..(819): n is a, c, g, or t
  misc_feature (838)..(838): n is a, c, g, or t
  misc_feature (851)..(851): n is a, c, g, or t
  misc_feature (914)..(914): n is a, c, g, or t
  misc_feature (927)..(927): n is a, c, g, or t
  misc_feature (930)..(930): n is a, c, g, or t
ttttcttagtgtctgatggcctggntgtctaattgggactccgagccggggctatttctggcgctggcgcggctccaagaaggcatccgcatttgctaccagcggcggccgcggcggagccaggccggtcctcagcgcccagcaccgccgctcccggcaacccggagcgcgcaccgcaggccggcggccgagctcgcgcatcccagccatcactcttccacctgctccttagagaagggaagatgagtgagtcgagctcgaagtccagccagtccccccccccntttttggggggcccccnttccaaaagcccaatgcggaaaaaaaggacggcactgagaagcggggccggggcaggccgcgcaagcagcctccggtgagtcccgggacagcgctggtacgggagtcagaaggagcccagcgaagtgccaacacctaagagacctcggggccgaccaaagggaagcaaaaacaagggtgctgccaagacccggaaaaccaccacaactccaggaaggaaaccaaggggcagacccaaaaaactggagaaggaggaagaggagggcatctcgcaggagtcctcggaggaggagcagtgacccatgcgtgccgcctgctcctcactggaggagcagcttccttctgggactggacagctttgctccgctcccagcggccccgccccttccccaggcccaccatcaccaccgcctctggccgccaacccgcatcttccacctgtgccctcaccaccacactacagcagcacaccagccgctgcagggctcccatgggctgagtggggagcagttttacccntggcctcagttcccagctncccccggccaccnatgcatacagacatgccctcctggacaaggctaacatcccacttagccgcaccctgcacctgntgcgtccccactnccnttggttggtggggacattgctctcctgggcttttcggttctggggggcgcccatctcgtgcttccgcttcagctgtttcccatcgtggcttcccatacgtggggccatgggaggggttacccctggcctttaaaaggtggcccaaagccccatctcaatcctggcaacgccactaactccaattgccccctggatatggcagacaggttgtggagcaattgggaggaagg

SEQ ID NO: 534112 - DNA, 574 bp, Homo sapiens
tcagaagaggccaggctggtctcgaactcctgacctcaagtgatctgctggccttggcctcccaaaatgctgggtctagaggcatgagccaccgtgcccagcctaagaatgtcactttctaacaggtccaagaactccaagtttatcttgggaccttaagagaagagaatcactcaactcacaggcatttgaggatacaaacccatgactgggcttggctttaaaaggtcttatctgagactccttgtgaaacagttccatcaaagccaatccaaaaggcctatgtagaaataattattcctcttgcactttatgcaaataatcagaccaagtgtaagactacaatctattttgcaaacaactcagtcctatcatgatttatgtttttttgtttgttttttccaaaaatgaggactagagagaaagaaattgtgtttcaaaacttatcatacatttgccattaaattctaaactcactagttggttttaagtttttgcctacagtttagatgaaccttgcttggtcctgtgaacccacaagcaggctccagctccaggttaaaaaagaaccaaa

SEQ ID NO: 534113 - DNA, 397 bp, Homo sapiens
  misc_feature (47)..(47): n is a, c, g, or t
tgagctagagtctcactctgttgcccaggctggagcgcaatggcaantcttggctcactgcaacctctgcctaccacgcgattcttgtgcctcagtttactgagtagctgggattacaggcgcattcagccatagccggctaacttttgtatttttagtagagactgggtttcaccatgttgcccaggctggtcttgaactcctggcctcaagtgatcctcctgcttcggcctcccaaagtgctgggaacacaggcatgagcaccttgcccagcctagaagatgttaatattatgtttgaattttaagatgatcaatattttttaagaaaaaatttatgggagaatcaactaaacaatgatcttttgaattctttcctacttctaaggaaattaagt

SEQ ID NO: 534114 - DNA, 166 bp, Homo sapiens
  misc_feature (45)..(45): n is a, c, g, or t
  misc_feature (71)..(71): n is a, c, g, or t
  misc_feature (96)..(96): n is a, c, g, or t
tagaggatccccatgcctcatccagtggcagtgtcagatatgaantgttaaggacagaggaaatgctccangattaaaggaaggttaagagaacantgaaatttctgtatttggtaattgtaactggtggaattaatttgcaaagaggaagattttggtattttaa

SEQ ID NO: 534115 - DNA, 387 bp, Homo sapiens
  misc_feature (37)..(37): n is a, c, g, or t
  misc_feature (77)..(77): n is a, c, g, or t
  misc_feature (81)..(81): n is a, c, g, or t
  misc_feature (92)..(92): n is a, c, g, or t
  misc_feature (107)..(107): n is a, c, g, or t
  misc_feature (118)..(118): n is a, c, g, or t
  misc_feature (122)..(123): n is a, c, g, or t
  misc_feature (131)..(131): n is a, c, g, or t
  misc_feature (133)..(133): n is a, c, g, or t
  misc_feature (135)..(135): n is a, c, g, or t
  misc_feature (138)..(138): n is a, c, g, or t
  misc_feature (140)..(140): n is a, c, g, or t
  misc_feature (142)..(142): n is a, c, g, or t
  misc_feature (144)..(144): n is a, c, g, or t
  misc_feature (147)..(147): n is a, c, g, or t
  misc_feature (162)..(162): n is a, c, g, or t
  misc_feature (190)..(190): n is a, c, g, or t
  misc_feature (202)..(202): n is a, c, g, or t
  misc_feature (210)..(210): n is a, c, g, or t
  misc_feature (222)..(222): n is a, c, g, or t
  misc_feature (232)..(232): n is a, c, g, or t
  misc_feature (235)..(235): n is a, c, g, or t
  misc_feature (239)..(239): n is a, c, g, or t
  misc_feature (246)..(246): n is a, c, g, or t
  misc_feature (250)..(250): n is a, c, g, or t
  misc_feature (259)..(259): n is a, c, g, or t
  misc_feature (261)..(262): n is a, c, g, or t
  misc_feature (265)..(265): n is a, c, g, or t
  misc_feature (268)..(268): n is a, c, g, or t
  misc_feature (295)..(295): n is a, c, g, or t
tatctgttttctgaaaaggggcacataggggcctggnagcaggtgggggtggtagctggggcaggtcacacactganatcnttctcatcgcncgttttgggaacagnttccattaatnggtnnccaggacntncntcntntncntcnttggcctcgctggcnttagagttggggacccagtaggccaganttaatgcagcgntgtatgtngtattttgcgtnggtggggtcnatnttgntgatggngttntgcagcatntnnacnttntttatatcgaagcacttttggagttcntcagggagggactcatagacctcgacggggtccaggccgccagggccgagccgcttcttgcgctcctcctcctcgtactccttcatggcctt

SEQ ID NO: 534116 - DNA, 954 bp, Homo sapiens
gctttaaaaattattagagacaagagtaccaaagcggtgtgtgtatgtgtgtgtgtgtatgcatgcttgtggattggaaaaactttggagactgattacttttcattatatatgtgtcacagtgaaacagcttttatgtgtcatgtaagattactgcttgcctctctaaggaaggtcgtgactgtttaaatagacgggcaaggtggcaacctttctgaaagatgacgcttctgaatatcaagttgtctgctagatcatggttctgtattgaactaacaaggtttgccagcatctgctgacttatataaagctttctgattcctactaagctttcacagatctcaacacaacatgttcaatgtcgcaaatttctgtggaggctctataccagcttaggctttctggtgcagagagtgaggacagcattctttcctccactaagtttgtcttatcttgtcttctggatagatctgactcttaagagactaagggaattaaccaaactaacagattttaagtcatctggtggaacaacggacactttaacgattgtccagggctggccggggtgactcgcatctgtaatcccagcgctatgaacggccggcgcaggcggcaaccacttgacaggaagtaccgggaccaggcggggccacgcgtcggcgaaaccccctgtcctctaatcaaaaataccaaaacactcgtcacagctctgcgcaccattaataccactcaaaaacacgtcaaacacccgcactcctctaccgggcacaggacaccaacagtatgggacaatcaccaaaaagagacaacacgtgacaggcattcagctcgcggccctgaccccaccacaccgccacccctcacaccacactccaggcgcgactacagtgacggcacgcaccacccgggacgccacccacccacgggacagcacacaccatccgctcacaa

SEQ ID NO: 534117 - DNA, 983 bp, Homo sapiens
ggaaaactgctccccaccatcaccaccgcctctggcgccacccccatcttccacctgtgccctcaccaccacactacacagcacaccagccgctgcagggtcccatgggctgagtggggagccagttttcccctggcctcagttcccagaatcccccaccgacccacctcacacgcatacaacacaatgccctcctggacaagggctaaacatcaccacttagcctgaacaccttgcaaactgcttgagcgtccccacaatccccttgagtggtgggggacattatgcatcctcctgggggctttatggggatatgggggagccccatcatactgctcccttcaccttgttttccccatcctgtgtttcacccccaataagttggaggccttggcgaagaggtttccccgtgcgacctctacacaaagggtcggccccaaaggcccaagtcatcaaatccttggccaggcaccgtactccaacttgcccattgggaacgagcaagacagggtggtaggcccaaaatgggagtggagggatagctggcccccccacgggatttaccgccacatggcaagaactgtagtttgtcaaccaacgtagggagcgctccaccttttttcaatacctatcgccacaagttttccactatgtcccacgtaactaaaggctggaacacagcgcacccatttcggctccaaaggaaagggcaggcagggggtgaagtcccactaatgccctcttcacatgtgagcgacaggcccccctcgaacttccgcgcgggatctgacgtacatacttgcaggcgatgcagaacgacaagcagatattcgtcaacgagaaggccaaagaccccatgaggccgcacccctgcagctgggctagagatggagcccgcaaaaacgaataggcagccgcaaacacgacacatagcccgcgcacacaatggggacaaccaacaagggcaccggcggacacaccac

SEQ ID NO: 534118 - DNA, 175 bp, Homo sapiens
cactgggtcgtatctgtccctcataggatggtacaagcatatagtgcacagtggcccgtaatagcctgcagtctcgatcatttcccatactaggaactggtacaagatgcacgtcacaggctcagctcctaccccactagcatcttactctacctctcaagaaccagcgcagccc

SEQ ID NO: 534119 - DNA, 296 bp, Homo sapiens
atttggggggggattttttcaaatccccccggccctttttcctttttcctaaaacgggcccttttttggggggtccctattcccagcgggttgccttttaggaggttgccgaacccgtggggcccctaccctgtgggggggctttttgccggtccctcccccccctgggcccccccccttttttttttttttgaatggggctacccggtatacattcccccccccccccccccggggggttgtgggggtccaatggaattatgttccggggggatcccgtttttttgtttagggga

SEQ ID NO: 534120 - DNA, 670 bp, Homo sapiens
  misc_feature (492)..(492): n is a, c, g, or t
aaaggttaatgattcattgaatctcagcatgagaacagtggatgcatacacagaatgatgaatggtcaagtgagagttgttagggtaaaaactaaaaatagaactaccataccatacagcagttctttcgcctattcataaaatactaagcctttattgagttaggagagctcgttatgtaccgggttacaagacttttatcaaatatgatgtacaaatgtttcatcctattcagagggtgaccttgcaactatttgagagcaacttttaaagcatctggcctctcatgaaaactttgaggaaagctgcgtatcttttgtttggtgccacttagatgcagcgtctatattcattctgacaagaggaaggtgataacagacaaggacaaatgagagaatgacgacttcacggttcatattagtaaggcaattatctaccatatgaggtttcactatctggcttacattctgttagtgggctagaagccacgtnggcgacacatgcacgtcgtcacctatttcatctaccctgatggagcggaaactacagcacatgactaaaatcctcccagaagaaaccaactaaggttttaaccatggaaaatgttttgggatgcttagcacactaatcaagctgattggctacgttaattggttcattacaaaacaca

SEQ ID NO: 534121 - DNA, 435 bp, Homo sapiens
  misc_feature (430)..(430): n is a, c, g, or t
cactatcatcttctcaggtattcttctcttgctttgtggcaccactgctctttcccgcacgcacgtccaggacatcactgaaggaaagacacaggtttgctggcttcatctctgctgcgattgtgatgatcgccattccttgccctgtggaatcttctggaacccttgcatatatctcggtcttgtccagctgttgtaattgccaacctgaaacggatgtttatgcatgctctgtgacattcctcgtctgttgagaccgaataagattgatgcttttatctgggtttttaccgtgtatagtgtccaatcattctggggctggatctcggtttactagctggccttatatttggactgttgactgtggtcctgagagttcagtttccttcttggaatggccttggaagcatccctagcacagatatctacnaaagt

SEQ ID NO: 534122 - DNA, 339 bp, Homo sapiens
  misc_feature (169)..(169): n is a, c, g, or t
cctaaatgttaacatctaacattcacagagcagaattaccaaagctaagaaattaacattggtaccacactactaactaaattacaggctttattcagatttcagctgttttcccacaacacatcctataaaatattttaaaaacattaatttctccacgatgtcccanaactcacaaggttatagttaaacattttaattatatttcaaattaccactgtagctaggaaacaaaggagctaaagttcctatattttctattatctggcaaaacaaaaaggttggcttaagcaggaactttaaacacattcaaaaacccatttataagggtaagaacta

SEQ ID NO: 534123 - DNA, 407 bp, Homo sapiens
  misc_feature (14)..(14): n is a, c, g, or t
  misc_feature (35)..(35): n is a, c, g, or t
  misc_feature (44)..(44): n is a, c, g, or t
  misc_feature (79)..(79): n is a, c, g, or t
  misc_feature (82)..(82): n is a, c, g, or t
  misc_feature (87)..(87): n is a, c, g, or t
  misc_feature (89)..(89): n is a, c, g, or t
  misc_feature (91)..(91): n is a, c, g, or t
  misc_feature (93)..(94): n is a, c, g, or t
  misc_feature (113)..(113): n is a, c, g, or t
  misc_feature (137)..(137): n is a, c, g, or t
  misc_feature (165)..(165): n is a, c, g, or t
  misc_feature (167)..(167): n is a, c, g, or t
  misc_feature (182)..(182): n is a, c, g, or t
  misc_feature (184)..(184): n is a, c, g, or t
  misc_feature (189)..(190): n is a, c, g, or t
  misc_feature (194)..(194): n is a, c, g, or t
  misc_feature (198)..(198): n is a, c, g, or t
  misc_feature (200)..(200): n is a, c, g, or t
  misc_feature (237)..(237): n is a, c, g, or t
  misc_feature (249)..(249): n is a, c, g, or t
  misc_feature (251)..(251): n is a, c, g, or t
  misc_feature (275)..(275): n is a, c, g, or t
  misc_feature (306)..(306): n is a, c, g, or t
  misc_feature (313)..(313): n is a, c, g, or t
  misc_feature (325)..(325): n is a, c, g, or t
  misc_feature (341)..(341): n is a, c, g, or t
  misc_feature (349)..(349): n is a, c, g, or t
  misc_feature (354)..(355): n is a, c, g, or t
  misc_feature (373)..(373): n is a, c, g, or t
  misc_feature (381)..(381): n is a, c, g, or t
  misc_feature (391)..(391): n is a, c, g, or t
  misc_feature (395)..(395): n is a, c, g, or t
  misc_feature (397)..(397): n is a, c, g, or t
  misc_feature (399)..(399): n is a, c, g, or t
  misc_feature (404)..(404): n is a, c, g, or t
aggagaagtccgcntctctgccgtggctctctgcnaggcagccnaatgctctgtgggagggactttgctgatttccccncgncccgncngngnnaaaatatataccccccggntgcagtcgaaaatgcgtcagtacntgtgaaacacagctgttcttctgttctncngacacgccgtccccngngccannccgnggcncntaagcacgagcagagtgcacagctgtccactgggccnttgtggtgtgancntcagatggtgaagcattctccccngtgtatgtcttgtatccgatatctaacgcantaaatgnctactttggttnctgcctgtaagttaancaccgttngaatnnggtttaattttttcccgncgaaaagnaataaaccgnttgngncngatangat

SEQ ID NO: 534124 - DNA, 90 bp, Homo sapiens
cgtggtcaggctggtgtgatgggattccctggaccacagatgtgtctgggagagcctggcaaggcattcctcatcaccatcgtgtttgca

SEQ ID NO: 534125 - DNA, 869 bp, Homo sapiens
cctgctctactttccgttataatcttactttcaacaaatgtaggtacctcctctaaaacttctcccgtgtctgtgacatgctctgctccaggaattcagaggcctccagtgactctgtcattgctccaggaccaccaggctcatactcgggttctggagactgatgtgtgtcttccccatgctcatacgtacacagactcttttcaaccacctaacggaccaacactgaaaaggtcaatgcctaaacatcactattaccctaatattatgagctatattaagagtcacaattcatcaacccaacatcatgcccaacacattaaccacacataagccatattaatgtctgtctcgccctcgggaggagggtagcgaagctccatactatcctcttatcaatatgcactcttcacggctatcagtggatctctccataataacgatccaagcttaccacccgatattcgcaatcgccacagtacggacgccgacctttctttacttacttcacatccgcagttgtaaccgatctactatcagaaaaaacgcgcaaggtatagcccgctctagaacgacgtcaaaaggcggtatcacgcaagagtatttgcgtcccgcccgtttcgtacactatcattccagcacatcgacacccgcaatagtacaaaccaacataatcgccgctcacaatagatcggcattccatgcctcacgctctctcgcttcgctccccagctcgcctggatgaattatgatccactccctactcgctgattggatagttatagatcccacgttgtcgttcacctatcagccccacacactaccatcaccatcgccacagtcaagtatattgactatttccccccctg

SEQ ID NO: 534126 - DNA, 1767 bp, Homo sapiens
tacctaagcgcagattaattggtgaaaaaattaactcttaagatggccattaataattaggaaagtttacagagtggtcttagtagaaaattcaagtcctcctaatttatttaaggttcaataatgcgttcaacatgcctgttatgtataacgcttaggttctaaggaagattaaggtttcataccaaaatacatgtagcttatcttttaggaaggggaaaaaggctccattttgaccatagtaaaatttgtgttgtgttttatttccttttcttaagctccactgataagggattgtttttatcaaaagttactatttgtagattggaggcataattttagtgattttcatacttttagctttcttcgcataaaagctaattgaaaccgtatatgtagtaaaattaaaggcagagctgttgcagttgaattggagagttagggcaaagaacacttattagcccacacttcccacctttctacaggtggtcctttcagagctcagcctgaaaacccactactgtgttatcgtgcgtcttttggggttagtggttcttttgagaatctgaaggaagctgtggactcttcctagaaaaaaaaaccacacatacacatacaatgttgcatgcagtttcaagggatttggacatattgaaacctatcacaggctgtaggttatggacctctgtgccatgagaaaattgatacattaaactaagaactttgtttttaacttaccaatcactactcagcacatcttatataagctgataatttgtgatggaaaaggtctgtagcatgtgatataaggtgaccttatgaatgcctctcttgctggtacattaagttgttttaatatatcatttggaggggactgaaatgttaggctcattacaagcttgatacagaaatatttctgaaggatttctaatcagaattgtaaaacaatgtgctatcatgaaatcgcagtcttcacctcatggttcatggaacatttggttagtcccataaaatcctatgcaaaacaaagtagttcaagaatttttaggtgggtagtcacatttataaggtattcctcttactctttgggctttttcagtctgatttatttaaattttcatttagttgttttacttttggactaaggtgcaatacagtagaagataacttcgttacatttatgttgtaggaaaactaaggtgctgtctcctcccccttcccttcccacaaaatctgtattccccctattgctgaaatgtaacagacactacaaattttgtattctttttttgttttttgttttgagacagggtctcactctgtcacccaggctggagggcagtggcgcttcacagctcactgcatcctcaaccttgggggctcacgcagtcctcccgcctcagcctcccaagtagctgggcatgcgccaccaagcccagctaattttgggtatcttatagtagagaatggggatttccgccatggttgcccaaggttggatgtggacattcctggggctcccagttactatgcccaggctccagcctcccaaagctggctgggcattacaggaacgttgaacccaaacgtcggcctgggccgcaaaactatggtcattactaattcaacaaatttcccgtctggattacgtaattaagcctttaattgggcaatttggaatcctggaaagcaaagatattaacattggccctataggggatcattacaaggccaaaattgttcataaaacaaggttatggggaatta

SEQ ID NO: 534127 - DNA, 1045 bp, Homo sapiens
tacctaagcgcagattaattggtgaaaaaattaactcttaagatggccattaataattaggaaagtttacagagtggtcttagtagaaaattcaagtcctcctaatttatttaaggttcaataatgcgttcaacatgcctgttatgtataacgcttaggttctaaggaagattaaggtttcataccaaaatacatgtagcttatcttttaggaaggggaaaaaggctccattttgaccatagtaaaatttgtgttgtgttttatttccttttcttaagctccactgataagggattgtttttatcaaaagttactatttgtagattggaggcataattttagtgattttcatacttttagctttcttcgcataaaagctaattgaaaccgtatatgtagtaaaattaaaggcagagctgttgcagttgaattggagagttagggcaaagaacacttattagcccacacttcccacctttctacaggtggtcctttcagagctcagcctgaaaacccactactgtgttatcgtgcgtcttttggggttagtggttcttttgagaatctgaaggaagctgtggactcttcctagaaaaaaaaaccacacatacacatacaatgttgcatgcagtttcaagggatttggacatattgaaacctatcacaggctgtaggttatggacctctgtgccatgagaaaattgatacattaaactaagaactttgtttttaacttaccaatcactactcagcacatcttatataagctgataatttgtgatggaaaaggtctgtagcatgtgatataaggtgaccttatgaatgcctctcttgctggtacattaagttgttttaatatatcatttggaggggactgaaatgttaggctcattacaagcttgatacagaaatatttctgaaggatttctaatcagaattgtaaaacaatgtgctatcatgggaccgcagttgaaagacgcatgcgtctttcaactgcggttgagtgcccacacagtcaagctttaaaggaaagtgtttgctgaaa

SEQ ID NO: 534128 - DNA, 310 bp, Homo sapiens
  misc_feature (99)..(99): n is a, c, g, or t
  misc_feature (161)..(161): n is a, c, g, or t
gaaacggctaccacatccaaggaaagctgaccaggcggcttgtgaacagtcagtgcgaatttgaaagaagaaaaccagatggaacaacgacgttggganttctcctacaatgggatccacaggatggagagccaggctactgccctgtgagactgggaatnacaactggaagacttcagtctggagtgaatactttgcaggggttcaaagaggataaaaggaacaaagtcactccagtgttatatttgaattatgggccctacagttcttatgcaccgcattatgactccacatttgcaaatatcagcaa

SEQ ID NO: 534129 - DNA, 886 bp, Homo sapiens
gtaccagctccttactgccctgcagacaagcgtgccgtgcgtgcttgtggcaagggaaggaagagctggttgatccacagatagctccttcctccccgcccttccttttgtttggaggtcccaggatctgtgtcacagacatctgggggaagaaacggagcaggaaactaccccgacagagttaagcaggaaacaacaacaaatcatgcaaaaaaccctgcaaaagaaaacgaacaggaaagccaaagtgccagcgtgcaaaagagggaggaaaaacgcccgtatggacgaattgaacgccagcaaacagaaggggaatttaaagacagaggctgcttcagtctctcgaagaatttcaacgaggaacatagactataggcatttaacgatgaagaaatgacaagggagggagatgaagatgcaaaggtgttggacgagatacagggggtctgagaaagaaccatttagggctctgattctaacccataggcatctcgggaccgtccttatcccatttaattaatttctcctgacaaatcacttacttttctgtcattaatgttgcaactgttacgttgtctgcacttctgatgaattcaatttgctaatcgttaatcccagtcactcgacggtgctgagatttacttatgactctggccgaccatctcatcgttgtgaccaatttattcatttaataagaggtgccatccattggtggaaaactgccctggatatcggaacggacaatacgggtggaccaaggatcctatttcgtgtacatgccccagatgggatcacatccacaggcagagacgcgactaatacccagaaggacctgagacatacaggaacaccccgaaaagattggtgttttcacccaaaaaca

SEQ ID NO: 534130 - DNA, 140 bp, Homo sapiens
agaagacttttaccagcgtctattggaacacttcatcaaactatcaaaagacgacgggcaaagatctaggacagacaatgagcatctcagacactcggcgcgaggatgaccaggccacacgggcccttctctcatagcaa

SEQ ID NO: 534131 - DNA, 197 bp, Homo sapiens
  misc_feature (190)..(190): n is a, c, g, or t
tgggtgctacgcgtatgatctcttcaaatttaagttcacatcctcagatccaggaaagcaccgcaatatcaagcagatacatgctgaaactaacctcagcccccatgtcaaaaacacagcgggcatcagagcattgcctgcagcgaaggtcttcaggatttcggtacagccgctttcctttacatggacnagctgac

SEQ ID NO: 534132 - DNA, 767 bp, Homo sapiens
cggcgcccttttggttttttttggggaatatatacttattgtattatcgtcattttgtgtttacactttgaaactctgggaattcaaaattaacatcctttgcgcgatggaccttctttattggaccacccagaaaagtgatttcgaacccttgttgttttcccacaatatgattctgagcctgctgcttgagtccaaagtgaaccctttatgagccggttgccatctcagtttgacgcggaaattctcgtgtgccccaacaattttcgctgtgtggaagcaccacagtccctcaagggtatggctatcgttgccaccaagctttgtcagagagtaagcgggttccccgtggggaaaccgcctatttggcgctatatatttattgtaggtgtaaagcggatcttattattgcgggagtatagtagtctttaaagggcccgagaatatatctccctctcttgtagcgcgctattaagagaacgaacctatgtctttcgccccccacttgagaaactcttattttttgtctcacccaatttgcctcgcgagtaacataagacccgcgggggatctatggggacttatatatccccttggcggaacaaagagattttactccaaacgtctttcgggatggagaaacaccgggggaggaaaaccaacaagaagagattatcactccggactgaggtcatattttgcccgaggacccccacgacaaacccagaatctttcccaaagttttccgcatttaaggcttggcccag

SEQ ID NO: 534133 - DNA, 995 bp, Homo sapiens
  misc_feature (532)..(532): n is a, c, g, or t
  misc_feature (995)..(995): n is a, c, g, or t
gaccattctccccgcgtgcggggctacgttgacatgtacctgttacgtgcctcaagaatgtaacatcccagggacttccctccattctcctggacgcggccaccggctgtaccccagtctgcaactcaatgttcttggtagacgtattgggggagccgagggagttctgctcatgatgtttgtgatacctgtgcatgagatagcacatcggctcgcatgcccgttagtacaagaggccgagatgacactctgtctgccgctcatcttccagtctagtctggcatggatagtctcctcaaaagacgatacactcgagctgctgtcctcgtcttcatcctatcatcgctcctcgcccgtgtttaccagtcagtggtcctatctcgcacttgtcccagagggaagacttccggacatacctttcagcatacagtatagtcctcgtagccagagtgcgacatgtctactaatgaagcagccaagcgcatttctctgcgcatgtcttattacattaatggctacacccagacattgntcgacagttactgtggagaattccatagcttcgccccggtttggattaggagacagacatagagagacgcagagatcacaagcatacacgcaaaagaatcaccgatgggacccctagattaaaacaggcacagcgcccggtcgggcaagctactgcctttggatgggagcgttgcgcgtgaacaaggaaaggagagcgaggcctagagagcagaaagcgagctccgacctgattcggtgttagcgttcccaggtgctgtgagtccgtttgcgtacccctcagaggtgtttctctgccgcgaagaaacgcgagtggcatgaggcatcttgccgcaagcggtactcccaccccttgtggagagtaggcaagcgcggcgttccctcaagatgtaaaggccccccaactgggcaccgggtaacaccatcccgtctggccttataagaagttggccgcacaaaggagn

SEQ ID NO: 534134 - DNA, 220 bp, Homo sapiens
acggctctctcggttggggcaggaccctcatccctctcaagtctcagtggtgggggtggacaggactcatctctgggtccgctggccaccggcacctcttcactggttcccggtttggctgccattttctcacactctttcctgatcgatgccgtcatggccccacccccattctctcttcaacatagtccaatttctaccgtccccacagagagagcgt

SEQ ID NO: 534135 - DNA, 282 bp, Homo sapiens
ttcgtcggagactctccagatcgattggtgcactctcttttgtcgtagtttggcggtctggctactaagggcctgcgtgttgttgtcctactgttacaaccattctaaatcccctgcgggcactttactgacatcgatggctcatttgaagctgctgaaacgttcagtagaagctgctatgaggtctcgtaaacagggtcttgactatgttcacaatctgagggtggcagaagtgctcaatgaccctgagaacatggagaagcgccggagccgtgagagcct

SEQ ID NO: 534136 - DNA, 1490 bp, Homo sapiens
ggagagaactagtctcgagtttatgttttgtattgttgtttgctctctctccccgtcggcccaagatgcacgtacagaggacacaaggctcatagggaaaataacgtgtgggcttcggagagcagcagcgttctcgaggaaatacacacacaggataggtctacagaaagaggtggtgaaatcctcattgtgttgtgacaacaaggtgcttaagaacacttagcgcgagtatgtgcggaccagggaccattcgcagagccctaaagaagagagaacatctccatcgcctggagttggtctgaacaagtgggacccgcgattgattatctcgaggttgtagcatagtagactaggtagagagcgcaactcgcgtcttcattaaacggcgtgctttgcaaataggtgtggcacttcgcgtgaggacacattttaacacaagtgtgacgaacgcgcaaggggagccgcgtggtcatcactggacgaaaaccaagttggtactactcacgttgtgtagtatacaagcctgtggtgcctcccgaaaaagtctcaacaggaacccccaagaagaacacagaaagcgcagaacgcgagcagagacgaaaccacggaaacaacaagcgtgggtgagaccacccgggagggggcccgcgcagaaaaaacagcgggggcgatgccgatgcgcacaaagagggcgggaaaacgggtcccccaagacgggaaacaaagaaccccacccgtggccccctatccggagcgccagggaaaatttaagaccaccggtctagacgagcccctttggagtgttgtgaaacccagcacatagagaagagacgtttcctagccgtgtgtgtgagcaagacattggtggaccaggaagaaagcggtgtaggaaattcccccaagcgtagaagcctgtgcgaaatgtgtgtccttacttgggacaatgtggcacccctgttagtgtactcggaataaaccatgtggggtggcaccccgatataccggtgcccattttatccaggtgacaaacggtagccccagcagtgtggagacacgtttattactctccacgagaacaacggactacttgcaacccatgtgtctccgaccttacgcaacacaggtgtgcacccctccggaaacacaccaccgggggcgcgtctgtgtattaaaccccttgtggtgcacaggctttctcacagggaccaagattcacaacgaggtcagatgtccaataataattccggggctccacatggccatagccaatgtccgctgggcctacctaagcgtgtggggcccctatactgccagcgcctataatagggaaggcttataacaatttccgtaaagcgggttaaagatccaacggagaaactcgctcgacgacacttgagacctaacagaaacgctagcgtaacacatgtgtacgccaatcaataaacaagaatctttgtcgcggcgaaacctcacacgcgtgctccatacta

SEQ ID NO: 534137 - DNA, 128 bp, Homo sapiens
cggtttacggatggctgactgtggtcatatcttccacgataccaaagttgtcatggataccttggccagggtgctaagcagttggatggtgcaggaggcattgctgatgatcctgttggctggcgaca

SEQ ID NO: 534138 - DNA, 138 bp, Homo sapiens
cgtgcgtcaagaagcttagtatactagtaaccagaattacaggtgcccgccacacgcctgacttatttttagtagagatggggtttcaccacatgggccaggctagtctcaaactcctgacctcacgtgatccacccc

SEQ ID NO: 534139 - DNA, 554 bp, Homo sapiens
gaccatagaatgaaatgggttgtgcaatgcatcatgactgaagcccatgcgctaccaccgactttacagcgggactggctccccattccatgtgactagtcttagattgacgagtcctgttcactaacaagtgtcggatcttttcagaccctacatcaaggaggtgtgacgagaacggccgaacccaccccgtggtctccaagatgacctttggggacacctgatgtacgacatccaatagtagcatgcggctgtgcgtacatggcgtctgtattctcagccagagtgagccgtcgatgggactgggtaagccacgacaagcaccgtctgccatggactgatgcctgacaagaagatggccgtctgcggatcttggcctctgaaacagttagcacttgactgggtgcttgaccattcagtcacagacaagcagaccgtggtggcagcggggcaccagacatggcttacccggtgctgtacaccgtatgactccgcacgtcgggtgaatgcctgaagcttctagtcgggcggatggacgataccgtaagtcagag

SEQ ID NO: 534140 - DNA, 481 bp, Homo sapiens
  misc_feature (151)..(151): n is a, c, g, or t
atgaagccccagactccctagctggggagctgggtccctcagggtcacctaaccagaatcccagcttccactgcggccttcccccaacccactgcctcaccagccatgcttaacttctgcccattcctctgggtggtgtgactcagtttcncagggttatagatccctttggggccacagatgtggaagactcccagattaacagttgccaacttgagtctggaggactcacccccggagtcataggctgctttgtggggtggggagtctaaggccagatccccacacccagagaagcccccttccacctgtttgtccttttgaggggagacttaagtagtttgaaaagctgtgatcctctttggctgggcgcagtggctcacgcctgtaatcccagcactttgggaggccaagatgggttgatcacttgaggctaggagtttgagaccagcctcgtcaacatagtgagatcccatctcta

SEQ ID NO: 534141 - DNA, 802 bp, Homo sapiens
tgatacagccgtgttggcgtgtcccagagtcatctgatgggacatggcagtgggtgcaagtgaaaatatagggtactcaacctaagtgcggttccgatgaattcttatcccctgtcccttcctttaaaaaacttagtgacaaaatagacaatttagcacatctggctatgtaattcttgctaatgtagtatttagagaagtgtggacagggagtgtggcaagagtgtggaggctgacgtgtgagggaggacaggcgggaggaggtgtgaggaggaggctcccgaggggaaggggcggtgcccacgaccggtgacaggccgcagctccatttcttatgcgctgtaacgtgacttccaggcacggtttggaaagtattcacatcgctgtctgtgtatctctttcacatcgtgtgctgctatgggaggatcaggcccggtgttacaaggtcatatactgccagtgtactagtgccagttcactcttagaacatgtgtattacagatgcctttttggtagttaagcgccgccatgtgatcaagtgtgactcaatggatgctggtcgtattccgaaaaagggttgcgtgtttgcacaaaaagctcagtgcttcagttaggcaagggggtcaccaggggggcaggatacaagccggatagccggcggcagacaacgcgggcgcgatcccacaaggcgggggaggccggcccaatggtggagttgtgttaaaaacgcgccgggtccgaagaccaggagggccccttttatccagggcgcgtgaagggggaacacacggaagggggagaa

SEQ ID NO: 534142 - DNA, 248 bp, Homo sapiens
ttattactagggccactttcaatcttaaaagtgtcatagtttggacgacgtattatgtggttacctgttaatgaggcttggaaaatgtaaaagtaggttcaagaccaaataaggagaggaaagcaaagttgttttgtacaataaagtgaggagagttgagttggggtagggtggagggggcaagggagataagaggaaagttttgagggggaaaaggggctaaaattatggagatgtaaaaggctttc

SEQ ID NO: 534143 - DNA, 94 bp, Homo sapiens
tcgtagatcttaatgtttttgatcgttgcgttaaagtggattgtgtcacccacagtgaaaccagatcccattaataaatatgcttattggctta

SEQ ID NO: 534144 - DNA, 373 bp, Homo sapiens
tgatccactggccgtcgttctccacccaggaaccagcatataacgatgctaccgcatcaaagggcgggcgattggatgtcgggaaacacttctcaacggaagacatgtattcggggacgagagaacatgaaggaatgcacatcatcactggccatcagacaatatgcgggtcagaaccacagtgagatgccatctcacaccagtgagaatggcaatcattaagaagtcaggaaacaacaggtgctggagaggatgtggagaaagtaggaacacttttacactgttggtgggactgtcaactagttcaaccattgtggaagtcagtgtggcgattcctcagggatctggaactggaaataccatttcacccacc

SEQ ID NO: 534145 - DNA, 120 bp, Homo sapiens
ttggtcacgagtccctgtcgtttcccaatgtcctaacttaggaagaacctttacgcgtgacatgagaggtgctgaagttgtccttgcaaaagggtgttgggatcagtccgttcgcatgtt

SEQ ID NO: 534146 - DNA, 101 bp, Homo sapiens
ggcgtggcagaggcagaagcaaattgcatatgagtagactgcacgggtcaaacccatgtagtgcaaggtcagttgtattacttggggatactttttaaagt

SEQ ID NO: 534147 - DNA, 133 bp, Homo sapiens
ctggcttgtttttttttgggccccggttgggaccaggctcctgggggtgagggtctgtttgagtctgtttttgctgctttagcaaaatccctaaaacggggtaagttataataaacaaaaatgtattggctca

SEQ ID NO: 534148 - DNA, 342 bp, Homo sapiens
caagcgaagatgcggcaaccgtagtagattctcatttccagttggcacgtatattctggtgaaccaaatatgttcacacatggtgattactacttaaaaaagaaatcaggagttcccattgtggctcagcggttaatgaacctgactggcattcatgaggacgcagttcaatccctggccttgctcagtgggttaaggatccggcgttgctgtaagctgtggtgtaggctgcagacacagcttggatcccgcattgctgtggtgtaggacggtgactacagctccgattggacccctagcttaggaacctccacatgccacaagagcagccccgcatgttcg

SEQ ID NO: 534149 - DNA, 265 bp, Homo sapiens
tctgtaataagagagctgacaagctatgaattactctgcgaacaaaactgtattatgtgagctaatacatttagtagggattctcaaacgtgcgacgacgaagagacgcacatttttcttctcattattccagatacaggttgagaggagaacatagggaggcatggacgatttctaagcagtcgactgtaaaatcctatggtctctgaagccttcatatgtcactcagtagaacaatgaggccagtacgtctactctctgggat

SEQ ID NO: 534150 - DNA, 292 bp, Homo sapiens
aggacctgaagctgggattacaagtgtccgccagtacacttggctaatttttgtagttttagtagagatggggtttaccatgttgggcaggctggtcttgaactcccgacctcaggtgatccgccagcctcggcttcccaaagtgctgggattacaggcaggagccactgtgtccagcctatttacttagttatttaaaagtaaaacattttttaaaaaggtaagcagttttccaacactgtcactccacaagtgttttaagtgacagatcattgcagtgtgtctcccgata

SEQ ID NO: 534151 - DNA, 179 bp, Homo sapiens
gatcactcccattccgatagatcgcttccacccttacgtaccaatcgaagacgccctcggttattctcttccttctctccttaatgacattaacactattctcaccagacctcctaggcgacccagacaattataccctagccaaccccttaaacacccctccccggataatgtgatag

SEQ ID NO: 534152 - DNA, 435 bp, Homo sapiens
  misc_feature (378)..(378): n is a, c, g, or t
  misc_feature (387)..(387): n is a, c, g, or t
cctagaaccaggtataggttactaaatattgtcaggaaaaaaaaaaaaagaggccaggcatggtggctcacgcctatggtcccagtactttggggggctgaggcaggtggatcatctgaggtcgggagttcgagaccagcctggccagcatggtgaaaccctgtctctactaaaaatacagaaaattagctgtgtgtggtggcgcgcgcctgtaatcccagcaggaggctgaagcacaagaatcacttgaacctggggaggtggaatttgcagtaagccaggatcacgccactgcactccagcctggggcgaccagagtgagactccatctccaaccaaccaaccaaccgaccccacttcttccatgcttcttcagantacatttgncattttttgggatgggaggggcaaggtttttttagttgggccctttgg

SEQ ID NO: 534153 - DNA, 411 bp, Homo sapiens
  misc_feature (7)..(7): n is a, c, g, or t
caccctncagtcccaggagatctcctggcatccaccagggaaaagggacaaaagttgcccaggaacctccagattgaaggtcacattacctgagcatgcccagatgaaccaaggattcaaccatgggtggaacctaaggtctcaaactggggagcagggactgaatgaagacgcagaccctgaatggcaagatacagaatccaatcagatggagccctggtgtcacctcatggcaggatctagtcagatcatgcgtccctggcagcacttcatcggaagactcaatcagatcatggctcattactgtacgcctataaagcctgacccagtccccagctcaggaagacagattggagcatttcctcctgtctccttgacaattagctagaaataaagcctttcttttctcaa

SEQ ID NO: 534154 - DNA, 358 bp, Homo sapiens
atagacacagatcttaggcgagagactgtcgggttgggtgcatagtgaactaggctgctgggtagagtcacagaaattaatgcccattacagcagtggcagattctccaggtgcagggactcaattacgggaaattcttgtgatgctgatgccagaaggcagtttgcgagtgcccacatgcaggcccttgatggcgcgtatcacgagctgtcgcagaactgcctgtgcaccgggcggcatgtgcggatccccgcacacacggttgccgcgctgacgcgtgtagtccacagccagcccctcgccagcccacccggcgcacccgcctccagcccgaccaaaacccgatactgcactcagc

SEQ ID NO: 534155 - DNA, 119 bp, Homo sapiens
gcccgtattgattaacacaccacaatactataaatggaaaagataatgtttgttacaggagtgcacgcaaattatagagagtgtctcaggtagtgtggctcactggcagctcgcccctg

SEQ ID NO: 534156 - DNA, 291 bp, Homo sapiens
agaatgacgtgaacccgggaggcagagcttgcaggtgagccgagatcgtgccactgcactccagcctgggagacagagcgagactccgttaaaaaaaaaaaaggtttctggagggaacgagtacggtatgtccagttacgggttccggggtaagcggaaataatcctttaagaaagcaataggggtcataaacatgtttgggacttctgggactccagcctgggagtcagggctggctcaataatatcaagggccctggcctctaatgtcatttccggggtaccggagctc

SEQ ID NO: 534157 - DNA, 518 bp, Homo sapiens
  misc_feature (399)..(399): n is a, c, g, or t
  misc_feature (458)..(458): n is a, c, g, or t
  misc_feature (500)..(500): n is a, c, g, or t
  misc_feature (517)..(517): n is a, c, g, or t
ctcttaacaccaaggagctgaaattcttggctgggtgcagtggctcgcacctgtaatcccagcactttgggaggccaaggcaggtggatcacctgaggccaggagttcaagactagcctgaccaacatggtgaaaccccctctctactaaaaatacaaaattagccaggcacggtggcgggtgcatgtaatcccagctactagggaggctgagccaggagaatcgcttgaacccgggaggtggagattgcagtgagttgggatcttgccattgcactccagcctgggcaccaagagcgaaactctgtctcaaaaaaaaaagctgaaattctcaaattgggtaaacatagttcacccttgtcttctggcccatttgcagttaaaatgccacagcctgggngttcaatttccctttcctaaatgggggttggtgcttgctgttagtgttcaggtgataanttttcattctagtgacttgacagttttcccaaaagggctttnttctttgctcaggaaant

SEQ ID NO: 534158 - DNA, 107 bp, Homo sapiens
agtgctttgtccttgcctggtacctggtggaggaaatgaagaagcgggaagggtttgagctagtcatggagcctgagtttgtcaatgtgtgtttctggttcgtaccg

SEQ ID NO: 534159 - DNA, 601 bp, Homo sapiens
gcggtggcaaatgcaaatataaaataaaaaatacctcagctgtacatgaattaatgaaagtgttgaatttaaagaagtccatttatagtattactagatgataaagtatggtatgtctaggaagccagatatacatgaacaggagagaggggtagagaattcatagaatctaaaattgcaagaaacaaacatataatatagaagagacagagatgaatagagaatcctaatctcggggtacgaagacatcccacagattattcagtccagaaaaccaagtcctgaacatcgtaaactataaaggctaggattatagatgataactgtacctctcataccaactatgggtagcagggccatagaacctgctgtccttgaccttatttaaacgaaatgatgcagtgctagggcgtggtgactcaggccagtaatctcagccctttgctaggccgagccgagagaatcacttgagcccaaggagttcgagaccacctggtcaacaaagtgagaccctgtatctacgatacataaaatcaatcaaatgaatcagccaggtgggggggcacatgtctggagtccagctgcgcagaagtctgagacg

SEQ ID NO: 534160 - DNA, 162 bp, Homo sapiens
cggtggcggaccggaggcaagcaggggttcggcggcattacctgtacccattcaaccggcggctaccggcggcggcgcgcagggttcaagcggagagacccgccggcaagttttacaactgaggaacaaggttcaagaaactaatcacaggccaagtgccta

SEQ ID NO: 534161 - DNA, 1223 bp, Homo sapiens
gcagtgtctaatgattccatcacaaatttgttataaagccaaactcccattgaaagtgtcactttatacttaataggaaatcgttatgattaaagcatcaaggaagcaaatataaagtttaatgaaaatccaaggggaagttctaaattgcaaaacttggcacttatctacagtattttgaaaaataacaccaccggtattcaaacctacctaggaatatctcaaaataacctgttaattaagtgttcttagaaaggggagtgggggcaagaaagatgatgtatgcacatggcgaaaagatcagatggtacagaaaggtataaaaacttggtcccttccctcctaccctaatactcctctccaaaagtaaccagtttcaagtgtcttgtactcacaggaaaacaattttttattttttatcagcaaatttgtactttaaaaatttcacattaatagaatcagactatatatactcttctgtaccttgctttttttgctacctgtgttttatgagatctttctgtatcagtatatataaaaatacctcattatttttagcggctgtgtggtattctaatgtttgaatgtgttacaaatgttcaaacactgataggctctttaggttgtttccaatattaaatcacattgtggtgaatatacttgtacatataatgagtttttattctacagtgtacctagcaatacaattgctggatcagagggtattttttattttcagttcagtagttactgccaaattgtcctctagaaatctttgcccagtatgcttccacatataatgtatgagaatgattatttaccaaacccatgccaatactgggtactaaacttttgaagtctgatcatgtgaaagtgaataaatggtatcttgcgttttaatgaagttctaatgcattttaatgaaggtctggtacattttaatgaaggagatggaacacattttcatgtttattgattactgatatttcctgtgaaatgtgtagtcatgttctgttttctattaggtggtatgtgttttattgatttgtatgagctttttgtaagctaagaaaattggtccattgtcatgtttaataatattttcctaagttttatttatgtagttaaacttagtctttacagcttctgagattttgccttgcttagaaaggccacctttgcatttaagaataaatttaatgtatttttccagtaaaaaaaaa

SEQ ID NO: 534162 - DNA, 101 bp, Homo sapiens
ggatccccatggccaatactcctacatcaggaagtcgattgtcttactccaacagattatgatgtttcatgtcgtgctggctgaaaaccctgtgacttatg

SEQ ID NO: 534163 - DNA, 520 bp, Homo sapiens
  misc_feature (5)..(5): n is a, c, g, or t
  misc_feature (86)..(86): n is a, c, g, or t
  misc_feature (91)..(91): n is a, c, g, or t
  misc_feature (104)..(104): n is a, c, g, or t
  misc_feature (119)..(119): n is a, c, g, or t
  misc_feature (121)..(121): n is a, c, g, or t
  misc_feature (132)..(132): n is a, c, g, or t
  misc_feature (136)..(136): n is a, c, g, or t
  misc_feature (169)..(169): n is a, c, g, or t
  misc_feature (171)..(171): n is a, c, g, or t
  misc_feature (179)..(179): n is a, c, g, or t
  misc_feature (186)..(186): n is a, c, g, or t
  misc_feature (190)..(190): n is a, c, g, or t
  misc_feature (201)..(201): n is a, c, g, or t
  misc_feature (229)..(229): n is a, c, g, or t
  misc_feature (266)..(266): n is a, c, g, or t
  misc_feature (281)..(281): n is a, c, g, or t
  misc_feature (287)..(287): n is a, c, g, or t
  misc_feature (298)..(298): n is a, c, g, or t
  misc_feature (312)..(312): n is a, c, g, or t
  misc_feature (343)..(343): n is a, c, g, or t
  misc_feature (352)..(352): n is a, c, g, or t
  misc_feature (362)..(362): n is a, c, g, or t
  misc_feature (375)..(375): n is a, c, g, or t
  misc_feature (384)..(384): n is a, c, g, or t
  misc_feature (396)..(396): n is a, c, g, or t
  misc_feature (404)..(404): n is a, c, g, or t
  misc_feature (413)..(413): n is a, c, g, or t
  misc_feature (418)..(418): n is a, c, g, or t
  misc_feature (420)..(420): n is a, c, g, or t
  misc_feature (424)..(424): n is a, c, g, or t
aatcnctgaactgtgtaatgtgtctagagtaagcaaatactgctaacaattaactcataccttgggtcccctcaagtattaccccnatagnattcccccccatngccgtccccatctgngnattttaataangatnttaggatggagcagaacatggagaggaagattncnttttaagntcctccntttntttgaaatacnataatttatatagaaatgtgtagcagcnaattatattggggattagaattttgaattaatagctntcctactattaattnacatgngctttttgtgnggcgctataagtgnctatggttgtaaagtaataaaattgatgttnacatgcccnattattgttnttttatgaatccnatgaatttnaaactattgttnaatataanactgccccnctttnanatangtaagcaacttcctacttaaacccgacgtgttccttaaacatgttttaaaggtgaattttttaaagttttccataaaagtagggggttccacagga

SEQ ID NO: 534164 - DNA, 929 bp, Homo sapiens
aaacaactaaaattccgctatattagaaaaatagagaagacctaatgggcaacaactctatgcattttccaccgctacacgaggatttgacagctaaggatattgaagaaatttttgatagagctcaaagctggcacaatcccaaaacctgggccaaggagtggacactgttctagagagccaactggaggacttacctctttgactgaaccacccaagggacctgaatttgaagtacaaacacgctttttatttatatggaactgagaatatatcaatataaaaattaagtatgtgcttacgatgtacggttaaattaatacaaaaaaaatatataaagtagatatacaagaataaatatcaagatactattcgattctgattaaaggaggggaaaattatagaccaagaatgcactgatagagatttaaaatgcatattcaataggaatactagaccctaaacaactaaataaagcgataacttgtgtttctctaactccggaagataaagaaaacaaagaactgtgagcataatgaagtccaattaagcacaaatatcacaagacgcacatgatgtaattgtaaccactaagaatctatacccccattgattatgtgagatgacaccttcacagcgcaaatatctaaataaattcttgtatttaatgtaatttcaggtatcattacgttgtaaataatatattagcacgagagcttgaacgtacaaagcaatttcacgagtgaagtcagaatactagcataagacacataagataatgcatgacattattctgtcagtgcacgaggcgtattaatatatagagactagtaagatgacaagagctccagattagacgtctcgattcatacataaggtcagccattcgcaattaccaccaaaaaaatatagaaaatgcatcacagcga

SEQ ID NO: 534165 - DNA, 838 bp, Homo sapiens
ggtgtctgtccctttacttctgaccaggagtactttctctttcccatgtaacgtattctactttccctgagacaggaacgcctcctttgtgtgtatccagaggcagtgatgactatgcgtgtgccatgacagcctccgcgtcgcgtggcatcgacacgaaagtgtctcgaaggtgtctagcttggaacacagctgtcgttgcgtctctgtatgaagacgtatgatgctaagcgtgtcgcacctttgcactgtggccgtccgatagatgtctccacctagcacccctgtgctcccctgacacactgatggctcaagacaaggctggcagataccctcccatgaatacatctcgtggccgcagaagagcctcgtctctccctcgcctctctcgatgatggcacaagccaagccaaggcgctcacgttgagccagtgggccagccacagagcaaaagagggttcatttgtcagtcccctctctctgggtcagaaccatgagggcatgctgaatgccccctgcttacttggtgagggtgccccgcctgagtcagtgctctcagctggcagttgcaatgcttgtagaagtacggaggaacacagttctcactgggaagagtcaagtggcaagaacccaagtgcctcagctcgaaatggaggccctgttccctggagtcagggtgaacttgaaagcttatggctgagacctgggatatgagataccacaaacacctgctgaacaacagtgtctgttcagcaaactaagcagcattccctacatgcctagggcatgacaatagtatagaagtctgggaaacaaacagagacagcaatttgagaag

SEQ ID NO: 534166 - DNA, 168 bp, Homo sapiens
aggcggacatgctgctcatactataataccagaactttgggaggcgaggcaggtggatcatttgagctcaggaattcaagaccagcctgggtaatatggcaagagccaactctactaaaaatacaaaaagaaaagaaaacagccaagcttggtgggtcctgcctgggt

SEQ ID NO: 534167 - DNA, 239 bp, Homo sapiens
gtggggggtggggcttgttcccctgcagtatctgttctgtgaagtttgttaaatgtaagggaagcttaaattcttgtttctttaaaagagcaaatcttatttaacccttgcgtgttctagatttacttacacacctggcctggacccctgttttagttttaacattgcgaaaatagtaaaagaatcttgtaactttattcttttttctcctgctgaaaaaaatatttaaaccattcgta

SEQ ID NO: 534168 - DNA, 879 bp, Homo sapiens
  misc_feature (59)..(59): n is a, c, g, or t
tctgctgaggagcgggcaccgttttctgagggaaagtcgccgtaaaaaccttcccttcntggggggtatagacaacgtgtttccccgccgggggtacacgtgggtggcgtgcacacctgcgaacaagcaggggacccctgtgtctcccctcgcgaacggggttttcatcatggtgccgggcttacaggttcccccaggcggccaattagcgccccgtctttttcatgttgggcagtagaggctcaccacctgcgttgtctctagtagatgtccgtcgtcctttcccctcaccgaaacggtgctttctgcctctttgtggaaaacttggaacctactgtcgtttgtacagagcaccaccgccttataggcccccttcaaggcccccccccctttaataagcgccctttaaaaagggtctccccaggatataatgcccccttccaatcactcctcactctccaagcccgacatcaaccagaccacaacgatgtgtagagacctagtattgcaccaataaagccatcagggaacataaattttgttcattaatcatcaaaacaggcagaatttcggcagaatataaatatcctactctaacaaataacatcataaaactcatcatatttcgcgtatatagattcttgtacacccccgtttcacactacgagcgtagtaacgatgtccccgtctaccccactcacccacaaactgtcagtattcgcctacagcccccaacctatatgatcatgagaacaaaatcctctttcctcagaaatgcccaccataattctctatgtctaagcttgaccagggaaaaactcccatccatcagcaaccctttttcggacgggaatcccaaaattttcttccacaaataac

SEQ ID NO: 534169 - DNA, 349 bp, Homo sapiens
tgggccgctccccttggaggccctgctcaggaggccctgaccgtggaaggggagaggaacttgaaagcccagctcctcccccagcccttggggccattttttcctgcagtcccctgggccccagttaaaggggcaggggcagggccggcagtaggtggggcctgtggtcccccccctgccctgagggccttaactggtctaactgcccggaggcccccggccctgggccttaggcccccccagggcttttttgctattttctgctcttattgttaaggataataattaagggtcctatgaataattaatgaagatgctgatggctatgaataataaataattttcctga

SEQ ID NO: 534170 - DNA, 104 bp, Homo sapiens
aacttgtggggctggctcagcccgaaggcgggcgagcgcgaggatgctgaccgggcttcacccaagggtacagacgcttagctggttcatactcatagcatgct

SEQ ID NO: 534171 - DNA, 496 bp, Homo sapiens
  misc_feature (468)..(468): n is a, c, g, or t
ttcagacgagccttaaaaatcaaagactttgccaataccatgcctggccatggaggcatcatggatcgctttgactgccactaactgatggccacctttgacaatgtatacatcgccagttttatcagaggccctaacccaagcaaactgattcagcagttgctgactttacggccagatcagcagctccacatcttcaacacgctgcggcctaatctgatcgacaaagggatgctgacatgcaccacagaggactagtagggtccacccaggtccaggagaacaggaacagaactgagcaggggcaggactccaaggcaagcacagctggtgagacttagacaatgacgaggctttaactcactgacttttttatttttttttgaagggaattaaatatttgagggtccaaaaagattgtatatacagactatgagtttagaaatcgcgctgaaagttaacaacagntttgagttggaaagaaaatttttttaca

SEQ ID NO: 534172 - DNA, 274 bp, Homo sapiens
cctggtaccctccgggtttcgggatctgccgcgccgctgcggctctggtcccgcgcccgccatggcccgtctgactggagagctgaggcgcgccgtgctagcagcttgcagctcctgcagccgcgtgccctcgccctgtgggcatgcagcgggcccgagccccccggggggcagccctgacggcatgaatggacctggacgccatcaaactcttcgtgggccagatcccccggcacctggacgagaatggacctcaagccgctcttcgagcagt

SEQ ID NO: 534173 - DNA, 572 bp, Homo sapiens
tggaaaaagtcatggaggccatggggttggcttgaaaccagcttgggggggttcgattccttccttatttggtctaaaattttatgtatacgggttcttcgaatgtgtaggtagggtggggggcatccatatagtcactccaggtttatggcagggttcttctactattaggacttttccgcttcagaacgcgaaggcttctcaaatcatggacaattattcaatattactggctggttcagacgaaatggaatggacgcctacacgatgatcagcgattgttccatcgtggtcgtaatcgcatcgggggttatgctccgagtaacgctcgggcgcattccggcataggccgataaaacgtgtatcgtgcggaagacagagttcagattttacgccgcatgcacatactcgatagctgacaatcggcttctggcccgttagcgtctgcggtactatgcggtgctacccttgaccacttagggggaacatccctctgaagtgaatgctctcctaataatgccacacttaccgttccctaattgcagaggaccattttgaaatttgattctacc

SEQ ID NO: 534174 - DNA, 890 bp, Homo sapiens
gactgcgcatgggatctccgttcacggtgacactctggctcccgggatacagtccgttcttgtgacatcagtggatccactgcaggtatggtgtgacatcacagtgatgtcctgccaaccgacaccgtgctatctaatgcgatacgatacttactgccagactgagtaccaaatggactcacatgtgcatatggtctagagagtcatgccaaacatggcttggcctgtactcatccactgggagtggtgcggcgtattactcagacacatggtgttggttcgattcgcacgaaaagtccttgtgttactaactgctaagagtatgctactactagcgctgtcgggtaatggacagactgcagtgctagtgctttgtctgctagcacatctccagaatctttattgactacttctacatcaaggttgattggatcgtagattcgtaaaacttgatgagggacccgctttttgtggatccttcccccgtgatctgtcagggattccctccgcattgccctgttgttgaccaattgagatgacctgacctcgtcctccttctactggtggactctgactctcttggccataggccactggcctgggcttgtcataccttgctttttgccctggactgctttcgtacgacgggccccccttgtcactcgatcggtgtacaccatcaattgaccctggggatgtatcgcgcgacttcaatgattcgttggacctgaacattggcccggaggatacccgattgtcatgcctgttcagaaaccaaccgcaaacattaaaccaagctggtcagcaccagaggccacttttggacaagacgtggccaccaacgttaaaaccttgcttgccaataatgagacaaccattgtttccaggaa

SEQ ID NO: 534175 - DNA, 284 bp, Homo sapiens
  misc_feature (7)..(7): n is a, c, g, or t
  misc_feature (49)..(49): n is a, c, g, or t
  misc_feature (111)..(111): n is a, c, g, or t
  misc_feature (194)..(194): n is a, c, g, or t
  misc_feature (233)..(233): n is a, c, g, or t
  misc_feature (269)..(269): n is a, c, g, or t
gattctnagttggcacaaatgccctgcctagcccccttaactgcgtcanttcacagatggagtgttttgttgttgttgttgttgttgttttaagaaagagttttgagtttnttgcccaggctgtagtgcagtggcacaatctcggctcactgcatcttccgcctctggggttcaagtgattctcctgcctcagnctcccgagcaacttagactacaggcatgcaccactacanccggctactttttgtatatttaagtagagggcgagngtttcacagtggttg

SEQ ID NO: 534176 - DNA, 193 bp, Homo sapiens
cggctgcttctctctcgcttcgggattcacgctcatcacggtcattcctggtctatgatggaaccgtatcttccactacgctcatgttcatacgttcactctattagtctgaacccatagtcccactgatagattgagcacacagttcctaaaggttcaaattttatttttttcccgaggaggagaagcatca

SEQ ID NO: 534177 - DNA, 627 bp, Homo sapiens
ggcggttcccagctgcgttggtgacatggcgacacccccagagatgcctggtgctcaatgcaggcgcctgcaatcacggaatcgatgaaggccccggtgggacttcgtgctacgtggggattgactccatcctggagcagatgcgccggaagtgcatgaatgcatgtggcttcggagttcaacatcatggtggtcgggcagagcggcttgggtaagatccaccttaatcaagacgcctcttcaagatccaaaatcagcgcggaaggtcggtgcaggcccacctcagagtgagctgcattccccaatgaccattctgagatcaaggtccatcactgcacgatattgacggaggaaaggcgtccgggatgaacgctgacaagtgattgtgacacatcgcagggtctgggggaccacatcgaacaagcgagaactgcctggctagcccatcgatgaagttcatcaattgaccagtacgagaaatacctgcaggaggaggtcaacatcaacctgcaagaagcgcatcccggacacccggcgtccactgctgccatctacttcatccccgcctagctggccactccctcaggcccctggacatcgagttatgagacgcctgagcaatggtgg

SEQ ID NO: 534178 - DNA, 635 bp, Homo sapiens
taaaggaagtaagcctttattccctgtgtttggcaaataaaacgggctaagtgggttgcttttgggtgattagtcaaagagaccaaactcccatatcctcgtccgactcctccgactcttccttggcttcaaccttagctgggggctgcagcagcagcaggagcagctgtggtgtgcagcagccacaggggcagcagccacaaaggcagatggatcagccaagaaggccttgaccttttcagcaagtgtggaagtgttgtaatccgtctccaaaagacaaggccaggactcgtatggtccccgtatgatgataggaatgggggtcactagatagcaacagtgggtgtagccaatctgcaaacagacactggcaacattgcgagaaaccctccaggaagcgaagaatcgcaagagttccctctgtgatatcaaagcactatcagggtatgtaaatcgctgcctttggtcagaacacctgctgtgattgaccacgcccaagaggaaaaggggagacagatgttagaagcattttcagcacctgtggtttccgctaggctcccattattgtcaccagtctagatcagctgcacatcacccaggattccaatggtcccctggaaattacgaggaatcca

SEQ ID NO: 534179 - DNA, 275 bp, Homo sapiens
gcagctatgtcaatataataacaatacggtattgtatacttcaagttgcccaagagggtagatgtagtgttctacctcacttatagggagatgatggtaacattgtgtggtgatagatatgttaatcgcttgattgtgatttcccacaatgtatgtgtctatcatacatcatgtagtgcagttaatataaatgtaagataatatctccggccacttatagagtgttgtgatttacagtgagatctcctcgtctgagggttaggttttagcctcca

SEQ ID NO: 534180 - DNA, 588 bp, Homo sapiens
gacaattggctagccatgggaagaagattgaaactgaaccccttccttacaccatatacaaaaatcaactcaagagagatcaaagatttcaatgtaaaaccccaaactgtaaaaaaccctggaagacaatctaggcaataccattctgggcacatgaatgggcaaagaggtcatgacaaagacaccaaaagcaatcgcaacaaaagaaaaagtcgacaaatgggatctaattaaaactaaagggcttctgcacagcaaaataaagtaccaatagaataaacagacaacctacagaatgggagaaaatgtttgcaaactatacatctgacaaaggtctacatgtggcaaataagcatatgaaaaaaatctatatcattgatcattagagaaatgcaaataaaaactacagtgagataccatctcacaccaatcaaaagactttcatttaaaagaaaaaaattaaccaataaattaataaataacacatgctgcgaggttgtggagaaaaaagagagcttatatgttggtggtgagaatataaattagttcaaccagtatgggaagcaaggtggtagtttctcaaggggc

SEQ ID NO: 534181 - DNA, 680 bp, Homo sapiens
  misc_feature (339)..(339): n is a, c, g, or t
  misc_feature (354)..(354): n is a, c, g, or t
  misc_feature (383)..(383): n is a, c, g, or t
  misc_feature (432)..(432): n is a, c, g, or t
  misc_feature (445)..(446): n is a, c, g, or t
  misc_feature (448)..(448): n is a, c, g, or t
  misc_feature (464)..(464): n is a, c, g, or t
cactgacaggagcacaggtaaggctaacaagatcaccatcaccaatgacaagggccggctgagcaaggaggaggtggagaggatggttcatgaagccgagcagtacaaggctgaggatgaggcccagagggacagagtggctgccaaaaactcgctggaggcccatgtcttccatgtgaaaggttctttgcaagaggaaagccttagggacaagattcccgaagaggacaggcgcaaaatgcaagacaagtgtcgggaagtccttgcctggctggagcacaaccagctggcagagaaggaggagtatgagcatcagaagagggagctggagcaaatctntcgccccatcttctncaggctctatggggggcctggtgtccctnggggcagcagttgtggcactcaagcccgccaggggaccccagcaccggncccatcattgagnngntgattgaatggccctncgtgataagtcagctgtgactgtcatggctatgctatgggccttcttaaatgcttttatgatcctgcctttcagagatgaactttctcttcaaagcttgaactttctttccaagattacttgaagtcttttgacttttttgccgggagggctgatcaatcctttttgtttaaattaaaaagtctttaattatttaaacttgagttgtactttaact

SEQ ID NO: 534182 - DNA, 207 bp, Homo sapiens
ccccagggtcattacgttggctaagtggaagccgtctttccctaaagcctacggggggagcctcaggcaggtggtgctcccatctgtccgtccccagcaactgtggctgagctggtgccagcctgcagagccctgctccagggagcgttgggtggatgcgctgatagaacatcctaagcagtttcttgaaatgaataaagtactgtg

SEQ ID NO: 534183 - DNA, 104 bp, Homo sapiens
gatcccgatatacgtgtggaaagtaagtggaagttgttctgaaataagccccatggcaattattctgccactgcagacggagcagcggtcatttacttatacat

SEQ ID NO: 534184 - DNA, 267 bp, Homo sapiens
agctctggatcaagtggatctgatagatttctacagaactctccaccccaaaacaaacgaagatatattattctcattgccacgtggcacttactgtaaaattgatcatataatcagaaattaaacactcagcaaatgcaacataatagaaataacaacagtctctcaaagcccagaacaatcattagaattcaagattaaaaaactcactcaaaaggcaagctatccggttcaatacactgctgttggcccacattgaaccggata

SEQ ID NO: 534185 - DNA, 192 bp, Homo sapiens
caaaaaggggggggggaaggtttgtggttccccctggggggtttttcccccccccaaaccaaagggggggtttacccccttttgcgggggtttggtttttgggggggattttttgggggggggggttttttttttttaaacccccccgttttttggggggaagggccccttttttaataaaaaaacccccca

SEQ ID NO: 534186 - DNA, 1000 bp, Homo sapiens
  misc_feature (461)..(461): n is a, c, g, or t
caaccgttcctacgcctcattgtacccattctagtcgcagtggcattccgtaatgcttaccgaacgaaaaattctaggctatatacaactagcgcaaaggccccaacgtgtgtatggcccctacgggctactcacaacccttcgcgtgacggccataaagaactcttgcaccaaggagccccgtagaaacccgccacatctagccatcagccgtctacatcaccgccccgatcttagctactcgaccatgcgctctctctacgtatgaagccctctatctgcagtacagcaaagcgcagtggtgtccaacttcaccagccttatggccttacgctacatcatgatgtcataggccgccatgctggtgcacgagccacgtacttcatgcatcacagtgcggtacctgtcatcagggcatgtaggcaatgcagcatgttccagacgtaacggggcacgtgaanttcgggcgtacacatgtcaggacacaaagcaatgaaccccagacctgtaactactactcattcgcatatgctacgagcacacctaaggcgcgagtacgactatgcatgagctcaatcaagaccaagtataacggggaagagtaaggggtcggcgatcacccccttgaaatcacctgcatcgcgacttcggatgtgcaagcataaatgcgaagggagactagcctgccctgtgtttccctggcgttagctcaatgtccgttgaccccccatgggggggccccattctgggacactaggtgagcattgagtaggtcgtagggcaactgagtcctaagtggcaaagtgaagctagccacaaaggggcggggaaaacacgccctcgggtatcggtaaaaccccctctgacgcgtaagaagaggtgaggggaagcctgcgcggagaaactaaggagccccgacgaaggcacaatcaggcgaggacgcacaccgaaaaagataacgtgggccgatgaaccgggcgcacctttccggcccccgcgg

SEQ ID NO: 534187 - DNA, 561 bp, Homo sapiens
  misc_feature (153)..(153): n is a, c, g, or t
  misc_feature (236)..(236): n is a, c, g, or t
ccactcatgataagtgcagagacagtgtgaaggggatgtcccacttcattctataacagcacatgaaccgagaatccaataagaggggtcttctcatgtctctctcacccattcttcattatgagtccagttggtcctagagggtgcaggggncatctggacgtactgggctgggagtggggtgcagtgagtggcctcaaagttgtgcagatgttccgagccagaaacacagcagnttttcgcggacatctgcactcatgtcctaccccacgctccaggggaagtcgggcccgtgttctgcctggtaggagcggaggacagacagacaccagtcctcttccacctcccatcggctataaattgaggcttcctccagctgtgaggaggcctccaagcactgcctcaccactcgaagaccctcctctggcatcagccgggtataccgatgctgcaggagcttcagcaggaggtcatttgctcggtaggacatgatgtcctcaggaaccgtcgtggtgatgatctcatccttggatctccggatcagcagtacaggacctggta

SEQ ID NO: 534188 - DNA, 313 bp, Homo sapiens
gcagctgcatagagccacacagcaggaggtgagcggtgtcgagtgagggagtgagggaagcttcgtctgtatttacagccactcccctttgctcacattcccgcctgagctccaccttctcagatgagcagcagcattagatgctcataggagaacgcaccctgttgtgaaccgtgcatgtgagggatcgaggttgcgctgtccttatgagaatctaatacctattgatctgtcactttctcccatcacgctcaggtgggaccatccggttgcaggaaaacaagcttaacaacgcccactgattctacattat

SEQ ID NO: 534189 - DNA, 122 bp, Homo sapiens
tatgtcaacggtggctccagacagtccttgtaagtcccaaagagaggtcaatggagttcatggctgcaccagacagtggagttggggagttagaagcagccacgggactacgtgagtggctc

SEQ ID NO: 534190 - DNA, 123 bp, Homo sapiens
ttatggtctagaggatcccgcgcgggtccgttagagaataatgtaccacagtcagctggctgctcgtgcccagagtacaattcctgcatttttttaggggctatcatgatgacagaatcgtcg

SEQ ID NO: 534191 - DNA, 266 bp, Homo sapiens
ccggggtcctgcagatctctgctagggcagtgtggaagggagaagtggggttggagtcccacacaaagttgccactggagcattgcctagtggagctgtaagaacagtgccaccatcttccagaccccagaatgctaaatccacagacagcttgtactgtgcgcctggaaaagccacagacactcaaacgccagcctatgaaagcagccaggaggggggactgtaccctgaaaagccacaggagtacagcttcccaagactctgca

SEQ ID NO: 534192 - DNA, 225 bp, Homo sapiens
cacatcatctcaaacatagccagtagctttctgtgtaattacatacaagtgcacagtagaattaaactgcacgatttaggcctcatcgaaccattatgtatttatttatcttttaaaagggacacatcagacatgaatatttcaaactgtttcagtgcattggagagcaatcagcatttgcttctattgctcattttaacagttagcatatttcatcccaaaact

SEQ ID NO: 534193 - DNA, 707 bp, Homo sapiens
agcggctatttttgtattttatagtagagacggggtttccccatgttggtgaggctggtctcaaactcctgacatcaggtgatctgcccgcttcagccctcccaaatgcgtgggattacaggcgtgagccacctcgcctaggctagagctacttagattacagagtttttgtttcccaaacgtcctgttatcgacggtcctgtctataattaagttttatttaaataatatagcaacagtttgttacgcagaagagggaacaaactagtagtctgtacgtgtccagaggatagacggtacgaggtctacagtatctacgaaggttgaagagtgcacaatacatgcctcttcctctctgggagaatttgatgccgttgataaaataaaagcaacttcttcccttacaggtaactagcaaggatacaccactgatacactgtataccaagaagtgtaccacacacagtatgagaagggccagctgggcctgaatagttactgacttgactcttatcttaaccgactgatgtgtgactaagcattcccactgcaagcaatgcatagactacggaacgacacgatttcgctcttataatgagaaacagaacttcctacacggaacacgatccaagctcatgtaaccactgtctagctctcataacggacacattaactatattcacgacccagaccttgccctgtgtaccg

SEQ ID NO: 534194 - DNA, 286 bp, Homo sapiens
gatcataggagactctagatcatacaccgatagagaaatttctagtaagagtggtaagtagaagtaataagaaatattaaggtcttcagagaaatgtaaacaaatattctaaatgtgccctttaaatgtttttttaatgagaagagaatcaatttccaaagttttacatttgtttcattatatatgtcttaaatactcggcaaaagtaatatcaaccacaaggtacagatatggctcatttcatttcatggcactcagcagtagcccgggtaccgcagctcgcaat

SEQ ID NO: 534195 - DNA, 607 bp, Homo sapiens
cccgtcaccacgaggcccaggggcccgagtgccgagccctttgctccctcagacgcgcggggacagggctgctgagcagcctccggctctcccggctgtgggggccccactgagtatgtcggacgagagcgacatggacaaagccatcaaggaaacttccatttgagaagaatacagtatcaataggactcataagctgggagctggaattagtggtccaattagagtctgtgtaaagaaatctactgaagaacggttcgcgctgaaaattctaatggatcgatcagaagctagaaatgaggtacgtctgctcatgatgtgtgccacacacccatacataggtcagattattgaagtgtttgctaacagtgtacagattccccatgagtccagccctagggccagactcttaattgtactggagatgatggaagggggagagctatttacagatgcagccggaaccggacttatcacagaagcatgccagtcaataccactacacatagctctggctctgcagcactggtagtcatgggcacagatacctcaagcctgattgatttgccaagattgcccaagtgacttgatacaccctttacccttg

SEQ ID NO: 534196 - DNA, 575 bp, Homo sapiens
  misc_feature (55)..(55): n is a, c, g, or t
  misc_feature (63)..(63): n is a, c, g, or t
  misc_feature (99)..(99): n is a, c, g, or t
  misc_feature (203)..(203): n is a, c, g, or t
  misc_feature (206)..(206): n is a, c, g, or t
tatattttattcaactttattaaaaattaaaactacagaaaccaaaccgaatgcncaaataanagaggggggaaacagacagggagcaagggcagctgntaacgggggcgaggggataatccgcatgactcacatcccaccccggcgactgaggagcccaaaacgctgcgctggcactgtcgtgccctcttccaccacgaggngcncagaaacctgcaggagactgaaaacgattacaaacatcttcaaccagctctcgggccaaaggcagcaaagagcagccgtgaaatacgcaacttcagcgccaagaagggcagcagactctccggacatccagtgctaagaaggctaacacctaaaccacacgcaggcatccggaactcagcaggctctgatccagggtacggaggtggagacaaagcactcggagggggcaagatgttcagcaaccaagtaagacacacgggcaaggcattcccacccaaagggtgagaagcaccaaagcacggctgggacgaaccacaaccagctcagtgccagggtgcagccacgaccatccgggctataacgccctg

SEQ ID NO: 534197 - DNA, 249 bp, Homo sapiens
  misc_feature (217)..(217): n is a, c, g, or t
gcatagcagctacaccacagacttagactgctctgaaacctacacttcctgtgttttgcaacctgtctccaccagttgtgctgcctgtgtgatcttgggcagattcgcagaacttactcataacctcagtctctgtatttatacaatagggataatcattttgagctccttcgatagttaggagggttcaaacagagactgtatgttagcacatatnaaaagtgtcctctaggtcgacacgaatgttca

SEQ ID NO: 534198 - DNA, 320 bp, Homo sapiens
cttaatctttctgaagttcagtttccccattggaaaaattaaggctaggcacaatggctcacacctgtaattacagcactttgagaggttgaaggaggtgggtcagttgaccccaggagttcaagaccggcctgggcaacaaagtgagaccccccatctctacaaaaaaaatttaaaaattaggcacagtggaatgcacctgtagtcccagctacttgggaaaatcaggaagatcattcgagcccaggagttcaaggctgcagtgagctatggtcgtgccattgcattccagcctgggtgtcagagcaagattctgtctc

SEQ ID NO: 534199 - DNA, 381 bp, Homo sapiens
cggtgggtgtttttaaaaaagtgggcaaaaagggtttttgaggtgggaaggttcccaagttttccccaaaaagtcaaaagggttaattaatttttttccttaaacccgccccccccctttttaaaaaggggggaaaaacggtttcaaaacctttttttttcaatggcccctttaattttgtagttaaaaactgggttattataaccaaggcttgttaaacctttcaaaaaaaaaaaaaaatttttttgggcccccttggtttttttttttgggggggggaagttttaagttttagttttttaaaacagggcttttttaagggaaaaactttgcccaaaattttttccaaaattttttggcccctttaaaaagttttattta

SEQ ID NO: 534200 - DNA, 268 bp, Homo sapiens
gacggagtcagtcaggatgcaccttattcatcccagcacgaggcactgtacagacagggggagggggtcttgtctttttattttttttttaatttgaaacggctgaagaaaacattaggagaggcaaaaatatggttaaaaactagactctaaacaccccttccggctgtgaggatagtgggtgtgacaatggaaggtcacagaggttttggtttttgtgtttttttttttttttatacaaaaaaaagatgaaaaatgaaaaaaaaag

SEQ ID NO: 534201 - DNA, 146 bp, Homo sapiens
ctttcctcaactctgtggacagtgtttcttgaatttcctttcccccccccttttcccactcaagaaagtggggggaaaaccagggttccagcttttggtttttttgaaacccctttccaccctttaattaaggacccccgcttcca

SEQ ID NO: 534202 - DNA, 434 bp, Homo sapiens
gggatactattctgcccaccagagtcctcccaggtccttccgttgtcttcgccaccccagatctacatggcatgaaggcgagctggctgcggatctatgctcactactagctctgcctcaggttcagctggattctcgtacctcatccttccgagccagcgggtgttacaggtgtgcggcactacgcccagctaatttttgtatttttagtagagacggggtttcactatgttggccaggctagtctggaactcctgacctcaggtgatctgccctcctcggcctcccaaagtgctgggattacaaacgtgagccaccgcgcccggccagtagagctttttaaaatcctttttcctccccatccagtcctgaaagcttcagctgttttgcacctttccccttaacattccccagaaaaactcctgtatagtccc

SEQ ID NO: 534203 - DNA, 172 bp, Homo sapiens
taaagagatgaggtcttacttgcccggtcaagtgatgctcccatcttggcctcccaaagtgctgggattacaggcatagccgcagcacccagcttgagatatttttatattccagggttttaggtgttactaagaatgtgaactctataggaggatttccaggatgatagag

SEQ ID NO: 534204 - DNA, 960 bp, Homo sapiens
cgtgggtggcctccgtccaccacctcagctgcggacctgaggcgagatggcggcaccgcgggggtcggggaggctgcgcaagggggcgagcccggggcaggcggcgcaaacccctgcccagccctgcacccaccggcgccccaggcagccagcacaaggaagagatggcggcgaggcttttgtgcagccgtggacgtcccccatggacgacgggtatgtgagcctggactcgcacctacctatgtcctgtacagttagagatgttatgattacttccgagctgtcctgcagcgtgatgaaagaagtgaacgagcttttaaagctaaaccccgggatgctatttgagttaaatgcaaggcagattgatacagtgtggcatttaccggagagttcttattgaagatcacgttcagaaaggatctacattgaggaaatgaaagtacatcagcgtgaataaattgaggagcacgccagaaagctatcaaagtttgggcatcataggcgaagtaatagtggacatgtgctcagagatccatcgtaaggagcttgaattaagttggttgatattctttaagtcagggatgcagcagcaattatcattgacctggcaggcatcggacaatggggttgattcccggcaatctaagagctattggagatacgctgagcatgcaggatgtggaagcaagtttctgaccagaaggattgtgaagaaagtaaccgtcaatggatgttgggagaaccaaaaaaggaatccatttaggaaacttttacatacaggagagcagagttgggtgacagagatggatacagtgactgacatttggagagaagacagcatgtaccaagagtatcgacacagtgaccccataacaagaatgggacaaattaatagataccgaaagaccgtgttaagggagttcatacacgcagtgttaaccaaggacacctacgagaaaa

SEQ ID NO: 534205 - DNA, 407 bp, Homo sapiens
cagattcccgccaccatgcgcagctaatttttgtagatttagtagagtcaggtttcaccgtgttggccacgctggtctcaaacccctgacctcaagtgatcctctcttctaggcctcccaaagtgctgggattacaggcgtgagccaccacacccaggcaggttcttcagcatttctgacttttttactggaaactggttccttcatacaggttaagaatatgacccaccagcatttcgtgggatggtcttgattcaaggaagctctacaccttggtcctgacagacccggatgcttccagcaggaaggatccctacacgagaatggcatcatttcctgtgggtcaacatgaagggctgacattagcagtggcacagtcctcttcgatttgtgggctctgggcctcc

SEQ ID NO: 534206 - DNA, 91 bp, Homo sapiens
gggggggcccttccccttttttccccctccacgggaggaggttactgggaggggtttcccagagaattaaaaaaggctccttccgtgggga

SEQ ID NO: 534207 - DNA, 523 bp, Homo sapiens
gtgatagctgcccattgtgtgatatggttcctggcaagcccctagtgtgttgagagcttctccagactatcccacctttgggtccgctttagctgttccgtgataatgagcaccagcaccagttgccggtgggtgtccatccaaagccagtggaccagaaggctgctggagctggcaaggtcacccagtctgccccaggaagctccagaaggctaaatgaatattatcccttatacctgcccacccccactcttaatcagtggtggaagaacggtctccagaactgtttgtttccaattggcccatttaagtttagtagtaaaagactggttaatgatcaccatgccatcgtaaaacccttccagaaggaaaggagaatgttttgtggacccccttggttttcttttttgcgtgtggccagttttaagttattagtttttaaaactccgtactttttaatggaaaccacttgacccaaaatttgtcccagaattttgagacccctttaaaaagttaaatgaga

SEQ ID NO: 534208 - DNA, 186 bp, Homo sapiens
gttttagcaactcttaagagaccatggtattagataaacattgattttgttgttggttcacaatctctattgtagacttttcattattttatacagtgtatataacaagaatccactgctacctgccagtgcatcatcttctcttaacatctgttggtcctcctttgaaaactcacgtcaggatgc

SEQ ID NO: 534209 - DNA, 427 bp, Homo sapiens
  misc_feature (50)..(50): n is a, c, g, or t
gtcctcgctgcacttgtgacccgttcgactgtggtacttccgatgcatcngcagacgtgcaggcagcaccttctacggacacatactggcagcgcttcatgtcactggtccccatcaggctggatctcaggctccacgctgggcactatgccattctgctggcagaatactggaataacgggccagcacattggccttttccatgatggcgcgggctgagggggtgtgttccccaatcttcagcacacaacgccacttggcgaagtcagctccgtccttcttgtactgggcacagcgctcagaccgcccatccaacccttgggtggacagctcgccattagtcccggcccgggagaccacgcccttgtctacctctgatcccaacatcgaaggggttacccgcaggctccgcacttcggtactcatg

SEQ ID NO: 534210 - DNA, 112 bp, Homo sapiens
gcccactccaccttaccaccagacaaccttagccaaaccatttacccaaataaagtataggcggataagaaatttaaacccttgccggaattaggtattggcccccgaaggg

SEQ ID NO: 534211 - DNA, 400 bp, Homo sapiens
gggggggagtctcactgtcgcccaggctagagtgcagaggtgtgatcttggctcactgcaacctctgcctcccgggttcaagggattctcctgcctcagcctcctaagtagctgggagtataggcacgtgccaccacgcccggctaatttttgtatttttagtagagatggggtttcaccatgttggtcaggctgggacttgggttcttaataaaataccactctttgtgatggctacatctaagcctttgaaggtgagccgtggacataccacatgtggacagcatgaaatgctttttctgacactgagaggcacttgaaaaacttgaattcaaaagccaagccggcccaaatttcacacccccatgaaatcccacgagggtcaacaatgaaaaagacc

SEQ ID NO: 534212 - DNA, 172 bp, Homo sapiens
gtccagcacgctgctcccaagttacagatttggtagaactggacagggaggtattctgcgaagttttggatggatggatttggcaaagctaaggagatgaaagcatttcgagccgtctctgctagctgtgagcagtcgtgatactaactgtttgcttgaaagcggattcgtg

SEQ ID NO: 534213 - DNA, 214 bp, Homo sapiens
  misc_feature (189)..(189): n is a, c, g, or t
actgggcttgcaaaagggagctcactctctgggtggacccatgtgaggtgtgctgtcggtatggagagaaaaacaatgcattcatttgttgccagactttgaaaatacaagatgagaacaatggatgagatctccagtgaaagttaccagtggcccattgataatggttacctcctgattatcattcanggatcctcattcttcagactgaaga

SEQ ID NO: 534214 - DNA, 290 bp, Homo sapiens
cctctgctgctccctcttcactgctgcttcgctcttgagcagaatgacacacagacacgtgaggagttccatattattttaaaaaaagaaaagtaaggccgggtgcggtggctcacgcctgtagttccagcaatttgggaggccgaggtgggcagatcatgaggtcaggagatcaagaccagcctggctaacatggtgaaaccccatctctactaaaaatacaaaaaattaggcgggcgaggcggcgggcgcttttatagtcccagctactcgggaggctgaggcagcag

SEQ ID NO: 534215 - DNA, 137 bp, Homo sapiens
actgtgtggcatccgcaccccctcccccaatgaggacactttatattaattgtataacatagaatacagttgtttccaaagagaactcaccctcactgtgttttagagaattcttcccaaagttccgttgaagccgt

SEQ ID NO: 534216 - DNA, 256 bp, Homo sapiens
caaaaaaagggaaaaccccgggggtttccccccaaattttgggaaaggcaaaaaaggggggttttccccccccccgggggaaatgggcaagggaaacaaggggggtttggggttttcccaaagggaaaaaaatggggggtcccctttttgttttccgccccaaccaaaaaaaaaacagggttttgaaaccccctggggggcccccccccacccccccccttaaattgggccccaaaaacaggccgggtttttttta

SEQ ID NO: 534217 - DNA, 1632 bp, Homo sapiens
  misc_feature (480)..(480): n is a, c, g, or t
taaagggctggtttaattttaatggggtggatctatgttaatccacagaaggcccagtagtgttacagaacaaaggtggggagggtttatattctcttggggtctctttccctcctgtggataaagttctgtgagtgatcttccctcctttctgtggccgtgggagggcgcctctttcagcgggcgcctgtggcgtgtgtcttcctgtgtggttcttgagaaccgtgtgcggtgccctcgagccgcgtggtgtacagccacagggagcgctttctgtggcgggggccctgtgtgtcgtggctcttcagtctgtgtgtgggatggtgttctccagtggaagaatctctcagctgtggggtttgtgagagaacaccaattctccgcacttttcagccttttcagggtttaccacggcgcgtggtgaaccacccatgtgtgtgcggagacctcggagctctatctcttatacgaatttcacgngggaatatatctatatctgtggaagccaggccggcgggcggacacaaaaatctcccgctcaatatctctctcctctcaatttcccagtgtgtgtgtaccccttatctctcctgggggacaatatctcgggggggccacttgttgcggctgtggtgtaccccccccttctcggcgggtttatacccctatatgtgtcccccactgttgtgtgtccctttggcgcgctatactcccggggggggggcgcccacagggcgcgtggtctcatttacccccgggcggagcatttctagagaggccccgcgggagaatatttgcgaccccgggtccacccagcgcgctcttgtgccggcgatttagaacctccaagcgccccgacatcttttgtgggtattgcgaagacgctatcctcccccggaggaacatcctgctcggtcgttgaaacccgggcgagagaagatcctgtgcgccccaattgtgggcgcggcacatctctccacctgctggcggggctccctccacctggtgcggggggggcgtctctataaaaccgccaagaaaagcccccttcatacctatctctatttgggcccccaacaacgggcggggacagggggcacaccccccttatacacagggggcagaaagacgccccacttttctcacctgtaaaaggggcccctgtgtatagggccaaataacctcacacacgacggcgagtgccgcggcgcaccgccgccacccaaacgaactctcatggcgcccccccacgctgcgttaccaaacagcccccgcctgttggtaccaccacacccaccaccacgcggggcggggcggcccccgtgtggccgctagaccccctgtgggtgcaccacacaacaagcgcagcggctcacaagccatagggtctcgcccggcggacagaacggccggtgcggcgcgtacgcccgccaactaccaacccccgcggcgcgccccccactgtaccaacaccccgagtcgtaacgcccgtatgtaaaggcgccgccaccacacccaccagcgggcggtgagtagctaccccaacccttccaagctagcactgaaccacgacgcaccgcagcaccagccagctagcaggccggcactcgccaccaccacagcaccactcgg

SEQ ID NO: 534218 - DNA, 1081 bp, Homo sapiens
  misc_feature (927)..(927): n is a, c, g, or t
ccagatagtgggtttcggctcacataagtttgctcgggcgcccttccgggtgtccgccgtgagcaggacgtgtttgggggccccgttttacccgggggcctatttttgcgcgtcgcccccctcggcgttttcctgggcttgcccgtggccccacatgggggggctccaaccccctgttttgggggaaccaatccccttgtgtcgggccctcaggaccactggatcccccaggtggtatacccaggagtgccaaccctggagggtaccagagccacacttggggaggtgtataaagtgagggcgtccccgcgtgtggcgcgtacacccttctgcccaggaagccttgcctgccagtggcagcacgcgtcccccgcccaatgggactgacccggggtgacgctgcgacgacacagacccaccgcgctatagtgcccccaggggcgcccaacccccccaggacgggcccccatgcccaggcgtgcaccagtcggtcaacggcgccatgctggccctggccacatgggcaggcccttgtcgcggccagaaatcttggcccatgagctggcgaaatcttcccatcaccgggcacaaagtcctgcccttttggtggccatcaagagagaaagaacccattgcggcccaggcgccccagagggtgacactgccatctgtccgtgcccagaccggtagtgcaccaagataagagacatttttcagaccctggccagcccttcgtatctcaccgagggccctggagagtgccacattctgtggaaccacatacccgggagatctttctgactatctgccttctcctcggactgaggccaggcagaggcgcgtggccctggaacgggtgacagggcccacccccgggacatgccaaggccggccggatgtccaggcccctgtcttgggcccagaacntgagccgctgtggggagcgcgcccggacctggccagtggagacccccgagcgaaccagctcggtcccgtgaccccagatccccgggacctccgatcggcttaatcaagagatgtggcatagaaggctatttaatgattaaaatccatttgccag

SEQ ID NO: 534219 - DNA, 501 bp, Homo sapiens
cctaaccaatatctgccccttggatcttgttctcttcccaaagaactatctatgtgtcaacaagtcatttaaaagacaccaggacacagttaattcagttgcttcctccagtcttactttctctgcctgtctggcccttcttctgtaagctcattgtgaaaggagcatctttacaggccagcatgtcaggtagactatcctgaaaattttataacattttcgggaagcagcttatgtaattaatttacttgtgggtggatattaatgccaactccagaactaagatttgcatacgtgtctgagcctgtatccagagaaatgtatctcagcagcagggataaaggtcattttaaccattatcaaattagatgctcatcctccaatttagcattgctctatcgggaggttggacagcacacagtcactctcaatatgcattattcaagtcctttgtggcttttcttgtctcctcttcctgccttcctttggttaaaaaaaaaa

SEQ ID NO: 534220 - DNA, 211 bp, Homo sapiens
ccagataggtgctggactaaggtacgtgtacatggccactaatctttttggtttatagtagagacagggtctcaccatgttagccgggatgctctcaatctcttgaccttgtgatctacccacctcggctcccaaagtgctggggttacaggtgtgagccaccgtgcctggtctgcttgctgttctctttagtgttcttccctaagtttaa

SEQ ID NO: 534221 - DNA, 205 bp, Homo sapiens
aatgagccgagggaaacgtaaagagacccacgatgaacggtacactgtgcatgtgaaagctgacaaaaatgtatgtaaatacacacggaatatatcagagtgttagatattataaagggacactcagtgccctctgccttttccccatcctcttcgttccacaggtctggaagccctggtagctcttcctacaggccatctggcc

SEQ ID NO: 534222 - DNA, 346 bp, Homo sapiens
tgagttctaacaaggaggataacctctagggctagacattttaaatgaatcctggctctgcatttatctaaccatgtaagtttgaccaaatcatgtaaccttcctctgagtttcatgtttctcatttttaaaaagagaagataatatttatcttctgtggtcgctctgagggtcagggataatggaaataaaacactcaatgtttgactcacagaaaaactctaacacaagatgatagtgatgatgatgataataatgtgattcaaatcttaaagtatttgatttactaacaattgtttcttatttctctctgtgaatcaccaggaagacaggacctccttttcat

SEQ ID NO: 534223 - DNA, 148 bp, Homo sapiens
tcacttgtggcctggattactggtctgtcctgtcccctgggtgttcagccggggctgagccaggcttagggattgcagggccttcagaagggtagttctgaggatatcagcgtcccccttggtgaccaaggggatcctctaccagctg

SEQ ID NO: 534224 - DNA, 258 bp, Homo sapiens
aatctaacgacaggctctacactctgtcaccccggctggagatgcagtggcacaatctatggctcactgtagtgtagacttcccaggctcacgggatttctacccaccccagactcccaagtagctggaactcacgggtgtgcaccaacaacacacactggataaatgtctctcacacaaaggtaaacacagagtatacactatttaaccctcagattggtactccaaatcctggcctacaagcgatcctacctgacc

SEQ ID NO: 534225 - DNA, 226 bp, Homo sapiens
ttccatgtacaacaggagagaatcacagtaaaatgttttatctagggtcagctacttcttagtggcctgaatgtcatctcctatatacaatttacagacttggaagatccccgagtgtccacctcttagaattgaagccacttttgcccctatacgtgaagtgtttcctgatacacgctgacgtatcgagggcactacagcccgagcaataggaggaggaggagga

SEQ ID NO: 534226 - DNA, 813 bp, Homo sapiens
agagcatcttcagcgggcgagttctcggttcctccagctccttcctcctcttccgtcctcctcctcgcacctctcggctttagggggatcactgtcctctctcgggagcagaatgagccggcaggtggtccgcgtccagcgaggttccggccacgtgtttgggacagccgggcaagggctgaccagtgctatgatagatgtgcgcggtctcactagagcacactgggacagttggcttctgtgctgtcgaacccgtaagtttgtggcccgtgatctgtgaggccagcgggggaggggccttgcctggttgctgcccctggtgcaagactggacgtgtggacaagaatgcgccctacggtctgtggccacgacaggcccctgtgctagacatcgcctggtgcccggcacaatgacaacggtcattgccagtggcgtccgaggactggcatcagtcatggtgtgggagatcccggatgggggcctgatgctggcccgtgcgggagcccgtcgtcacccatggagggccagaccaagcgtgtgggcataggggcctggcacagcacagcccaagaacgtgctgctcagtgcagggttgtgacaacgtggatcatggctgtgggacgtgggccactggggcggccatgctgacactgggcccagaggtgcagccagacgacgatctacgagtgtggactggagccgagatgggagggcctcacttggtacctcctgccgtgagcaagacgcgtgcgcaatcatcgagcccgcaaaggcccggcgtagctgagaagagcggtcccacgagggacccga

SEQ ID NO: 534227 - DNA, 172 bp, Homo sapiens
cttgctctgtacactgtgtgccatcttgctccacgtccatgcttgtgcctctgccggcttgggccctgctgcatgtgtggggctgggcttcctggtctgcgtctcaccatgtgtgtcctcacccaagcagcgcatcacatggggtcccggcagctcgcacttctgtcctcca

SEQ ID NO: 534228 - DNA, 206 bp, Homo sapiens
aggatccccttcgaggctcggtaatccatgagcttattggaaatctggttgggacatctttatttttgtcctaatgttcagatacccaatggacttgggagtgaagaaattttctatccacacctcagtttttgtaccgctggctgcccagtatgagaggaggagtatcacgatttggtgtgccccctgctagcacgaggctatag

SEQ ID NO: 534229 - DNA, 326 bp, Homo sapiens
  misc_feature (250)..(250): n is a, c, g, or t
tcagtggcttctaatttattcagagttgtgcctgcatcaccacagtcgattttaaaacattttcatcaccccaaactgaaaccctgcagccaccaatctgccttctgtccatggctgtgcctgctctggacattttatgtcaacagaagcatagaccctgtggcatttgagccaggcttttttacttagcacagtatttttgtagcaggtctcaggactcctttccttgttagggctgaattgccagtanaccttcagctcatgtcatcttgaagccggtgggggatccctgggcctctggctgctgcgccaggggagggggaatc

SEQ ID NO: 534230 - DNA, 335 bp, Homo sapiens
tagaggatccggaccagccaaacaataccatatgatgtagagcgtcagtataagacagaaagattgaatcatggtgctctttgctcctgtatggtctgtccacagaagaacgtcccggatgcagcagaacataagtggcctgttacatatgaagtgcgcaaaatatactagcatttactatatagcataatggtgaaacctgcataggttagagggccctttacgctcatttcacatatcaggcaagttgtctgtcacattgaatcactaatctgggaaggctctggaatcgcagtgtacgatgtgctgatcatgggtagtctttgaggggatgg

SEQ ID NO: 534231 - DNA, 217 bp, Homo sapiens
aaagaacgaggcggaagtgagcagatcgctcctccctggtatgagcagactgacagtttagcttaacgaatctgcgaccacagcttgccgcataaaagaatttcatgagctgagccggacactgagcaagagtttaaataaaatctaactgtcatctgacacgcagagaaagacatagctaattcctgataagcttttgatttttgtattgtttgca

SEQ ID NO: 534232 - DNA, 590 bp, Homo sapiens
  misc_feature (132)..(132): n is a, c, g, or t
gacggtcaaagaacggcaggggatccacgattcgcagcacagatagctggcacccagcaggggatgccgtcagccttcacaggccctgagtccagtatacggagctgcctggaatccatgcaaatgcgttcntccagaaagggaattccactggatcctactcacatcccaagaaacatgctgctgtggcacagcaccattttaagaggctagcccccaccagattatatcctgcccacttggggtccaataagcccctgcagtccacatctctggaaccccaagaacatcctcccacatccatccagaaggttgcagtatcacaatcacccagcagtgcagtcaggtccccagtactctgacccatgaagtgtcttctatcccagggaacaggcagtatagcacaccaggtaggctaccccaggaaaaagggagctgaagctcccagaagctgggagccatcttcccaacaccaatgccaacaacagaagcttgcccctctcaggagggcaacacgcatgcctgtgtgcaccttcaggggggcctgagggacagtatgtccatatgttgccatcaagaacctaaagaca

SEQ ID NO: 534233 - DNA, 443 bp, Homo sapiens
  misc_feature (144)..(144): n is a, c, g, or t
tatattggcttttttccaaggccccaatcttccttttctctgggccttcccctggctcctgggggtggggccaacagagccccggccaggggtttgtttttcccccccctgcttttcctccaaatgtggggggggggaggcccngcccccgtttttttcccaacccctttccctttgccctggggccccagaattttcccttttaaccaaggccctgccttttcccccccccccttttccgggggccctttggttccttccccccccccccccccggcccccggtttggaatattggtgggaggaaggggaaaggggtgggcctcccccctcccccccatttaaggggcccccctttttggggccccccccttaagggggggcgggcgtggggggggccccccctttttttttttttgggccattaagcttttttgccccgca

SEQ ID NO: 534234 - DNA, 907 bp, Homo sapiens
  misc_feature (205)..(205): n is a, c, g, or t
ggagcgcgtgggggcggtaagcgcggggtccagcgcgcaatgggggcgcggaggcggctaatggtgaccgggatccggagcttcctgcagcagcccggaaggatggtgccatattgggagacacgcatgcatgggtcggcgtaaagaggccttgtgaagctcgatcccaaggcaggactgatgtgaaatactccaaccagcatcntctttgtgcccatcaggaggagaagcttgtcgcatgcgctgtgcccagggtccctgtatgtccctacgggcttggtgctatccagatttgcacatgtcctagggtcaagggttgacatgggtcacgagtatgagtccatgcaagaatatttcagactggagccacacgtacgggcgagtcccacgaacgaggcccagatgccaactacttcgatggatgccgtccaatggtagtccaggaagcgcctctcagcagcaactttacttcttttaatgacttacctgcctcgccgaccattggtcaatggagcacccaaccaaatccgcagtgcgggtcattggcacccaacaggatgacgtggacccaggcgctcgcaatgtcaatacggttgacccctaagatgactagcccttttaacgaagaaagtccgaggcagcgccgaggcaccgaggacttgccgataccctgttctgctgtaccgacgtgcacgaacaggggcagaggctcgggatggcataatcgcgcaacaaagacctcgagtaacgtcctgaccgagtggggaacgtaccatagaggaaacgggttcttcccacgcagggaacccaaagtcacacttgcttcggaggaggacggcaacagaccagacggacccttcggaataagagacgggacagggcgtaacggctgcggccagaacgaaca

SEQ ID NO: 534235 - DNA, 1035 bp, Homo sapiens
tagtaaaacaacctagttctttaatttgtgcccaaggccggcgtggtggcaagcacgtgaggccccaagaatttccagaaagggaaggggaggaggggcaaagcacgtggtgcctaccagggtgctgccgtgccccgtccgtgcttccgtgcaggagggtgggacagggagagaaaagcggacattcggcgccatcaagttattttccccgaggttttacagccactattattctcagtgtggtgggaggaggaacacgtggaggccacaacgccattcccccccgagggcttcatactgtgcatagattccagaggcgttataacttatacatcaccttccccttcaatcttcttacccccgagacagaaagtgagcgtgataagacagccgtggggaagggtcttcaagggagcccaatcgtgggtggccgtggtggaagccgggggcacaggccccaggccgagggtgctcaagggccataggggcgtggggggacagccagagaagcgggcatggtgcgatggagaggaagccacatgtgaatgagaccgagcaggagcgagcgaaactcggacaaccacaaacagagggacacccccagaaggaggcgatacccaacaccgcggactaagagcaggcggggcgagagcacaaggccaagaacaccccgtaccaagcgtgataccacgacacgcggcacaccactcggcagcgcacgcaaaaagcccctcccacacccactggggagacaagacggacggggcccctccctctccaaacaacacccagggctcacacaccattatcccccccacagcaacaacgctgaggcaccaggggcgattagagcgcgccctatggacaccgaggagcaccaccagtggacaaaaccgcggagcatggaccaacggaaatgacgagacaggcagccagtgagcacccacgagcgcacaagagcccacccccatacaaccctgctggaccaatctgggaggggagaccccccccccacacaacgcgccgggcaaaccg

SEQ ID NO: 534236 - DNA, 468 bp, Homo sapiens
  misc_feature (223)..(223): n is a, c, g, or t
  misc_feature (228)..(228): n is a, c, g, or t
  misc_feature (235)..(235): n is a, c, g, or t
tgtgggcagagagggggcctgagagctggcgcagggggctggggcaggcccaagctcatcccctcactagccgacctcactagccgaactttctggcctttagtgtccttgtctgttaattggggcaggcagtacccaccctgtgggatgtcagaggggctggccagcaagtggacaacacatggtccctcagggcaggaggaccagagagcaggagaggagngccangttggcngcctcaaaggccacagtgaggccccaggtctaccagatctctaacactaagaccggtgagctgggcagggggaggaagtcacatcccatggggtgaggaggaagatcaaacgtaaggaagcagagaaacatccaaatcattccttgaagaagtgtctcaataccacagggaacaaactgattttttttttctggagacagagtctggctctgtggcccaggttggagtgcagt

SEQ ID NO: 534237 - DNA, 270 bp, Homo sapiens
gcttgctgtcccagcggcgccccctcatcaccgtcgccatgccggagtctgcttctcgggggacgtggctcccaacttttgaggccaataccaaccgtcggccgcatccgtttccgagcctttcctgggagacttatggggcattctttgttcccaccttgggctttacccaattgtgcaccacaaaggcttgcaagcttgcaaagtggcaccagaatttgccaaggggatgttaagttgattccctttcaattgcaagtttagggccac

SEQ ID NO: 534238 - DNA, 184 bp, Homo sapiens
  misc_feature (29)..(29): n is a, c, g, or t
gaaaacacccaaaccccccggacaaattngggggggttctttaagggtttcacaaacattcaacccaaaacttggttttttccttttttttgttttcccctttaaaaacaaaaaaaaacgatgataattttttttggggaaaaggaggggaaaataaatccacaaaagccccccgtttgtggga

SEQ ID NO: 534239 - DNA, 398 bp, Homo sapiens
tgtatttttagtacagacagggtttcaccatgttggccaggctgctcaaactcctgatcgcaggtgatccacccgcctcagcctcccaaagtgctaggattacaggtgtgagccaccgcactcggcctcttttttttctttttaaatagagatgaggtccctgcctatgttgcccaggctgttccaggctgttctcaaactgctgggctcaagggatccacccaccttggcctcccaaaatgctaggattacaggtgtgattcaccatacccagcctctgctgggactttctataagaaattgctggctgggcacaggggcttacacctgtaatggcgacgcggccgcgaatttagtagcagtaggccggcgctcttaaggagccaagccttacgtac

SEQ ID NO: 534240 - DNA, 386 bp, Homo sapiens
gggtaaatagcgctgtgtcatgctcactgaagagttttttttgatacacagtctcactttgtagcccacgctggagtgcactgtgatgatcacaggtcactgtgtggctcaaactcctgtgctcaagtgatcctccaactctagactccccagtaggtgggaccacaggcttgcaccaccacacctagctaatttttggtggttttttttttttggagtgaggggggtttggcatgttggccaagctggtctcaaactcccgggcttaagagattcacatgtctcgggtttccaaaggcctgggattacaagcgtgagccaccatacttgggcctgaaggatttgtgattgctgcatttatgatttatttcacacatgggctgggg

SEQ ID NO: 534241 - DNA, 291 bp, Homo sapiens
gctttatcagcgtgcaatacgccggtgacaaagttctgatgttttccgggcaaggcctgaaagtaaaccggggcgcgagcctgcgggagaagaagaatgatgcgttttgttttgtttctttgcgccagtctgtttttggcgggctgcgccagccattctggtgatgatctgcaacccaagaccgcgagcaacgtcaacctcaagcgttaccagggcacctggtatgagttggcccgattgccgatgtacttccagcgtaactgcgcgcagtgtcgacgcggccgcgaattt

SEQ ID NO: 534242 - DNA, 150 bp, Homo sapiens
ggacacgtagaaccggtcaagccaccactacggtcatcgagctataaagcggtggctacgacaaatgatccattgagaaaccgagtaggatgcgctgagtaggtattgggctcttcatgatgtcctggtctggataatctgaagttgagc

SEQ ID NO: 534243 - DNA, 386 bp, Homo sapiens
  misc_feature (76)..(76): n is a, c, g, or t
ggtacccgcggttatgtcttacgcctacaccatagctcaggcaacgctgaatctgaacccactgagcgaggccagngatcaaacccacaacctcatggttcctagtcggatttgattccactgtgccacgatgggaactcctaaaaaataatttaaaaacttccgtaacgtaagacataaccgcgggcggttatgtcttacgtgtcttacggtaagtctagtaatttccttaatgatcacagtggattttatttttatttttttcctctttttaaggctgcacccatggcatatggaagttcccaggctaggggttgaatcggagctgcagctgccagcctacaccacagccactgcgacacgggatccgtaagacataaccgcgg

SEQ ID NO: 534244 - DNA, 122 bp, Homo sapiens
agagaggtgtgcatggtggcatggctggtcttgaactccttgactcaactgacccgccctcctcggactctcaaggtgctgtgtgattgataaggcatgagccactgcgccctagactacga

SEQ ID NO: 534245 - DNA, 133 bp, Homo sapiens
gtctgaactgtgcatcctaggggtataagtgcgctcattatgagaatctaactaataatgcctgatggtctagaggcgtgtgtggggggtgtggtgtggtgtgtgtctgggatgtggtgtctggggtgtggtg

SEQ ID NO: 534246 - DNA, 176 bp, Homo sapiens
acctttcgctgatttcatcaagatgaagaaattcggtcccatgatctggtgtaatagaatgaacaaattctttaggaatggcccctaacagttcaactaagcctttatttatctcctgcgagtccttttgcacaacctttttgataagcgtaagcgactaagccgatcgacaaccg

SEQ ID NO: 534247 - DNA, 623 bp, Homo sapiens
agtggtggctcacccctgtaatcttagcactttgggacaccgaggtgatggatcgcttgaggtcaggagttcgagaccagccgggccaaaatggtgctactaaaaatacaaaaattagccaggcgtggtggcacacacccgtaatccaagctactcaggaggctgaggcaggaggctcctctgaaccccgaaggcagaggttgcagtgagcagagactgcatcactgcactccagcctgggcgacagagtgagtaagactccatctcaaaaataaataaataaggccaggcacggtggctcatgccagtaatcccagcactttggaaggccgaggcgggtggacttcctaaggtcaggagttcgagaccagcctgaccaacatggtgaaaccccgtttctactaaaaatacaaaaacaattagccgggggaggtggcaggatcctgtgggaggctgaggcaggagaatcgcctgaacccaggaggcggaggttgtggtgagccgagatcggccatttgactccagctgggcgaagagcaagatctgattcaaaaataaataaataataataaataatataaataggtttatgttagatgattgccaagtgtaaggtaatgtaa

SEQ ID NO: 534248 - DNA, 615 bp, Homo sapiens
acaaggggttacagcaactttctcaggacttcgccagtaccggggccgttgagggtctctgttctcgactcctagacccccctatgaatcatggctataccccgaacctgttaaaaagacagaaattagacaagggtggatgcgaggggctctgaatgcagatgctctggaggacgatccaggaacaagactaggacctatgacatgaacagtggcaagcgcaacttgcattctatgagttctggccattctggtttacactgttggagtgctgtggagacatgacaacgacactagagaactattcctataagtaaacacatgggaggaccctgtggccaagcgttagctgtgacagcttatgataagccagttctgctgctggacctagaaacagtcaatctgtacaaggtgaagtcccaatcgtctgcaaaccaaacttgtctatatgaaagacccccgcgtatcctacatatgctcgcggtattctgagtactagttgacctccatagactgagacctcagccctcccgtgtgcccttcataccacttcaagctgggggtaaagagcttgattcttgttccaattggaaacttgtttctgcatttctcccg

SEQ ID NO: 534249 - DNA, 407 bp, Homo sapiens
  misc_feature (9)..(9): n is a, c, g, or t
  misc_feature (17)..(17): n is a, c, g, or t
tagcccctnacctgcanaacctactgtctgtctggagctaatgtctgtattagcctagggaatagccccacaaaaattttatttcctaactgaaaattttatttcacctctggttgataagacccccaccccatggctgggcgcagtggctcacacctgtaatcccagcactttgggaggctgaggcgggcggatcacaaggtcaggagattgagaccatcctggctaacacagtgaaaccccatctctactaaaaatacaaaaaattaggtgggcgtggtggtgggtgcctgtagtcccagcaactcgggaggctgaggcaggagaatggtgtgaacccaggaggcggagcttgcagtgagccgagatcgcgccactgcactccagcctgggtgagagtgcaagac

SEQ ID NO: 534250 - DNA, 275 bp, Homo sapiens
tgaactcaagtgatactccttgcctcatcctcccaagtggctgtgacctcttcctcccaaggagcatgtgccaccatgccgggctaattaaaaaacattttttttagaagatggggtcccactaatattgccccgtgcttgtctatgaactccgtggtctcaagtgagtcctccatacttcgtgcctgccaaaggtacgtgggataacacgacaagaagcgcgtcggtgcctggcgccccagatttttctcgttaagtgtgcttgtgtcgttttg

SEQ ID NO: 534251 - DNA, 1782 bp, Homo sapiens
gaatgcacgtgcatcaaacgtgtggtttggtttttggggggattcccagacccactctccatcatggaacgcaggtggactcctgtccagattagtcttgaaggaggtctgtgcctgatgggaaggcagagcctctcacctggcctggcctcagctggcttttggggtgctctgcagcagggcaggcacgtggccagccacgaggaaagccaaggggactcagcccgggaagcggcctcgctggctcaggcgtggctgtggtgccgggcctcctggggagcagcctggggacagggagttgccttctctctgcctggttgccctctgcgtggggtgaaaccttcccgcacgtctgtgttgctgtctgacttttaaacactgcatgaaacagaggccttgccatgccgtggctgcgtggatctgtggagccagtggagactcacagcagtgagcagtcctgggggcccagggtgtgacccccgtcgtccaaaccccggcccaacgtgtgcagagccctcccaccatccactcgctgcaacttttctttaaatatgcccatctttttactcaaatttacttatttaaaagttaattttgggctgagtgcagtggcttatgcctgtaattccggcacttggggaggccaaggtgggcagattgcttgaaccccggagttcgaggccagcctggttgacacgctgaaatcccgtctctacagagaatacgaacattagctgggtctgatggtgtgcagctgtggtcccagctactcgggaggctgaggtggagggattgcttgagcctgggaggttgaggctgcagtgagccatgatcttgccactgctctacagcctggaagacagagtaagatccaatttcacacacacaaaaaagttaatttaacaaacccctttcactatttaattgaacatacttcaaaattagttaaattaggatcaataatttatataaaaattgtagaaataccggaacaaagtgcagatgaacacctttgtcccaaggggcctgggccatgctctatagtcagcactcaagtgggagaggagctcacactctcagagcattgagcattgagaggcagcatggctgcaactgtgaggaaatataggggagccacatgaccgagcaagggcttacctacttatcactctgcctaagagccacctactggatcacatcccaaagcttcaacaccaaaaatgcctcactaacatatccctgctgtaaaaccaaagaccagaagtcagatataaataaagaccctgcacaaagcttcagccctgtgaaaacatccaaaagtctattgactgtattcaatttacaccacagttaaaggaacacccacatgcagagatgagaaagagccaatgcaagaactctggcaactcaaatggccagagtgacttccatcctcgaaacgatcactccttgttttccaacaagggctcttaacgaggctgagtcggcaggaatgacagaaatagaattcagaatatggatagaaacaaagattattgaggttcaggaggatggcaaaactcaatccaaggaaactaagaatgacaataaaaggatacaggagcagacagatgaaatagacagtgtaaaaaagaacctaactgacctggtagagataaaaattacactacaagaatttcacaatgcgatcacaagtattaacagcagaatagaccaagccgaggaaagaatctcagaacttaaagactgactgtctgaaataagacagtcagacaagaatag

SEQ ID NO: 534252 - DNA, 110 bp, Homo sapiens
acagagtatacctatacaatgtcgtgtcgtgccaatgacatttcatttgcatggattttgggttttcatgctcagtcctcccctccatttggtcttactgggtccctctg

SEQ ID NO: 534253 - DNA, 249 bp, Homo sapiens
ctcattgtgggagagatcgtgtttacgggacgcaggagctgagggtcggtcagttctggggtagttccatcacttggtgcacagaaatgactcccgggtacaggggagcggatggattcatacagaatgtcaggagcagtcgcagtacagggcctctgttagacatgttttctcatgcctggggctcccgccctacataagtgttctgggagtaagctagtctcacactctgcggtcagcagtcacttc

SEQ ID NO: 534254 - DNA, 148 bp, Homo sapiens
gactctagagtatcccccacctcacaggacgccagccttgacgcttgaagcttcggagtcacgggtttgaaacttcaaggggccacgtgcaacaacaacaagctgtcactgtccaatgccatctcgaaccgcccgggctaccgagctc

SEQ ID NO: 534255 - DNA, 480 bp, Homo sapiens
  misc_feature (2)..(2): n is a, c, g, or t
  misc_feature (386)..(386): n is a, c, g, or t
  misc_feature (434)..(434): n is a, c, g, or t
  misc_feature (466)..(466): n is a, c, g, or t
anattcggaacgaggttggcccatgtctcttacatctccttacccagtttttacagggccgtgttagagccttcacccatggaacagtacaagacatgatgctactccgagaataccgacagctccaggaacagcagtccctactacccagcctctccccccaaccatcgcccctattcagcaagaagcagccagaggacaacggcgcccctcttctattacctattaaaaggctggaatgttaggaacaagttgcaccagaacccctccccaccccaatgcagctgtcccttaccctgaatactctggcagctgcattcctggggacccttatctagggcgctacagcaaggtcaccagatttgctttacagccctacgggaggncatggggggaggtcaacgagaaacgtgggattaaacttaagtttacanccttttgttaaatttcctattatttgttaacntgggttcacgagat

SEQ ID NO: 534256 - DNA, 781 bp, Homo sapiens
catgcccgctcggcccacccggccgggacccccggacccggtgctgctcaggcccagttccagaggcttcgctccttcgggcgctcttacgccggggtcgcccggccgcacaccccggccaaccgcctttccacgggcctcttttctgcgtctataacctgggctccgtggatagcccctccatgagggttctacagactgcctgtctgcccctgcgcgcctgcgccgcccctctcgcaaggccttggcggtagatctgccttccgagagggccatctgcccgcctgttccgtcttgctcccagaccctgccctacctgcccaggttgcgctgtgcagtgcccagtgggccaatgccccccgggaagcctggcccgcttcgctcgtgccttttagcaccccccagggccccgaccttgtcctctgggcttcatggtcaacctcttggcctggatggactcagggagcacgggacctgtgcccggcccccgggctgcccttggacggagaggagagaattgtgttcctgaggggtcgctacgtggaggaagggctaccgcctgcccgtacgtgcaaaggtgttagtggagacgccaacttcgaggacgtaccctggaggaggtggtcatggcagaggaggaaaatgagggcacggacagacctgggtccccagcctgaggagggagctgagcctccccgagcccccggactgggcccgagcacttaggtttttttttcccaggtttcccggttattaaaggaacttgttttgttggtaccca

SEQ ID NO: 534257 - DNA, 324 bp, Homo sapiens
gactataacacacacacacacacacacacacacagaacatatgccagaaagagagattgtatgctctgcaatgggcagcaaatagagggaagaaaggggaatctacgacgacctttttatttgagaggcagagtcttgctgtgtcgcccagagtggagtgcagtggcgtgatctcggctcagtgcaatctctgcctcccgggtacaagtgattctcctgcctcaggctcccaaatatgtggcactacaggagtgcaccaacacacccagctaatttgtgtatttacagtaaagacaaggttgtgccgtgtatggtcgggctgag

SEQ ID NO: 534258 - DNA, 346 bp, Homo sapiens
aaggctctgaaagaggggagacagggaggaggctgtggacagagtcgggaaaagatgatggtggccgatgaccgagagccctggctgtagcaacagggagacaaatactagaatcccgtggtaccagtgctatgtgttgatgggatggagatgaataatccaaggaccccctggtcctgggctgatcgcgtgctgtgtgatggcgcagtccttcgccaaaacagggtgcaacgagcatggtcgagaggagagcaagtgcctcctcccccacaaccatatgtccaaggctaagtgaaatactctagcggggagctcatacctccattgccccttttccagagtctct

SEQ ID NO: 534259 - DNA, 1731 bp, Homo sapiens
  misc_feature (1249)..(1249): n is a, c, g, or t
  misc_feature (1698)..(1698): n is a, c, g, or t
cctggcgggctggtgcatcattacagagtaggatgcggggtgttggacgacgactagcataggtagagtcgacagagaactggttgtggggggagccacaacacacatataggagtgtgttagcgcactcgcacacggatgggtgggggggtcgctccacacgcgtctgtgggtgtagcagccgcaggtcatgtggggtgggggacacacatcggatgatcgtcgcgtgtggtgtgtggggctggggtcgcaccgcggttgacgctccggagggagcccacacggtaggtcggtagctaacacaaggaagtgtggtggtaccctgcgggtgacgcagctgcgtgaggtagtgctgctgggattgtgtggcgcgccaccaaccagcgagtgtatgttggaaggacgcggggtgggggttcacaaaggggtgcgcatgtgtagaggtagtcgccgttgttcgacacacgacggcgggcgggggatatgacgacagcacactgtggggtgggggccgccccccaccagcgatgagtggaggggagatgtgcgcgccccgccgcggcgcaggctcgctgtgtggtggtggtgtggtagtggtgctgccgcagactgtgatcacagaagcaggtggtagtggtggtgcgcagtcggagggtggtgttgtggtggtggtgtgcgcgggtgtgtggcgacaccggggcgtgtctcggctgtgtgggaggcagcccctctcagaggagagttgagtagttgtggggtcacacccgactacactcaggtggcacgccacgcacgagaggagggagtgggctcaacagctggggtgacacacaacagagagatgtactgtgtgtgtgtgtgtgtgaagaggtgtcgacaacaacacacacagtgagggggtgtggctccgcgtggtgcacacacgtgggacaacacacagggggtgtggtgtgtgtgtgtgtccacacggacactacagtgggtgtcgcacacacatagagtgagacactactggggcggacacaacagtgtgtgggtcgtcgacggcgctcccgctcacaagcagctgtgtgttgggcgctctacagtgatgctcgctgtgcggctctgtgtgtgacacctggggtgccccacacatatggagaggccacagctgtgcgcaccacaggccaccacatgagagcctctcacccgagagagaacatgtgtgtgtgtgtgagtgtggcccgacagaacacacacagagagngggtgtgcgcacacactctcacccaccgctgtgtggtcgcgctgctcggcaccgaggaggtgtgtgcgtacacaagacacacgcacgtcgcacgcaccctcgggtgtgtgtgtgcgcggacacgcgtgagagtgtgtggccggtgtgtggagacgtataccaggacacacacacggtggtgagacacacacagagttgtgtggtgtcctaccgtggccgcccaccagcgggcgccgtgccacagccgcgtgctggtgcacacaggtctccgacacccagggggcgggcttggggcaccaggccccccaccccctagagtgggcgcgcccacaccgtgccccccgattggaaaggggggcccggagagagaggaagaaaataaaaaataagaaaataagtaggtgaaatgaaagcagcgaggatgtgaaatcgcaggcgtctgatgatanatgtaggtaggtctccctccatcgttcccccgc

SEQ ID NO: 534260 - DNA, 1456 bp, Homo sapiens
ggtctcagcaggtcaatctgggccagtcttgtgcaaaaccgcaaccacaactcagcacaacttggaatcgttttttttaaaaatgcctctgcagcaaccccatcatcaagtccacaaaagtctgtgtgttcagcagctataatgccattagttattacatagcagcagaattcttacatcaacatttcaattacatattagctaagtccaagcaatcatcagccatcattcagactgttattcagcacagggcatggggcttgcaaagggacagagagcacttggcacaacacacacttctagagacagcaatcaccacatggtcaccaaggcccattcagtgtcaaggcaccggcttaacccgagcctcagcaggcaccatcaactcatcacgtcacaatccatctttgcatagcattcatatctcttcatatcatgcgctcttagggtcaattataaatgtcacacaggtggacaattggggatcacaacagcatcatgtcagtaacgatcatatttcaaaacagttaataatcatatcaaaattgggatttcaaaaagtattttatcaaacaagctttagggttatttaaaaaggagggtacaaacatacgagttaatccttacacaaccataatacattccatggtatggaacattgccttttaagtgcgaaagtgcatagaataggcagtgtggtgtcatccatcaggtcattatataaaaaaccgtggttataaagtgttaataaaaggaactttggttttcaaacacactatgcgtggtactcaaggtggttaacaattctaaaggcttacaaaacggtggtgggatctaaatactaaaaagccggatttcaacactaacaggaccacacgcattgaacttgtgggacaaattctacattggacacccatatatccttgacagccaagaaatatgacccctcattcatctatcttccacacacattacacatagcacatcgtgattgcgaccagagagctacaacacgaaatggatggaatggaagaggcaaaggctatacaccatggaaaacaggtggtgccacacacaatattaggggcagggcaacatcactacaagaccacagaccactgtgcagggagacgacaaactaatgggaaactgccaggaaaaacaaaggaacagcgggaccacaagtaaagacgggtagaccacgatcaggactcacaaatacacacacataaccagacaatcccacacggaagacaacactgacaatcacaaaacacgggagaacagacgaaagaagaaagcaaacaaagagtagcggagcaagtagcagaaaacaacatacgggaggagcaccgaacgaacgacgacagaacagaaaaaagatagacaaacacaagacagggaacaacgtactagatgatatcaacacgacaaccaaacgaccaaacgcagatag

SEQ ID NO: 534261 - DNA, 430 bp, Homo sapiens
tgtagggaaggctgcccagattcctatctctcagcatataaatagacagtcttcccatcacatcatttattgaatatcaggagccttaatccccgatgactggtttaccgtcagcttatgttcgaaaatcatgatcgtcatcgctgtctcgctgatataccggggctgactatactaggtccattgatctatgtgcctgtatgagtaccagtactatgctgttttgggcactgtagacttgcaggaattattttctacccttgcttgaattttacaaaatagctctcaagggagctgatccataaagatttgcatctataaatctatagagttggagcagaataatcatttgataaacatgaaagatgtccccatttttagttactctaacgttcaagtaatcttaaagctaagaacagagtataaattg

SEQ ID NO: 534262 - DNA, 155 bp, Homo sapiens
acgctagaggatccccccattttgaagactgatacgttggagtttatcctagaggataaaggaaatctttgggatagtcagtattttatatacgcacaaatatgaacctcaaactgagtcctctaaaggccccatactatgaagtagacattggt

SEQ ID NO: 534263 - DNA, 146 bp, Homo sapiens
gacgcctctcgtttcaacggcaagacctcggtgcagatcaatgcgatgtcgtaccgcctgggcaccgtcgaaaatgccatgaagctgctgcgcgcgcaaactcagtggatccaggacaaaggggccgtgctgtcggtattttgcag

SEQ ID NO: 534264 - DNA, 174 bp, Homo sapiens
cagcggctgcttcacgtctcacgggtgcaggaccacgctccgtgcttgggctctaagctctgtgtctagtgtagaacctggggaaggagcctcttaggaactgctgcagtaacttcttactgctctcacaattctaaggaagcgggagaacggcctcctaccaacagtggccac

SEQ ID NO: 534265 - DNA, 389 bp, Homo sapiens
tcgtgtcatcccccttcgtacaccattgttttactcactaaacttcagccttactgcaccttttttctttctcaatatgctaagccagtttcctttgagaggcctttgcagtgcatgtacacttttccctggaatactatttcttcagtttttcatgtggatgccctttcttctccttcaggcctctgtctaaatgccttttgttcagagaggcctttcctgatcaaccaatttaaattggtcttctccagtggtttatgatcggatcaccctttcttaataactctcactattatctaaaatcatgttacttatgtatttctttctttacttgttttgtgtttacttctctcaatgagaaggcaatctccacgaagggggatggacca

SEQ ID NO: 534266 - DNA, 250 bp, Homo sapiens
gaattgggatgaggaacgtgatttccagtggccttcccaaattccccattctcactggggactgtgaatttgctgagagaactctctagggagccctgcagaaaatctcaaatgcatagcaactcacaactccagagccacctcctgttggatcttttattttgccactgacttcttcaacctttccttacctgtatcacacacttattagttattgccctctgctttgcaagtattacttatacagttt

SEQ ID NO: 534267 - DNA, 794 bp, Homo sapiens
  misc_feature (54)..(54): n is a, c, g, or t
  misc_feature (89)..(89): n is a, c, g, or t
  misc_feature (109)..(109): n is a, c, g, or t
  misc_feature (114)..(114): n is a, c, g, or t
  misc_feature (139)..(140): n is a, c, g, or t
  misc_feature (153)..(153): n is a, c, g, or t
  misc_feature (179)..(179): n is a, c, g, or t
  misc_feature (296)..(296): n is a, c, g, or t
  misc_feature (416)..(416): n is a, c, g, or t
  misc_feature (490)..(490): n is a, c, g, or t
  misc_feature (504)..(504): n is a, c, g, or t
  misc_feature (510)..(510): n is a, c, g, or t
  misc_feature (594)..(594): n is a, c, g, or t
  misc_feature (785)..(785): n is a, c, g, or t
tgttccagcccggacaggcagatttcacttccagaagagcacattccagaaaancagccagctggggtagaggcccagggacagctgtnggaagagcagggcgccgtangtttngtgctccagcacaccctgggctagnnctgccaggtagtnctgccagccctcggccagtgacagtngcgcctcctgcagctcccgccacaggaacaggctgccaaggagcgtggctgccgggctggtcagcaccagcagggcagcatagagggtccggggcccatgaggcttggcaagcgcanagtgggcaccatggtggtggccagcaggaagcccagtgagaagttggtgagggcgatgcagcccagctgcagtgctaggtagatcagggctaccagcttcagtgccatccagcccctgtntggggcctgtgtgcttaccacccggtgggtattgtggggcagggccaggccagctgcataaatcgccagctgtnttagcaccacagcntcagcntctgccactgggaagtgctgggtggcaacgtgttggcccagcactggcaggacatagagggcacagttccatggcctgtgagancagcagaggtgccacgagcgaggccagccccacaccctgtgatgggggaaggggtacactggggccaggggcaccccgggctcctcaaggcccattccagcctcatgcagctgcatccacagttccagagccttgagaccaaggaccaggagcaagaagccgacagcgggcatgtagaggccgatggagangaagcggga

SEQ ID NO: 534268 - DNA, 805 bp, Homo sapiens
gggggtttatgatatcgtcgacccaggcgtcgccacagatgctgggggctgtgcaccttgatttgcgctcatgagtcagcacctgcatcctgcccaacatcgaggcggtgagcaacggtgcacaatctcaactcggtcaaggagtccccccatgagcgcatgcaccggcacatcgagctggcctgggccttcatccacgcgtcatcggcacgcgtgctcattccgtagctgaggtgggtgctgcttacgtgcatgggtcaagattcgttgccccatcaagaagcagcacaggccagaccaaggcgccaccagacaaagccccacacgacagatggcggcaagcagccaacggtccagcgagccaggagggcaattccacccacacggggacccaggggcaagacctgccacacaatcagacacgtcagaaagcagccgagtcaatgggctggccgcgttcgcgcccctgcaatcatctaaatcagcacctccggaagatcgcagctagacgataccccgccaaacacgtggggtagagaccaagtacagcactggaccggaacagggcacccagggaaggccgtcaacaagacggcatcgggcccggaaggttcttggcccggcctctcaccaggggacgccgacgcactcgcgacccaaccacggacggggggaaccaacacacccgcgagaaacagcacccagagccagcacacactatactggccataagagaccccccactggcagcgcacgcagggagcacccaatagccacgcatgaccgcacgagcccctaccacgcc

SEQ ID NO: 534269 - DNA, 909 bp, Homo sapiens
  misc_feature (5)..(5): n is a, c, g, or t
  misc_feature (71)..(71): n is a, c, g, or t
  misc_feature (75)..(75): n is a, c, g, or t
  misc_feature (82)..(82): n is a, c, g, or t
  misc_feature (89)..(89): n is a, c, g, or t
  misc_feature (95)..(95): n is a, c, g, or t
  misc_feature (123)..(123): n is a, c, g, or t
  misc_feature (137)..(137): n is a, c, g, or t
  misc_feature (143)..(143): n is a, c, g, or t
  misc_feature (145)..(146): n is a, c, g, or t
  misc_feature (155)..(155): n is a, c, g, or t
  misc_feature (167)..(167): n is a, c, g, or t
  misc_feature (170)..(170): n is a, c, g, or t
  misc_feature (174)..(174): n is a, c, g, or t
  misc_feature (202)..(202): n is a, c, g, or t
  misc_feature (213)..(213): n is a, c, g, or t
  misc_feature (219)..(219): n is a, c, g, or t
  misc_feature (233)..(233): n is a, c, g, or t
  misc_feature (242)..(242): n is a, c, g, or t
  misc_feature (255)..(255): n is a, c, g, or t
  misc_feature (261)..(261): n is a, c, g, or t
  misc_feature (266)..(266): n is a, c, g, or t
  misc_feature (286)..(286): n is a, c, g, or t
  misc_feature (332)..(333): n is a, c, g, or t
  misc_feature (337)..(337): n is a, c, g, or t
  misc_feature (424)..(424): n is a, c, g, or t
  misc_feature (453)..(453): n is a, c, g, or t
  misc_feature (458)..(458): n is a, c, g, or t
  misc_feature (480)..(480): n is a, c, g, or t
  misc_feature (492)..(492): n is a, c, g, or t
  misc_feature (506)..(506): n is a, c, g, or t
  misc_feature (794)..(794): n is a, c, g, or t
  misc_feature (830)..(830): n is a, c, g, or t
  misc_feature (840)..(840): n is a, c, g, or t
  misc_feature (880)..(880): n is a, c, g, or t
actgnagcttttcaaaacgttcacacatttcaatgtatcgtcgacgcttttctaaatagacttacaggganggtngcacacnccaaagncccgcngccctcgtagcaccgcagtccaggctangatgctgggcggangggggngnntgggggggntctatttacgantgnctgngctttcactcccactaactgtgcgcgtnttgttttcgtnccttanacgcttttccttcncgtctgganccgcgtccggagncgccgnctcgnccttaaaggcaaggattccntgtttgcgaccacgcagacaaacgtcaaaccccccccccacccccnncccnaggcgccgggcccagaagcccccggccatccagccccgactctttcatgcctctgcccctgatgaggggacccagggtaccctcaangggacacagaagcggaggctgcatcctantccantgtcaaagtcaggggcggcgcngcacgagcctgnacaggaccacctancccagccaggcgacaggcagggtgagaccacctggaacaaaggcacagaggctggagagaaggcggcatgttcccagactgcatgggctcggggtagggggatgcgaggtcagaactggcatagtggccaggatctcgggctctactccatgggcaggggggaagcccctggggctgcatggggccatgggggaggcgggcgcaggagacaccggctgctgtgccaaaggccccagtccagctgctcctctgccagcagaaggcagaggacaaggggctggccactangcccaccaccacccccacccccacccccaccctggnccccaaaatntggcgctcctgacatcatgaggaacaggacgacgggaatnatgtacatccagtatttggcgaagaagga

SEQ ID NO: 534270 - DNA, 704 bp, Homo sapiens
gggaccgtccgagaggtcagagtatcctctggcctggagtcagctcgccggtacttccggccaggctgcctaattctgaggaccgggtagtcgccagtccccggtctcgtcccttcctgtcccaccatacggcacctcagccgacagaagctctactcttcctattcaggttacctgtgtgcttggtctgttgacttacgccatctcagacacttccgtagactgtttagtcccctgtcaatatcgttaccactggtcccagtttgtgccccagaagggatgtatattctgggggctcccaggaagggtaagctgatcagacctgtggagccagccctactgtgtgaagcctggggcctgactgctcagaacttgctgctgtcttgttgcggatggatggaaggttggatgggatgggtggatggaccgtggatggccgtggatgcgcagtgccttgcatacccaaaccaggtgggagcgttttagttgagcatgacagcctgcagcaggaatatatgtgtgcctatttgtgtggacaaaaatatttacacttagggctttggagctattcaagaggaaatgtcacagaagcagctaaaccaaggactgagcaccctctggattctgaatctcaagatgggggcagggctgggcttgaaggcctgctgatcatgtgtcccgccttgttcaataaagccgagccc

SEQ ID NO: 534271 - DNA, 854 bp, Homo sapiens
  misc_feature (106)..(106): n is a, c, g, or t
  misc_feature (286)..(286): n is a, c, g, or t
  misc_feature (420)..(420): n is a, c, g, or t
  misc_feature (617)..(617): n is a, c, g, or t
  misc_feature (619)..(619): n is a, c, g, or t
  misc_feature (632)..(632): n is a, c, g, or t
  misc_feature (651)..(651): n is a, c, g, or t
  misc_feature (693)..(693): n is a, c, g, or t
  misc_feature (695)..(695): n is a, c, g, or t
  misc_feature (700)..(700): n is a, c, g, or t
  misc_feature (712)..(712): n is a, c, g, or t
ttccgcttttggggcctttgctaagaccattggaaaagcgtagtattagggtgggaattacccaattttccaggtgccgtctgtcacccctttctttgactagganagggaattccctgacccgttgtgcttcccgggtgaggcaatgcctcgccctgcttcagctcaagcttggtgcgctgcacccactgtcttgcacccactttccaacactccctagtgagatgaacccggtacctcagttggaaatgcagaaatcacacgtcttctgcgtcgctcacgctgngagctgtagactggagctgttcctattcggccatctggctccacctgtcgagatattttacattaactttctatgacatacttatagcaaaacttatttttgtcatgcagaatagtctatattctatatttatngtaaagcatataccgtacatggtgactagtcaccatgctgtacaataaattttctgaacttagtcaactgtatttacgtattattttacagagatctctccaaatgcctcttttttctgaataaacaagcatccagtaaccagcatttgccgtctggcttatttcacttggcataatgtactctaaatttatccatntngtttcaaatgacnagatttttctcttttattnccaagtagtatttcattgtgtgtaaacacatttttaaaaatntnatatntagtcatctatnggttgaaaaactcatgtaatgaaaatacatttgtgttaaagcatgtattaatgtaattcagcatgtaagattttattaatcatagctaatttgtgccaaacactaaaactctatgtgtgttaataaatttaattctcacagt

SEQ ID NO: 534272 - DNA, 971 bp, Homo sapiens
tactcaagcttactccacgtctgttcatagcttgacagctcatttcttcttagcactgaataatattccatcatctggatgtaccacagtttatccattcacctactgaaggacatcttggttgcctccaagtttgacaattatgaataaagctctgtaaacatctgtgtgtagctttttacgtggacatacgttttcatctcatttggataagtaccaaggagtgtgattgctggtaaatgtcgttttgtaagaaaccaccatactgtcttccatagtgacactaccatttcacattcccatcagcaatgaatcagagttcctgtggctccacatccttgctagcatttggtggtatcagtgttatggattttgccattctaatagtatgttgtggtattccattattttaacttgcatttcttggatgacacgtgatgtggaacatctttttatatgcttattggtcatctatatcttattcggtgaggtgtcaagatcttggctcatttttgatctggttattcattttcttattgttgaacttcaagtaattctttgcatattttggataaacagtccctttaatcaggtaatgttttctgtcatcctgtgggcttgtcttctcattctcttggacaggcgccttttcatggcagccagaagtttcttattctcaactgagcgtccaggcttaattcaggttcttttcttctatggatccatgcccttgggaggtcgctattcttaaccaaaggtccatggatatggcacaggggaatcctctctaagacttgctacccatctttaatctgggagggaaattatggtgagcttggcacattttacacaacggccaatatgcaatctctgctgacgggagcgtaacggcctaaaatcagtacttttttacacagcatctctatcttaagcacacatttgggtcacccgaaacactcgacgtggcaaca

SEQ ID NO: 534273 - DNA, 351 bp, Homo sapiens
cccagaggtgcgactctcttttcggtgggaggcagcccgatgcaggcatttaaaagttcgaggcaagccagcagaagggagacttgctgtctcccaatagttcctatggaaggctagtagttgagtatcattcttgggacatgtccatccatcagccaatcagtgttgctggcagagcagaactcactgattggtcagacttgggttatggctccaccctctggagctgagagatgcatcagcctcctgtgaaccattaggactgagagtggagaatgggcgtttccccaaaagaaaaatcaggctagtgtcatcagagaaaggggagcatggatgttgggcagacaaaaa

SEQ ID NO: 534274 - DNA, 821 bp, Homo sapiens
gacgcaactcttactcgcgggccgattgtggtttatccgtcactcgccgaggttgccttgggtcatggtgccagcctgacctgagaagaggactgctccctgagggagaacgagagtgagtgagaccaaactctctcctactgtatcacagtgactagcggcggcctgtgttccgtcacagagggtaagagtagagcgaaagaccgatacttgtctgacaattacgtgatcgcgcccagaccattgaactgtgcgactgcagtgacatagtgtgtgttgatcacggagctggtatgtatgactacttggtacaaccatgtagtctaatgctgatgagaaggatctgctagacatatggtattcggagagcgcccctttgtacctactgctctggattgcatgacgtgccgtaaagagcacgtggatgtccggaaggacacagccatggttggttaagcgcaatgtactagttggatccttatgacccgtgtggttggccaacggtatggtctctcgcggacggctttcgggctgaggtgctggatttcagggctttgggcatcggactccgggagcttcttgggggaatttctataggccgagggtttgcccactgcgggtgtctgctgggcatgcaaagtgatgaagcttccttgggttggctcgccctgggattggtgcgcatggccattcgggttttcttatccccctaggggaggtggctttcgtgatcgtgtgccggggaaccacggttggggcggggttcggatccgcccgggggtacttggcggaagtggctctgagcgttggggtgcgctttc

SEQ ID NO: 534275 - DNA, 704 bp, Homo sapiens
gaggacacgattcttcaatcgagagcgtccagcgattgtggaagaggaggaaactaaaacatataaagacctgggtgtgaaagatgtgtgtgtagaagctagtgagcagtgggatggacaaaacccaccaagatacagatgaagctattccttggccttacaaggtcgtgatatcatgggcttgcaagaaactggctcaggaaagacaggacgcctatgcttgaccatactaaacagcactgatgggagaaccccgcagcgctaagtaagcccgtaagtatctatcaccaccgaactcgggaagactggacccacacagaacacttcaacagccagaacagaagaccccaaggggagtccctcatcaaaacaggcaggacgccggcagatgcacggaagcacacgcgtaagagaagcgacaatcagactaccaaatagacacatcacaaccataaaaagagacccactcagccaacaaacaaaacccaacactaattaaataaaataaacacgacacatccacctagagaacagacactcgaataccgcgaccaacaactagagaacaacacaaaaccgaacacaaagcggagaaaacaacaccactaagaacgacagccccgctcccaaacaaccaaacgacacgcgcaacaaaccgcgacaaagacacaagccgagacacagaaaataaacaaggacactac

SEQ ID NO: 534276 - DNA, 1188 bp, Homo sapiens
  misc_feature (419)..(421): n is a, c, g, or t
  misc_feature (423)..(425): n is a, c, g, or t
  misc_feature (448)..(448): n is a, c, g, or t
  misc_feature (725)..(725): n is a, c, g, or t
  misc_feature (767)..(767): n is a, c, g, or t
  misc_feature (826)..(826): n is a, c, g, or t
  misc_feature (830)..(830): n is a, c, g, or t
  misc_feature (901)..(901): n is a, c, g, or t
  misc_feature (997)..(997): n is a, c, g, or t
  misc_feature (1099)..(1099): n is a, c, g, or t
ctatgacgggtttttggacccggattttgtcctcgtgtgtcctatattcctgtatagcctcgcaatcacgcggggcacacataatgggcccccttttgtgaatattaattgtattctgaacagactttccgttattacgccatccaaaagtcctgtagccgtccttactttaagaaagtctgggttcttggatctataatccgcactggaagtgcttgaatgcatcatagccgttgcagactccttactagatgaattcaaccacacatctcagaacacgtagtatgcaaagggaaagcttaacactcgggggcctaggtactctaacatacttgtatctcatggtcatcctaaacatagccacacaagctagacataattatcccatttttccaggagaaactgaagttcagagcatnnngnnncttcctcaaatttatacacctcnataagtggtagagccagaatttggacccctgtctgtttcaaaacctttgtcccagaacaccagtggtcttcaattccagataaaattgcttgcagagaccacacctatggaatcaggatctccaggaatcaggggtttttgtttgttttgtggttgttgttgttgttgttgttgttgtttgagacagagtctcactctctcacccaggctggagtgcagtggctattcacaggcataatctgagctcactgcagcctcaaactcctgggctcaagcnatccccctgcctcagcctcctgagtagctggggctgtttcanaattttaacattggtgctgtaacatacgcactgtttattgattagttgtgactgtgagnaaanttgtagagtctctaaaaaacttaactttaggagcataagtgcattcaaaactaaatccctattgactagcncagcgttaaaaaaaatagtcgtggcactttgggaggctgaggcaggcagatcatttgaggtcaggagttcaagaccagactggccaacatggtganaccatctctactaaaaaaaaaaaaaaaaaaaaattagtggagtatggtggcgggtgcctgtaatccctgctacttgggagactgacatggagaattgcttgngccctggaggcagtggttgtagtgagctgagatcacaccactgtactccagcctgggcgacagagagactccgtctcaaaaaaaaaaaa

SEQ ID NO: 534277 - DNA, 856 bp, Homo sapiens
  misc_feature (419)..(421): n is a, c, g, or t
  misc_feature (423)..(425): n is a, c, g, or t
  misc_feature (448)..(448): n is a, c, g, or t
ctatgacgggtttttggacccggattttgtcctcgtgtgtcctatattcctgtatagcctcgcaatcacgcggggcacacataatgggcccccttttgtgaatattaattgtattctgaacagactttccgttattacgccatccaaaagtcctgtagccgtccttactttaagaaagtctgggttcttggatctataatccgcactggaagtgcttgaatgcatcatagccgttgcagactccttactagatgaattcaaccacacatctcagaacacgtagtatgcaaagggaaagcttaacactcgggggcctaggtactctaacatacttgtatctcatggtcatcctaaacatagccacacaagctagacataattatcccatttttccaggagaaactgaagttcagagcatnnngnnncttcctcaaatttatacacctcnataagtggtagagccagaatttggacccctgtctgtttcaaaacctttgtcccagaacaccagtggtcttcaattccagataaaattgcttgcagagaccacacctatggaatcaggatctccaggaatcaggggtttttgtttgttttgtggttgttgttgttgttgttgttgttgtttgagacagagtctcactctctcacccaggctggagtgtagcagtgtgatcttcactcaccgcaacctctatctcccaggctcaagcgattctcgtgcttcagcctccccagtagctgggattacagacatgtgccatcacgcctggctaatttttgtatttttagtagagacaggatttcactgtgttccagactggtctcgaactcctggccttaagtgatctgccca

SEQ ID NO: 534278 - DNA, 336 bp, Homo sapiens
  misc_feature (80)..(80): n is a, c, g, or t
taccagagtttcccttttcgatggaatatgaccaacgtcatcattggtgcctgttcgcttttgtcgcccttttctacctnatcaaccggatgcttttttgggaggtcgataaccgaagggatgtgcggctcttccatcaactcgggtggaagcggaagcacatcatcggatggttcaggcaagaaatggcggttctcctcctgctttcggcgtcgatttccctgccgggggcatgggctttgcaaaaatggggaagattcggggccgatttttacctttggtttttgatcgttcttcttgccgccgcgttcatcctgctcataagcttccggtcag

SEQ ID NO: 534279 - DNA, 518 bp, Homo sapiens
tggtccgatcgtgaaataggtaggtgtctgtctggaggacctctaggagcaggtcgtaattataatgggtatagaaacacgggtatgactaatagggagttgaggagatgcagcacactacaagggatgtgccacttcttttttttgagatggagtttcattctggttgcctaggctggagtgcaaactccgtctcaaaaaaaaaaaaagagagagagagaaaacctagctgtctgccaggtacggtgtctcatgcctgtaatcccagcactttgggaggccgaggcaggtgaatcacctgaggtcaggagttcgagaccagcctggccgacatggtgaaacctcgtctctactaaaaaaacaaaaaaattagccgagcgttgtggcgcgtgcccgcaatcccagctactcaggaggctgagacaggagaatcacttgaacctgggaggcagaggttgcagtgagctgaggttgtgccattgcacttcagcctgggtgacagagtgagactccatgtc

SEQ ID NO: 534280 - DNA, 2490 bp, Homo sapiens
cggaggctgccacagaagagcggggtccgcgggcgcgcctgtcctcagccacggccaacgccttgtacagcagcaaccttcgggatgacacgaaggccattctggagcagatcagtgcccacggccagaagcaccgtgcggtccctgccccgagccccggcccgacccacaacagccccgagctaggccgtccaccggctgctggcgtcctggccccagatatgtccgacaaggacaagtgttcagccatcttccgctcggacagcttggggacccagggccggctgagccgcacgctgccagccagcgcggaggagcgcgatcggctgctgcgccgcatggagagcatgcgcaaggagaagcgcgtgtacagccgcttcgaggtcttctgcaagacagaggaggccagcagccctggggcaggggaaggccccgcggaggagggcaccagggacagcaaggtgggcaagttcgtgcccaagatcctgggcacgttcaaaagcaagaagtgagtcttctggcctggcaacccaggccagggtgcccgcatcgctgccccggtcatccagaagccccgcggaacagagagccctgctcatgtgcttgagcagcggctgtcaggccacggccgcttggggcttggctgagtgcgccagacctcggctccactggaggctcacctggcagctgccgtctctgccccctggcctccccaacgctggggctgcacccctcgccaccagtgcctttctcccctcagcaccttcatctctgcaccgtcagccttgcgtggcgcagcgtctggctccgccatctctttgtgcctcagtcccccccgccccctttatttttttgagatctagggctggagtgcagttgagcggtctgggctcactgcaacctctgcctcccgggttccagcgattctcctgcctcagcctcctgagtagctgggattacagatgtatgctaccacgcccaggtagtttttgtatttttagtagagacagggtttcactatgttggccaggctggtctccaactcctggcctcaaatgatcagcccgcttcagcctcccaaagtggggggattacaggcgtgagccttgcaccccgctaagtcccctatcctcttgcaagggtctcacctctgtgcctcaattcctcattctctgggcccttctcctcctcagggcctcctgttctcagggcctcccccctccccgctccctccctctctcaaggtctcctccttccctcccccccccgtctcccccctcccccgcctgggcttcacttcctttcctacttggattctcctgctcgctgcctcccagcatcttttttggaggcccgtctcttgctgtggggaagactgggctggctgcgggcagtttgcaaggggtgggtggggcgggggggggagctggaccagaagatgccccttggagtggcaaggaagctggacagggcaggcctctggggacgggacacagggaagcccgaaggggcgccttggccaggtctgccatctcctccagcgaggctctggccagcactgggtgagagtggggagggggcactggcctttgcagcacagtaaaacatggtccagacaacctgtggccccggcctcatgagcaccccctgcacaggcccagcccaagccaggcgctagaagggctggttgtggagtgcttatccttgacaggtatggggccaggtgagggcaggggacaaggtgcagctgaggccgagcccaactaggtcctgggcacccctgcaggtgggagtggtccttgtcctcctggtatccagcagacacccccctctccccaccagccccattctcaggtcctttcctctttgtcaccaacaccaagaatctgtccagggttcttggcttatcttttatctcttttcactcctagagaggaattgcaattgactcagaatgacacattttggcaccacgtgtgtagaaagcccccactgttagatgatagcctcgtgaaattcatgtttctgtattctcctatttcttttcaaaaactaattttttttttagtgtaataaatcctaagagggaactgatttaagaaacaaggccgccaaacaaaggcagcagttccgactccagcagctgggaaaggaaggaaagtgaccccactttcactcctgcacagcccactggttaccaaaaccaccgtgcaagtcgggatgacagcagggacttctggccaggtgggaaaggtgcctggaagcgggatgcgcctgtgcgtctcttggccatgatgttcttgtgggcatgttattcttggtgctgcctggggtgttgctgagcggacaggctctccagctggagtccatggagaggccagaggctggcggccctgcctgggccttcggagcctcctgcctgcaccctccacctcttctaaaccatgatgtggcacattttggtgttaataaaacacaacacacaaagta

SEQ ID NO: 534281 - DNA, 160 bp, Homo sapiens
atcgtccagctgataggaacacgcaagcaagctgcaaatacttgcttaccgacttgagctaaatggtgatgggcgaccgcttgacttgggaagcgactcctcgatctattcttgaaggaattgcaacggccattatgaatagcgactgcctagtctttga

SEQ ID NO: 534282 - DNA, 349 bp, Homo sapiens
tcaagaagaaacaggcaggaagatcaacactgttggcactggtgattgaggagaaggaaggggtccttcaaaaaaaagagggtggaagggttggattctgacttgatataaaaatgaaaaacccaaacaccttttttttttttggaaacagttttcccctcttattgcccaggctagagtgcaagggcgtgactccgtggctcactgcaacctctgcctcccgggtttcaagggatcccccttatctcagcttcgtgagttagctgggactacaggttcccgccaccacgcccggcataattttggtatttgtagtagagatgggtttcaccatgttggccaagctgtc

SEQ ID NO: 534283 - DNA, 3278 bp, Homo sapiens
cggaggctgccacagaagagcggggtccgcgggcgcgcctgtcctcagccacggccaacgccttgtacagcagcaaccttcgggatgacacgaaggccattctggagcagatcagtgcccacggccagaagcaccgtgcggtccctgccccgagccccggcccgacccacaacagccccgagctaggccgtccaccggctgctggcgtcctggccccagatatgtccgacaaggacaagtgttcagccatcttccgctcggacagcttggggacccagggccggctgagccgcacgctgccagccagcgcggaggagcgcgatcggctgctgcgccgcatggagagcatgcgcaaggagaagcgcgtgtacagccgcttcgaggtcttctgcaagacagaggaggccagcagccctggggcaggggaaggccccgcggaggagggcaccagggacagcaaggtgggcaagttcgtgcccaagatcctgggcacgttcaaaagcaagaagtgagtcttctggcctggcaacccaggccagggtgcccgcatcgctgccccggtcatccagaagccccgcggaacagagagccctgctcatgtgcttgagcagcggctgtcaggccacggccgcttggggcttggctgagtgcgccagacctcggctccactggaggctcacctggcagctgccgtctctgccccctggcctccccaacgctggggctgcacccctcgccaccagtgcctttctcccctcagcaccttcatctctgcaccgtcagccttgcgtggcgcagcgtctggctccgccatctctttgtgcctcagtcccccccgccccctttatttttttgagatctagggctggagtgcagttgagcggtctgggctcactgcaacctctgcctcccgggttccagcgattctcctgcctcagcctcctgagtagctgggattacagatgtatgctaccacgcccaggtagtttttgtatttttagtagagacagggtttcactatgttggccaggctggtctccaactcctggcctcaaatgatcagcccgcttcagcctcccaaagtggggggattacaggcgtgagccttgcaccccgctaagtcccctatcctcttgcaagggtctcacctctgtgcctcaattcctcattctctgggcccttctcctcctcagggcctcctgttctcagggcctcccccctccccgctccctccctctctcaaggtctcctccttccctcccccccccgtctcccccctcccccgcctgggcttcacttcctttcctacttggattctcctgctcgctgcctcccagcatcttttttggaggcccgtctcttgctgtggggaagactgggctggctgcgggcagtttgcaaggggtgggtggggcgggggggggagctggaccagaagatgccccttggagtggcaaggaagctggacagggcaggcctctggggacgggacacagggaagcccgaaggggcgccttggccaggtctgccatctcctccagcgaggctctggccagcactgggtgagagtggggagggggcactggcctttgcagcacagtaaaacatggtccagacaacctgtggccccggcctcatgagcaccccctgcacaggcccagcccaagccaggcgctagaagggctggttgtggagtgcttatccttgacaggtatggggccaggtgagggcaggggacaaggtgcagctgaggccgagcccaactaggtcctgggcacccctgcaggtgggagtggtccttgtcctcctggtatccagcagacacccccctctccccaccagccccattctcaggtcctttcctctttgtcaccaacaccaagaatctgtccagggttcttggcttatcttttatctcttttcactcctagagaggaattgcaattgactcagaatgacacattttggcaccacgtgtgtagaaagcccccactgttagatgatagcctcgtgaaattcatgtttctgtattctcctatttcttttcaaaaactaattttttttttagtgtaataaatcctaagagggaactgatttaagaaacaaggccgccaaacaaaggcagcagttccgactccagcagctgggaaaggaaggaaagtgaccccactttcactcctgcacagcccactggttaccaaaaccaccgtgcaagtcgggatgacagcagggacttctggccaggtgggaaaggtgcctggaagcgggatgcgcctgtgcgtctcttggccatgatgttcttgtgggcatgttattcttggtgctgcctggggtgttgctgagcggacaggctctccagctggagtccatggagaggccagaggctggcggccctgcctgggccttcggagcctcctgcctgcaccctccacctcttctaaaccatgatgtggcacattttggtgttaataaaacacaacacacaaagtaaaaaaaaaaaaaaaaaaaaaacctcggagtttttttttttttttttttttttttgggggagaaatgtgggaaagggggaaaacaagagagggggggccgggggaaagagtgtgtgggtttagtgtggtgtggagggtgtgcaaaaaagaaaaattttatgaaaagagaaaaggagtgggaaaatgtgcgaaaggtggggatttgtgtgtactttataaaagggggtatggcgagcccgcggaaaaaagaaccccttgggggacacgaggggagaacaaaggggatgtaaacccggggtggaaaaggccaacaaaagggcggcaaaaggggcgagggggagggaacacccccgtggcacagagagcaaggggagaacacaatagaaccggcgagacaggtaacgctgggtaaaacacaacgaaggaggggaaacacaagggcgtcgggaccactatttgtcggcgcaaatctctggtacgcgtgtgtggcccttcccacacaagcggcggaagaggggggcacagaagacactacctcgcacacgaattaaaaactgcgacgggtactacaagacgccacagagggggggatataaaaaccaacagcggtgtccgcggcgggcgacgcacaacacaagaagggcaaaaagtcgaggatagacaggggaaaaagtgcacgcgggaaaccacatgagagcccccagaaaacaacaaagttacagggtcgagccaaccaacgagggggggagccccctacccccggggggcggaccgccgatcgagtaaacg

SEQ ID NO: 534284 - DNA, 2123 bp, Homo sapiens
cggaggctgccacagaagagcggggtccgcgggcgcgcctgtcctcagccacggccaacgccttgtacagcagcaaccttcgggatgacacgaaggccattctggagcagatcagtgcccacggccagaagcaccgtgcggtccctgccccgagccccggcccgacccacaacagccccgagctaggccgtccaccggctgctggcgtcctggccccagatatgtccgacaaggacaagtgttcagccatcttccgctcggacagcttggggacccagggccggctgagccgcacgctgccagccagcgcggaggagcgcgatcggctgctgcgccgcatggagagcatgcgcaaggagaagcgcgtgtacagccgcttcgaggtcttctgcaagacagaggaggccagcagccctggggcaggggaaggccccgcggaggagggcaccagggacagcaaggtgggcaagttcgtgcccaagatcctgggcacgttcaaaagcaagaagtgagtcttctggcctggcaacccaggccagggtgcccgcatcgctgccccggtcatccagaagccccgcggaacagagagccctgctcatgtgcttgagcagcggctgtcaggccacggccgcttggggcttggctgagtgcgccagacctcggctccactggaggctcacctggcagctgccgtctctgccccctggcctccccaacgctggggctgcacccctcgccaccagtgcctttctcccctcagcaccttcatctctgcaccgtcagccttgcgtggcgcagcgtctggctccgccatctctttgtgcctcagtcccccccgccccctttatttttttgagatctagggctggagtgcagttgagcggtctgggctcactgcaacctctgcctcccgggttccagcgattctcctgcctcagcctcctgagtagctgggattacagatgtatgctaccacgcccaggtagtttttgtatttttagtagagacagggtttcactatgttggccaggctggtctccaactcctggcctcaaatgatcagcccgcttcagcctcccaaagtggggggattacaggcgtgagccttgcaccccgctaagtcccctatcctcttgcaagggtctcacctctgtgcctcaattcctcattctctgggcccttctcctcctcagggcctcctgttctcagggggcactggcctttgcagcacagtaaaacatggtccagacaacctgtggccccggcctcatgagcaccccctgcacaggcccagcccaagccaggcgctagaagggctggttgtggagtgcttatccttgacaggtatggggccaggtgagggcaggggacaaggtgcagctgaggccgagcccaactaggtcctgggcacccctgcaggtgggagtggtccttgtcctcctggtatccagcagacacccccctctccccaccagccccattctcaggtcctttcctctttgtcaccaacaccaagaatctgtccagggttcttggcttatcttttatctcttttcactcctagagaggaattgcaattgactcagaatgacacattttggcaccacgtgtgtagaaagcccccactgttagatgatagcctcgtgaaattcatgtttctgtattctcctatttcttttcaaaaactaattttttttttagtgtaataaatcctaagagggaactgatttaagaaacaaggccgccaaacaaaggcagcagttccgactccagcagctgggaaaggaaggaaagtgaccccactttcactcctgcacagcccactggttaccaaaaccaccgtgcaagtcgggatgacagcagggacttctggccaggtgggaaaggtgcctggaagcgggatgcgcctgtgcgtctcttggccatgatgttcttgtgggcatgttattcttggtgctgcctggggtgttgctgagcggacaggctctccagctggagtccatggagaggccagaggctggcggccctgcctgggccttcggagcctcctgcctgcaccctccacctcttctaaaccatgatgtggcacattttggtgttaataaaacacaacacacaaagta

SEQ ID NO: 534285 - DNA, 98 bp, Homo sapiens
aacttttatctaagctgcgctaaatgttttcttcaagggaaccagatttagttctttacagattttccagtgaaataaaacatgttgtaatagctgga

SEQ ID NO: 534286 - DNA, 114 bp, Homo sapiens
  misc_feature (38)..(38): n is a, c, g, or t
ccggtaccgtctgagcagctgggaaaaatatgataccnctgtccttgatactttttacaaaacttaaaaactatttttatttatgtatttatgagacagagtcttgctctgttg

SEQ ID NO: 534287 - DNA, 169 bp, Homo sapiens
tggtcggtccaaataggtctctaccgtcacggaggacgaggagtagtaagagctcacaggcctttccagagactgaaccattcaccctcttctttggtccgaagttacgtaaacattagtgttacagtttttccagacattttagtaagggttcttatataagcgtctc

SEQ ID NO: 534288 - DNA, 680 bp, Homo sapiens
ttttaggtttgagggggaatgctggaaattgtaatggggtatggagacatatcatataagtaatgctagggtgagtggtaggaagttttttcataggaggtgtatgagtgggtcgtagcggaatcgggggtatgctgttcgaattcataaaaacagggaggttagaagtagggtctgggtgacaaaatatgttgtgtagagttcaggggagagtgcgtcatatgtggtccctaggaagatggtagtggtgagggtgtttattataataatgttggggtatccggctatgaagaatagggcgaaggggccgtggcgggcgtatccgagtgttgaagccgtgtagaactagttcggaccccccttcggcaaggctcgaagggggtccggtgggctctcgtgctaggtggggagataaatcatattagggccaagggctcatgagggcaggagtaatcagaggggtcctgggtgtggggaaaaggggggagaggttaaaggagccccttattagcacgggtgacacgtcagaactgagggcagggggactcccacatgaaaaaggtggcgcgcacctggtccccagtgggcccaaaaggggtacttgagttgggggccccccggtcgagggactgggaacacggcaggccaaggggcggcgaaaaaaaggggcacagggaggg

SEQ ID NO: 534289 - DNA, 204 bp, Homo sapiens
gagatctttgagcatcactgctccattgatttaggtctcgggggaatactcaatgatgagcagatgggcctgcccgtctacgtttgcaactggcagtccaggagcactgggtttctgataccaggatctcctttgggcgcttgaggttggggagaaacattaggattaacaccagaggagctacatgggacttaacacaggaac

SEQ ID NO: 534290 - DNA, 2522 bp, Homo sapiens
cggaggctgccacagaagagcggggtccgcgggcgcgcctgtcctcagccacggccaacgccttgtacagcagcaaccttcgggatgacacgaaggccattctggagcagatcagtgcccacggccagaagcaccgtgcggtccctgccccgagccccggcccgacccacaacagccccgagctaggccgtccaccggctgctggcgtcctggccccagatatgtccgacaaggacaagtgttcagccatcttccgctcggacagcttggggacccagggccggctgagccgcacgctgccagccagcgcggaggagcgcgatcggctgctgcgccgcatggagagcatgcgcaaggagaagcgcgtgtacagccgcttcgaggtcttctgcaagacagaggaggccagcagccctggggcaggggaaggccccgcggaggagggcaccagggacagcaaggtgggcaagttcgtgcccaagatcctgggcacgttcaaaagcaagaagtgagtcttctggcctggcaacccaggccagggtgcccgcatcgctgccccggtcatccagaagccccgcggaacagagagccctgctcatgtgcttgagcagcggctgtcaggccacggccgcttggggcttggctgagtgcgccagacctcggctccactggaggctcacctggcagctgccgtctctgccccctggcctccccaacgctggggctgcacccctcgccaccagtgcctttctcccctcagcaccttcatctctgcaccgtcagccttgcgtggcgcagcgtctggctccgccatctctttgtgcctcagtcccccccgccccctttatttttttgagatctagggctggagtgcagttgagcggtctgggctcactgcaacctctgcctcccgggttccagcgattctcctgcctcagcctcctgagtagctgggattacagatgtatgctaccacgcccaggtagtttttgtatttttagtagagacagggtttcactatgttggccaggctggtctccaactcctggcctcaaatgatcagcccgcttcagcctcccaaagtggggggattacaggcgtgagccttgcaccccgctaagtcccctatcctcttgcaagggtctcacctctgtgcctcaattcctcattctctgggcccttctcctcctcagggcctcctgttctcagggcctcccccctccccgctccctccctctctcaaggtctcctccttccctcccccccccgtctcccccctcccccgcctgggcttcacttcctttcctacttggattctcctgctcgctgcctcccagcatcttttttggaggcccgtctcttgctgtggggaagactgggctggctgcgggcagtttgcaaggggtgggtggggcgggggggggagctggaccagaagatgccccttggagtggcaaggaagctggacagggcaggcctctggggacgggacacagggaagcccgaaggggcgccttggccaggtctgccatctcctccagcgaggctctggccagcactgggtgagagtggggagggggcactggcctttgcagcacagtaaaacatggtccagacaacctgtggccccggcctcatgagcaccccctgcacaggcccagcccaagccaggcgctagaagggctggttgtggagtgcttatccttgacaggtatggggccaggtgagggcaggggacaaggtgcagctgaggccgagcccaactaggtcctgggcacccctgcaggtgggagtggtccttgtcctcctggtatccagcagacacccccctctccccaccagccccattctcaggtcctttcctctttgtcaccaacaccaagaatctgtccagggttcttggcttatcttttatctcttttcactcctagagaggaattgcaattgactcagaatgacacattttggcaccacgtgtgtagaaagcccccactgttagatgatagcctcgtgaaattcatgtttctgtattctcctatttcttttcaaaaactaattttttttttagtgtaataaatcctaagagggaactgatttaagaaacaaggccgccaaacaaaggcagcagttccgactccagcagctgggaaaggaaggaaagtgaccccactttcactcctgcacagcccactggttaccaaaaccaccgtgcaagtcgggatgacagcagggacttctggccaggtgggaaaggtgcctggaagcgggatgcgcctgtgcgtctcttggccatgatgttcttgtgggcatgttattcttggtgctgcctggggtgttgctgagcggacaggctctccagctggagtccatggagaggccagaggctggcggccctgcctgggccttcggagcctcctgcctgcaccctccacctcttcacggtcttaacttccctcatttcccttaagcagacaaaagtccaggtctcgggtccacagcttcagacatgacagggaagaggc

SEQ ID NO: 534291 - DNA, 148 bp, Homo sapiens
  misc_feature (127)..(127): n is a, c, g, or t
tgtgcttgggacggcgctgtgcttgggacggcgcacaagtgtctttcagccattcccggaagaggtcttcatctttctttagcaccagaaactggcaagggacaacataggccttgtcaaaaacccnctttcctccatgcttcttgcc

SEQ ID NO: 534292 - DNA, 101 bp, Homo sapiens
  misc_feature (26)..(26): n is a, c, g, or t
atcgcccccctctctgaataaggcancatgacatttgcttcatccaacatctatgtactgagctctcccactgttgacccgttattgaactaggtctgccc

SEQ ID NO: 534293 - DNA, 611 bp, Homo sapiens
tatttcttgttccaaaaagttccttttcggcgccttcctgttaatacccttgaaaaccactcttctgtttctgaagtgttgagttggcccacatagttggtggggataacctttctttttttgtaaaaagggacttgcttcccaccattctccatgctcctccaggactttcatcttctctcctttcttgaaagacaagtcgtccgggtggatcccatcataggggtacaaggctaccacaatgtctccttgttcctttggatctttagtttgaaccctctgtccaggtaaaagctgagattctggaactggcctttgctgtttattggacgttggatctctcacataaatagttctttcagtattacgtactggttgagtcttcaaatctactccatcgtcactcaagctgtctttcccttttgattttatacatcccatatttccgctcgcggtgaaagtttcggggcggcggagctccacggtgacttgagttcagagtgggggcgcgacggggcggcccagcaggacctgcgtatggggaggctgctgaccgggaagcctggaccgcggcgaggggcttggcgcggggccgggggtggcgcggccgc

SEQ ID NO: 534294 - DNA, 2168 bp, Homo sapiens
cggaggctgccacagaagagcggggtccgcgggcgcgcctgtcctcagccacggccaacgccttgtacagcagcaaccttcgggatgacacgaaggccattctggagcagatcagtgcccacggccagaagcaccgtgcggtccctgccccgagccccggcccgacccacaacagccccgagctaggccgtccaccggctgctggcgtcctggccccagatatgtccgacaaggacaagtgttcagccatcttccgctcggacagcttggggacccagggccggctgagccgcacgctgccagccagcgcggaggagcgcgatcggctgctgcgccgcatggagagcatgcgcaaggagaagcgcgtgtacagccgcttcgaggtcttctgcaagacagaggaggccagcagccctggggcaggggaaggccccgcggaggagggcaccagggacagcaaggtgggcaagttcgtgcccaagatcctgggcacgttcaaaagcaagaagtgagtcttctggcctggcaacccaggccagggtgcccgcatcgctgccccggtcatccagaagccccgcggaacagagagccctgctcatgtgcttgagcagcggctgtcaggccacggccgcttggggcttggctgagtgcgccagacctcggctccactggaggctcacctggcagctgccgtctctgccccctggcctccccaacgctggggctgcacccctcgccaccagtgcctttctcccctcagcaccttcatctctgcaccgtcagccttgcgtggcgcagcgtctggctccgccatctctttgtgcctcagtcccccccgccccctttatttttttgagatctagggctggagtgcagttgagcggtctgggctcactgcaacctctgcctcccgggttccagcgattctcctgcctcagcctcctgagtagctgggattacagatgtatgctaccacgcccaggtagtttttgtatttttagtagagacagggtttcactatgttggccaggctggtctccaactcctggcctcaaatgatcagcccgcttcagcctcccaaagtggggggattacaggcgtgagccttgcaccccgctaagtcccctatcctcttgcaagggtctcacctctgtgcctcaattcctcattctctgggcccttctcctcctcagggcctcctgttctcagggcctcccccctccccgctccctccctctctcaaggtctcctccttccctcccccccccgtctcccccctcccccgcctgggcttcacttcctttcctacttggattctcctgctcgctgcctcccagcatcttttttggaggcccgtctcttgctgtggggaagactgggctggctgcgggcagtttgcaaggggtgggtggggcgggggggggagctggaccagaagatgccccttggagtggcaaggaagctggacagggcaggcctctggggacgggacacagggaagcccgaaggggcgccttggccaggtctgccatctcctccagcgaggctctggccagcactgggtgagagtggggagggggcactggcctttgcagcacagtaaaacatggtccagacaacctgtggccccggcctcatgagcaccccctgcacaggcccagcccaagccaggcgctagaagggctggttgtggagtgcttatccttgacaggtatggggccaggtgagggcaggggacaaggtgcagctgaggccgagcccaactaggtcctgggcacccctgcaggtgggagtggtccttgtcctcctggtatccagcagctgggaaaggaaggaaagtgaccccactttcactcctgcacagcccactggttaccaaaaccaccgtgcaagtcgggatgacagcagggacttctggccaggtgggaaaggtgcctggaagcgggatgcgcctgtgcgtctcttggccatgatgttcttgtgggcatgttattcttggtgctgcctggggtgttgctgagcggacaggctctccagctggagtccatggagaggccagaggctggcggccctgcctgggccttcggagcctcctgcctgcaccctccacctcttctaaaccatgatgtggcacattttggtgttaataaaacacaacacacaaagta

SEQ ID NO: 534295 - DNA, 165 bp, Homo sapiens
  misc_feature (125)..(125): n is a, c, g, or t
ggaagaaccatttgcgtttgtggggagtccttgcggttgtgattaaggcttttcatgtgaaagcccaagaagatgaaaggattgttgcttgttgacaacaaatgtaagtgttcccccattacttncaagggtcatcctttcttcccaagatcctaatgagagaca

SEQ ID NO: 534296 - DNA, 782 bp, Homo sapiens
gctcagaatgacacatttgggcaccacgtgtgtagaaagcccccactgttagatgatagcctcatgagcaccccctgcacaggcccagcccaagccaggcgctagaagggctggttgtggagtgcttatccttgacaggtatggggccaggtgagggcaggggacaaggtgcagctgaggccgagcccaactaggtcctgggcacccctgcaggtgggagtggtccttgtcctcctggtatccagcagacacccccctctccccaccagccccattctcaggtcctttcctctttgtcaccaacaccaagaatctgtccagggttcttggcttatcttttatctcttttcactcctagagaggaattgcaattgactcagaatgacacattttggcaccaccgccaaacaaaggcagcagttccgactccagcagctgggaaaggaaggaaagtgaccccactttcactcctgcacagcccactggttaccaaaaccaccgtgcaagtcgggatgacagcagggacttctggccaggtgggaaaggtgcctggaagcgggatgcgcctgtgcgtctcttggccatgatgttcttgtgggcatgttattcttggtgctgcctggggtgttgctgagcggacaggctctccagctggagtccatggagaggccagaggctggcggccctgcctgggccttcggagcctcctgcctgcaccctccacctcttctaaaccatgatgtggcacattttggtgttaataaaacacaacacacaaagta

SEQ ID NO: 534297 - DNA, 317 bp, Homo sapiens
cggaggcgttgaatggccatcggaggcgttgaatggccatcggaggcgttgaatggccatcggaggcgttgaatggccatcggaggcgttgaatggccatcggaggcgttgaatggccatgatgttcttgtgggcatgttattcttggtgctgcctggggtgttgctgagcggacaggctctccagctggagtccatggagaggccagaggctggcggccctgcctgggccttcggagcctcctgcctgcaccctccacctcttctaaaccatgatgtggcacattttggtgttaataaaacacaacacacaaagta

SEQ ID NO: 534298 - DNA, 131 bp, Homo sapiens
aatgactggtgtgccttctgtggcctggacacaaccagcacagagctgtcagtggtgaagagtgtatacaaggatacagagcaaaaatacataatcatggtacataaatattacatgtcacaaaaacacag

SEQ ID NO: 534299 - DNA, 164 bp, Homo sapiens
  misc_feature (6)..(6): n is a, c, g, or t
gagtantgctgaactggacaggagctgagggaagaaatcggaaaggcgggacaaggagattgagctggtcattcaccggctggaggcgacatgggctgccaaggaggagagtgagacaggctgccgacgagccgcatacaagcgctatacggcgacaagtacga

SEQ ID NO: 534300 - DNA, 277 bp, Homo sapiens
caagcatgtaatcccagcacatccagctaattaatagtattttaaatgaggacggagtctcgcatctgttgaccaggctggagtgcaatggcacgatcccggctcactgcaaactccgcttcccgggttcaagcgattcgcctgccttgctgggatgacagacgtgcaccacaatgtccggccaattttgtatttttagtagagacatggcctcaccatactggccaggccggtctcgaacttccgacctcaggcgatcccaccccgtcaggtggag

SEQ ID NO: 534301 - DNA, 668 bp, Homo sapiens
gttcaacagtttgctgacagatgggaacaatcttttttttttttccaatctgccatctatacaattttctaacagatgtcaaaagcagtctagttgatataagcattctgttaccggtgatattgtttcagagctgaagctgctccatgcctagtcttaattaccatattgcagggttacggaactggtagggctgtgttgtgtcagcttctgaattgggcaacttggaggcggtacgtggctcgtgcctggtgtgtagtcagaagggataggggatcttgcctccttttctcttcaggcggttgcaaactcacccgtgttggaaacaccgagtggacaggaaggagtggtacacagctgcttaccctgatttattcaggggtttggtgttcattctggagccatactatcaatggggcgacagacggttccgttccacccccgtgaagtattcatgcaccgtgtgaatagtatcaagcaggatggcttccatggtatggagcatgaccagcgtgtgactcattctgacatttcagatcctaagaattctaagaacactactagaagcatttgttccctcctagtcaagcttcatacttttctgggatcttttagcccttgacattctggtcccccaaacctgtagtaggtgaattcctaggataagg

SEQ ID NO: 534302 - DNA, 222 bp, Homo sapiens
  misc_feature (154)..(154): n is a, c, g, or t
tttactaaggtatatttgttatagcagtacaacctagcctattatattaagaagtaatagcaactttacaatggagaaacctgaaagctactaaccttaaccaaggttaacatcaccagtaatatgacacatcgacatcaagtatctcctgatnaaatgcaccgagacgggcatatcattgccgtggttttcttgccaaaaatgcataacctcaatctgatc

SEQ ID NO: 534303 - DNA, 391 bp, Homo sapiens
  misc_feature (23)..(23): n is a, c, g, or t
  misc_feature (39)..(39): n is a, c, g, or t
  misc_feature (78)..(78): n is a, c, g, or t
  misc_feature (106)..(106): n is a, c, g, or t
  misc_feature (390)..(391): n is a, c, g, or t
tgcagtggtgcaaatctcagctnactgtaacctctggcntccctgggctaaagccatcctcccaacctcaggctcccnaagtagctgggactacaggcacacaccnacccacgtctagctaatttttgtatttttatagagatgaggtttcacccatgttgccccaggatacttttgaacccctgggctcaagcgatgagcccacctcagccttccaaagtgctgggattaaaggcatgggccaccatgcccagccagatttttttctaatataaaaataaagatgggatctcattacgttgtccaggctagtctcgaactcccggcctcaagcaatccttccccctcagcctcccaaagtgctaggattacagatgtgagtcatctaann

SEQ ID NO: 534304 - DNA, 394 bp, Homo sapiens
tgaggaactcaaatctgcatcaaggaaacaccctggacccagaatctgagccccctgatccccctgacccctctgatccttaaacacccctcggaccccatgggcactttcacgccatgtagtaggaaccccaaacatcacccgtggggtgtccctcccacatcacatttgggacccccatggtggcactctgtattccaactgtgtccccaggtgccttccagtgacagcgagggactgacctacttggagctgcaagctgtgaccgccagcacacagccccccagcccccccgccgccccacagccctctgttatctacaccgaggtggccgttcgggggcgccactgatgcctccatacgtgtgcaaaaacacatgtgtgttgtatgcaca

SEQ ID NO: 534305 - DNA, 262 bp, Homo sapiens
tatcatcacctgtgatggttgttggctatttacccactcacctattgattcccctatagctgtatattgatggtcctttggctatcgcagatacgttgctaggaaccttcatgtatacaagtctgtgtgggcttgtaacactgggtcagtttcttggagtggaagttctggttaatatgttaagtctacatttaacttttaaacaaatctcacaaactgttttccatagttgttgtaacattttatattcctatcatcctcc

SEQ ID NO: 534306 - DNA, 130 bp, Homo sapiens
catataaaagacttgctaatatttactgtcgtctttactatagtctcttcatagtcagaaacaaatattgggtattttatgaggcttagccttgaggagagttctgcagatacaacctgaccggtgggga

SEQ ID NO: 534307 - DNA, 149 bp, Homo sapiens
gctagccgagcatcgcctggtgaagagtctgatgaacaaacacacagctgtacacacatggcttcccgatgggatggtggctgcaggcagcttatcatacacaactggcatgtaatccggcacgatgtaattcggcttctcctagatcc

SEQ ID NO: 534308 - DNA, 350 bp, Homo sapiens
tagagagaacagaacagcgatcactaaaccgttcctgccgaccaccctctgctagacacagccaaggccaacgaggcaagcagaagcagcggctgaggaagtggcgtcatgtgttggaggcaaatgtggcaaaccaacccaggcccacccagagcgagcaaacgctgagacctgcaaggacctggatgagaagaggagcccgcttcctgtacatatatttaagtgacaaacacggtcaaaagcttcagggacaggttccatggttgcttgtgtaaataaagcatgtacttcgtatgtcacagtttggggcaacggcagtcttttagtgctggtcacatgggtcccggtct

SEQ ID NO: 534309 - DNA, 247 bp, Homo sapiens
accctctagaatttctactccatgtgcttctgtatgaaactttttgtctttttacctttattgaaacaacaaaaagtaagtattgacacatctcttcctgttttctgtctagtcaacatgatgctcactgtgcccatgatgttttgatatatatacattcagcaaaaagttttattcttttattcaacattctcattaacgattattatatgctctgccgtctggccatgctctgcaggacatgtat

SEQ ID NO: 534310 - DNA, 854 bp, Homo sapiens
gggcgcagcctggctggggcccggtcgagcccgcgccatggcgtgcctgaggcgacagctgtggtgccggaagcggggctgttggcggctgcctggccaaagactggcttgcagcagtctaagtgcccggacactaccccaaaactggctggcgctgcctctgtctgctgtctgctgtgactgcctgagtgctgcctgatgcctaccagatgggtggcctggggatgtactttgtggctggggccgtggctgccgagtgcatgccctgaggcagcttgatgtgttggtttacccctggtgaggcggatgggcctcatgcaacctgcctcttcctgcgtgctcgcctccctggaccaccttgcccaggcgttggcgagggacgcccccggtgacgcgttgcttcttgcgtgcttgtactgtgacgccagtcttgccacggtgggctgttgcgacctccccttgcgtgcttagaacaaggcgtgcattgttcgcccatacctttgcctggatcgcggggtcgcttgtggtggccccaatggccttgtacggaggttcctttcccacggcaggtgtcccctgcgcttggaacagcagtgtacaattctcacagaaggtcctggggccacgtttgagatacagcttcagctgcacgacttttccgacggaaagcccaaatggttggttcggctccacggcaaggcccatttatggcccacacgacacgaatttgcgtgcgccaacatttttccattgggcacattgggaaggacttgcccttttttcaacccaaagggggaagcccgccagcgttggccttgctatttgggggaacccacttgtgagcacgggttacc

SEQ ID NO: 534311 - DNA, 918 bp, Homo sapiens
tcacctctgtatgaataagccagtcatgtgtttctgcctgatgcctaggagtgtcagtacttggatgtgcagcactaatgtggaaatgcgcataccaacctagatatatgcgatacgaaacgtgaacgatcagatccaaagtgtcaattgtttgccctcgatctacttccagagatcgatcactgcacttgcctgcatagtatccgaaaggttgacgtcaattaccgttgcgggaagaaacatccagggacaatatgaaccatcatagtaggggggtacggcaagtatactcatatctaggaaagccaaatcgtcgtaatattgtagtaaacaaaaacatctagagtacgcagatctgttgtgactccttttgtaaaaagacctagatgccttacctttacagttggggtcgaggaatagatcgtgataagtaaatcgtgtttaacactaaaaggcatatagtcttgggattggaattagaagttgcaataggggagcctcatgtatatgacattgtagattagcaaaacagcgttgttatttcagtgttagtgcaacaccacattcgtaaattggtaggtgactatcaaagagagattggtaaggcaatccgtaataggcaggagtagggtagttaaactctgatttattgaactgttggctgcccaacgagacatgatcgtcacattccacatggtgcaacgatacgtcctggtgatgcaatcagggacagttaggcaaattctaacatacatatgaacaaggcaaacagtccacgtcgaacttctgcgtaaatggttgaaacattccaccttgttgccaccccataacaacaagcccatgccgcatcagccatcaggaagcgtacaagaagtggcaacacttgcaacattggcgaggaaggccataatattccgc

SEQ ID NO: 534312 - DNA, 120 bp, Homo sapiens
aggatccctccaaagcgtagtaccagctcagtgtgggaccgggcacggtggctaatgcctgtaattccaggactttgggagaccgaggtgggtggatcacttgggtactacgctttggca

SEQ ID NO: 534313 - DNA, 309 bp, Homo sapiens
cccccccccccccatatatatacccccccatagggatacccccccatacataataaataaaaaaacctgaggccagatttttttcataaaaaatccgcccccccgaaaaaaggggttcctctgaggtgttttaaaaaattagggcaatgtattaaaatcaagggttaggaaatttcatggttttacccccaaaaacttttattttggaattgaactattattaaattggatttaatcctggattacagtttaattaattatttttaggggttaagggttcaaaaaggaatttttcccccctttttttta

SEQ ID NO: 534314 - DNA, 241 bp, Homo sapiens
aaaggattgaagctacagtgagctacgatcgtaccattccactccagcctgggtgacaaagtggagaccctgtctcaataaaaaataaaaactacaattaaggaccaaaaaataggctgggcacagtggctcatgccttgtaatcccaacactttaggggacttaggtgggtggatcacttgaagtcaggagttcaagaccagccttgccaacatggtgagcaccatttcttcttaaatac

SEQ ID NO: 534315 - DNA, 301 bp, Homo sapiens
  misc_feature (76)..(76): n is a, c, g, or t
  misc_feature (138)..(138): n is a, c, g, or t
  misc_feature (262)..(262): n is a, c, g, or t
atcgcttgagcccaggagttcgagaccagcctgggcaatgtgacaaaacccaatctctacaaaaaatacaaaaganttagtcaggtatggtggcgcatgactgcagtctcagctacttggtaggctgaggtaaaaggntcacctgagcccgggaagtagaggcacagtgagccatcattgtgtgccactggactccagcatagggaaggggactgagaccgtctcaaaaaaattaaatagaaagtcttctttttttaaaatnctgcaattcatgagaaaactgcactcacacatagtgtgt

SEQ ID NO: 534316 - DNA, 1095 bp, Homo sapiens
acagtggagccttctcaccattattatgcctctttcgtaatcgagtgcgctgtacttagatatgtatcatctgtgtggtctccatatttttatctccaatggctcattcccgttttaacactttctatcacatgtttctagcaaatcgggtgacacaaattgtgaaacagcgtgtgaatttcccctggtacaatgggtgtcccttgttaccttccgctttcctggtcctctagccatcttccaggtcccccatggataacctgtggatggctctcacggagtggctgccattcgtcatgtatggctgctagttatctagctaggcaactgttcattttgtcatttacgaaataatcccctaggattgtctgctctcagcgctgcttcccctggaacaagtttgcgtgtccagcacattcagacctgtccaaaacgctcttagcctccctgataagttgtctgtctccttgacggagcttcacagagatataattgaaccacaagtagagcgaatctcataccactagaggtgaactttctccacgcaccctagggtgacacgaaactagcctttgtgcaccaggtacttaggtacttggagcgagtggacgagcacgcatcgaccgataaagtatgcctcggcgtcccgtctaaaggtgttctgcaagatccattggaaagcttcctgggaaacgtatgctagcagagcttcgtccccgtgaatcatatggtcaaagatcccactcttagatggtaaatgaatttgaatcgacatagtagccccataagcatcagacctgtagagtgaggagccatctctagacgggccccttcattcctctaccatgctgcaatcactgtcctgggcttaatggtgctatggattaggaggtcctttgagaaagagcaagatggagcaatggagagaagacctcttcctgaatcactggactccagaaatgtgcatgcagatccagtctagttgcctgtcaagatccagataaactttcctgtcactgtgcttagaactttattattaattaataattgttaaacttctgtgctggttcataccgatctggaaattttggagct

SEQ ID NO: 534317 - DNA, 401 bp, Homo sapiens
  misc_feature (52)..(52): n is a, c, g, or t
  misc_feature (171)..(171): n is a, c, g, or t
  misc_feature (264)..(264): n is a, c, g, or t
gcgccgagcatctctgctctgtcttttgccaatttctccttggcccctccanttgttcgtggggatcgtgcagttctttccactcaaacttcttccactcactctaaaatgtgactctgagctgggtgcggtggctcatgcctctaatcccagcactttgggaggccaagntgggcagatcacttgaggtcaggagatcgagaccagcctggccagcatgacgaaaccccgtctctactaacaatacaaaaaattagccaggtntggtggcaggcacctgtagtaccagctactcagaaggctgatgcaggagaattgtttgaatccaggaggcggaggttgcagtagccaagatcacgcctctgcacttcatcctcggtgacagagtgggactccatcac

SEQ ID NO: 534318 - DNA, 842 bp, Homo sapiens
agagctggacccttcacacacgctgatatcgaaccgagcactgaatctctccagttcttgttagatacatgtaaagttctattcattgcgcagcgtgcgcggtcgtatacgatgtgagcctcctggaaagaatctggccgttgatctgggttctagacatgattcatagtatagtagataatggacactataccatgtttccaatctaaactaggcagtctatagatctagagcctaacagatattgcgaacgaccctacagggctagtacacgtatggctcgcaggacatttctacaagtgacatggagttccataattggcacagtcgtacttgcacagctatttcgagacacatgattcaaagacttttacagcggatcgagctttactgatgcgacaattttcagtaataacttggtatggtggatcatgggcatctatcatcgaccagataacagtgagataacataggcattgcatgaatagtctcattctagaacttatgacagatggcctgctcattatgactccaagactccattgtgctcccctttgagtagtactgggcgggaccagaacggctttgtacagggacattgcccggggtgatctctgacctggaatatgactgcgttgtactccgaatgcgacgctggaacctttattcgatcaccaggctataatgtttccacactgtgcactcattgcatcatatgcccacgtgctatcagaagcgactgtatcgacgtctgttcaggatgttgccagtggactaatcgagcagcctatgaggagaaccggggcttccattgcatggactatgatcgtgaacatatactg

SEQ ID NO: 534319 - DNA, 291 bp, Homo sapiens
  misc_feature (208)..(208): n is a, c, g, or t
  misc_feature (222)..(222): n is a, c, g, or t
  misc_feature (243)..(243): n is a, c, g, or t
  misc_feature (268)..(268): n is a, c, g, or t
ggtttcaggaattcatctgggtcatttaggggaaatttctgcagttccatggtgattttaatcactaaatatcaactaaaaatcaacatccctaaaaatgtggttacataataacagaactcacagaaagtgagaaagagtagcttaggtaggtcgtgacatgcagcaacaaggagtcaggcagtcctagagccaaatcacttaattntaatgagcttgagntgacctcatctataaagtggngaaaatcatgcctggttgataagantagtgataatgcagcaaagagct

SEQ ID NO: 534320 - DNA, 316 bp, Homo sapiens
actgtgaggacgatcatataagcaggacacattccatcattgcgtaaatctgtctagtgtaggcgccgcatccactgcggacatcatcattcatgcttacaacctcacactgtgctacgaacaaacagtaagagactgcatgctgtggacaaagataaggaatgacaactcacagactttgcctccatgggcttgaccacaaacttctcagcttgtaacaaccctgcctctgccacaggcaccagaaacactgcagagatgccgcacatttctcactcattccgagccagctatgtcatgaaggttttcttgcggc

SEQ ID NO: 534321 - DNA, 235 bp, Homo sapiens
aggagacacgagcatatgaagaagtacagaatatcaaactccaacaacatgccagcgattaaccaacaagagatagggagcatggctagaataagaggaaacagccgacaaccaacataagacaatatgctctagaggaggggcagatgccaacatggaagcagtcaaaggttccagaccttgtacatgaacagcaggctgtcgcatagtaacttgtggctgtgcattaagatgt

SEQ ID NO: 534322 - DNA, 393 bp, Homo sapiens
agagagcccataccctttgtgatagtatatccaaatatttgataaaacttgcaggcaaaccatgtgtcacagtgcttgtagcacacaagaaagcaggtataaaaggggagagtaaggctggtgcgtggtaggcttacatctgtaatcccaacattttgggaggctgatgtgggcagaccacctgaggttggacagttcgagaccagcctgactcacatggagaaacgccatccttactaaaaatacaaaattagctgggtgtggtggcgcatgcctgtgatcccagctacttgggaggttgagtcaggagaatcacttgaacccggaaggtagaggttgcagtgagccgacattgcacctttgcactccagcctgggtgacagagtgagactc

SEQ ID NO: 534323 - DNA, 194 bp, Homo sapiens
ctagttctagaagtttcaactagcatcctagttttagaagtttcaatagcaagcatccccgttccagtgagttcaccctcttaatcaccacgatcaaaagggacaagcatcaagcacgcagcactgcagctcaaaacgcttagcctagacacacccccaggcagcaatgtgctattgaaacttctaaaactagg

SEQ ID NO: 534324 - DNA, 363 bp, Homo sapiens
ccgaaggtaccccgtttcgtaagcgccaaagcgccgattacagtaccgccagccacggaatatcggcgtcaacagtaactggccatgagagccaacccacgcaaggagctgcgcaagtggacgatacatccggccaagaaccctcaaggagcgactttaccgatctcaacgccgacatgctgcacgccatcatggagctggtcagcgacgggatctgggactggaacgccaacaccggtttcgtctaccgcaaccccggctgatacgaaatgctcgggtacgcccatcactccctggaaaaacagtgtatacacctgggaaaacgtgattcatccggatgaatacccataaaaccacacaatt

SEQ ID NO: 534325 - DNA, 199 bp, Homo sapiens
cacaaaggtacagatggtcccagcatgtgtccagtgcttcagggagtgggacatcccagcaactaatcagacttccggccagtgtcctaacccccaggcacccggtcaaccatatttaaaaatgggaattggtataaagtggcttccaagttttataatgcatcattttacatctttggtaattaaaagcatcacaagg

SEQ ID NO: 534326 - DNA, 670 bp, Homo sapiens
gctctcagctctcggcgcacggtccaggtatatacttgtagcatagcaacttcggatttcactctaccctggagagtttccctgcttggttgaacacattggcctcaggaagcttccttcaaaatgtctactgttcacgacatcctgtgcaagctcagcttggacgggtgatcactactacacctcccaagtgcatatagggtctgtcaaagccctatactaactaaagatgctagagcgggatgcttcgaacactcgaaacagccatcaagaccaaaggtgtggctgaggtcaccattgtcaacattcttgaccaaccgcagcaatgcacagagacaggactattgccttcgcctaccagagaaggaccacacaggcacttgcatcagcactgcatcgtcagccttatctggccacctggagacggcgcatcccgggcctatcgaatgacacctgctcagcatgacgcttctgagctaaccgcttccatgaaggggctgggaaccggcgaggactctctccttgcgatcttctgctctcgctcccttcctggctcctctcgcttctttccgtgtccgccgcgccttgcttcccccccgccccgcccccggccttctccggcccctctgccctccgcacccctcgttgccgtcacgggcgcccccggctc

SEQ ID NO: 534327 - DNA, 360 bp, Homo sapiens
ggctgccaagaggtggaccggtggacggctgtacccagactatgatcaccagctggaatacagtgcgtcacatcgaggaaacgtggaccttacatccgtcagtaattgaatacagtgaaaatgatatccatcatctgagaaaacttggaagctttctttcaggctctgtcagggtgtaagtgaatctcattacaaaacgaggaagtgtgtacaggtatgaaataggacacactaaaaaaggcatggttctcacatgaggtgtgtgtgaagtcactggcgacctgtgtgtgtctgacagacaccaccacccgtcccctgatttcggcatctggcaaatcccaccctccctggaactggtag

SEQ ID NO: 534328 - DNA, 529 bp, Homo sapiens
atggctgtcccacttgaatagggtctgtagcccctttgttttggccaatttctaccatttggaatggactgtatttacccaatgcctgtacccctattgtatctaggaagtaactaacttgcttttcattttacaggctcataggcagaaggaacttgccctagtcttggatgagactttgaactgtggacttttgagttaacgctgaaatgagttgagactttcagggactgtagggaaggcatgattgattttgaaatgtgaagatatgagattacggaggggctaggggtggaaatgatatggtttggctgtgtccccacccaaatctcattctgaattcccacatgttgtgggagggacccagcaggaagtaattgaatcatgggggcagatctttcccatgctgtcctcatgaataagtctcacatgacctgatggttttaaaaatgggagtctccctgcacaagctgtcttctctatgtctgctcctatccagatgtgctttcacttcaacacaatcgtaagc

SEQ ID NO: 534329 - DNA, 522 bp, Homo sapiens
tctctcagagtatccccataaatcggaaatcgagttgtgagatgttgtagtgcccgcaccagtgagctacacaggctctcgtccaggaatctgaagccactttgcagtcgacatactcggataccagcgctcagcccacctgtgattctggatatggaacttggaactctgggacaaatagaggctacgagggctatggctatggctatggctatggccaggataacaccagcaagtatggaattaaccagcgcttagatatggtgccgcatttggagacagacatgatgcaaggaggcgtgtgcggctcaggtggagaaaggtatgactcttatgagtcctgcgactcgagggccgtcctgagtgagcgcgacctgtaccggtcaggctatgactacggcgagcttgaccttgagatggaaatgggctatgagggccaatacgatgcctaacgctgaccagttccgcatgcgtggcaccgaccccttcggtcccagggcacagggctgggcccggaatgcc

SEQ ID NO: 534330 - DNA, 2613 bp, Homo sapiens
taggagatggagtgtccctctgtcgcccaggctggagtgcagttgagcgatctcagctcactgcaagctctgcctcctgggttcaagtgattctcctccctcagcctcccgagtagctgggactacaggtgcatgccgccacgcccagctaatttttgtattttttagtagagtcagggtttcactgtgttgcccaggctggtctcgaactcccgagctcagacaatccgcccgccttggcctcccaaagtgctaggattacaggcgtgagccaccatgcccggctgagagtcctcatttctaataagttcccaggtgatagcaatgctcctggtctggggaccacattttgagtagcaatgagatacatctgtgctgtccaataggcagccactagccacatgaggcaatttaaattctcaattaattaaaatagaaaattcagctcttcagtcacacaagacacatttcaagtactccacaactaactgtggctagtggccaatatagaacacgtatagatgtttatagacacctatagacatttacagaatatagaacattttcattatcacagaaagttctgctggacaccaccacttttatcattccatcattaaagagtatgtaaatcttgtaagagggtcaagttcaaagcagggatatcagcgattgcctctcagccttataaggagtttacttgggactcttaggtgatggctgaggactgatctaaagtgattgattctggccaggcgtggtggctcatgcctgtaatcccagcactttggctgaggtgagggggatcacttgagctcaggagttcaaggccagcctgggcaacatggcaaaaccccatctctacaagaattataaaaattaaccaggcacgttggcacccacctctagccccagctactcaggaggctgaggtgggaggatcacttgagcttggggaagtccaggttgcagtgagctgtgattgtgccactgcattccagcccagacaatagagtgagaccctgtctcaatcaattaatcaatgttgattctaaacaccgtcatcagtttggatgaaggattcaaaggcatgtacagtaaataagcatataatacaaaatgagcagcaaaacaaatcagaaaccaataagaataaaacaaatgcaacaggtacaaatagcaagaattacgcttagagatggcaggggtgggggatgggtaaggcacatgaatatgggaaatgactaggaacatagcaggaaaagaccagtaataagggtccacgagttgtgaagaacaacaataaaaatgcttgttaaaagcatcataaatgcagtattagtcagaactgtatctggctctagcctccattttccacctcaaagggaattcacatgagagttgtaaaaatgactacttttttttttttttaagtatttggctgggtgtggtggctcgtgcctgtaatccctagactttgggaggccaaggcaggaggatcacctaaggccaagagtttgagaccagcttaggcaatacagcgagaccttatctctatttttaaaataatataaaaagcttaatattacagttgaaaacaattatgtggcactatggtttttgtttttgattttgagagagggtcttactctgtcggccaggctgcaggacagcggcataatcacggctcactgcagcctcaacctccccagactcaagctatcctcccacctcagcctcccaagtagctagaattacaggcatgagccaccacgcctggctagtttttgtattttttataaagatggggtttcgccatgttgcccaggctagtcttgaactcctgggctcaagcaatcctcccacctcggactcccaaagtgctgaggtcacaggtgtgagccatcatgcccagcatgtgacacatttttaacagcaattaatttctgtagagaacttgaatttgttccttctttccaaatcgtcatcaattcttatgacatttcccagaaacaaatagttaataagctcatgccctaacaaaggctggctgcactagcataccaaaaggtttctgtaccacaaaaagttttagctgatacaaaacttaacagcacattttttaaaagaaagaaaaagagtcacctggttatccactccctttcccagctcctaagatagaatcgtgccgaacgcaacactactccaccagtaagaagcaagttttgtttttttgtttttttttttgaggcggggttgccctcggtcgcccaggctgcagtgcagtggtgtgatctcagctcattgcagcatccgtctcccaggttcaagagattcttttgcctcacccttccaagtagctgggattacaggcgtgcaccatcacgcccagccaattttttgtattttcagtacagacaaggtttcaccatgctggccaggctgtctttacaaaatacaaaaattagctgggcgtggtggcacacccctgtaatcctagctacttgggaagctgaggcaggagaatcacttgaacccgggaggtggaggttgcagtgagctgagatcatgccactgcactacagcctggcaacaagagcaaaactccgtctc

SEQ ID NO: 534331 - DNA, 444 bp, Homo sapiens
gtacgcaccaccatgcttagcttaattttattttcttgtagagacaaggtctccctttggtctttaactactaagctcaagcgatcctcccacctccgcctcccaaagtactaggagtacaggcgtgagccaccgtacccagcccaatctttcacatgaattacatgctgaaagataatattttggatatactggaccaaagaaaacattaatgaagttgatctcatttttttttcttaatgtggatgctgaaaaatcttaacttatagttcgctttttccactgaacagtgctagtttaaagttggttagggccgggcgcagtggctcacacttgtaatcccagcactttgggaggccaaggtgggcggatcacctgaggtcaggagttcaagaccagcctggtcaacatgatgaaaccctgtctgtactaaacaaaaaaata

SEQ ID NO: 534332 - DNA, 197 bp, Homo sapiens
  misc_feature (98)..(98): n is a, c, g, or t
tgtagtgtggggcatcagtgccttcctgcagttgtcatctgccacacggaagggcacggcacggccaggggtctatgatcttctgcatgcccagttgnattggccccacgtagagtgggggtggcgtctcggtactggtcagcggacacggtttggtcctggctgggcaggtccagctcccgggaggaccttggggc

SEQ ID NO: 534333 - DNA, 182 bp, Homo sapiens
agtttcggcctgaccggcggtttccgtaattatggttatcactacgttgatgaaccgggtaaagacacggcgaatatgcagcgctggaaaatcgcgccagactgggatgtgaaactgactgacgatttacgtttcaacggttggttgtcgatgtataaatttgccaacgatctgaacactac

SEQ ID NO: 534334 - DNA, 666 bp, Homo sapiens
  misc_feature (28)..(28): n is a, c, g, or t
  misc_feature (113)..(113): n is a, c, g, or t
  misc_feature (129)..(129): n is a, c, g, or t
  misc_feature (140)..(141): n is a, c, g, or t
  misc_feature (148)..(148): n is a, c, g, or t
  misc_feature (194)..(195): n is a, c, g, or t
  misc_feature (197)..(197): n is a, c, g, or t
  misc_feature (253)..(253): n is a, c, g, or t
  misc_feature (284)..(284): n is a, c, g, or t
  misc_feature (301)..(301): n is a, c, g, or t
  misc_feature (314)..(314): n is a, c, g, or t
  misc_feature (346)..(346): n is a, c, g, or t
  misc_feature (414)..(414): n is a, c, g, or t
  misc_feature (454)..(454): n is a, c, g, or t
  misc_feature (461)..(461): n is a, c, g, or t
  misc_feature (620)..(620): n is a, c, g, or t
ccagactatagatgcttgatctcgcatntagcactcgatctttagattatattttttttgaagggatctcagctgtgccagctgagtcagtggtacatcatagtcactcagcntgacttctgggctcanccatcctcacnntaactcnccagtagtggactacacatatgaccactacaccggcttttcttttnntnttctttaatagaaataaaggtctcactatgttgcccaggctgtatgtacccttttntattagttcgttcccttcaaatacaccattntttgtaccagaactganaatcatccatcanaaccttccaaaaaggtttgatttcttcatccntgtactaatcaatccaaacataacatgctgttttatatacacacaatagccaggaagaagtatgcctntgtgttgaaaccaataagtgaaacaaaaaaataaaaatanaataaanaatatatgcatacatacatatacacatacatgtagagaaagggacttaactcactggctccagtaagcatctagaggtctgcctccataggctcagcagaggatccagctagagaaaacttattttattttttttgagacagagtttcgttctgtcacncaggctggagtgcagtggcgtgatctcagctcactgcaacctcgtg

SEQ ID NO: 534335 - DNA, 102 bp, Homo sapiens
ggtacgacttttttcaatctaattatatccctgaatatcatcatttatttttggtaaatgccagtgaggaatatacacgtcattcctgcagaaaagtctata

SEQ ID NO: 534336 - DNA, 870 bp, Homo sapiens
acagtcacgggccaccactaattttgtatttatagtagagacagggttgccaggctggtcttgaactcccaacctcaggtgatccgcacatctggcctcccaaagtactgggatgcaggcataagccacacacccagctcagattactgtttactcaaattaatggggatgatgaggatgaaacagtgcagggattccccatgtttgttttcttcttgcatttctagtgtctgttttttttggtggggggggggggggtatggtggtggttttttttttaaaaaaagatctgagaggtatggggtccttgggttaaccaaagtccagtagcatcctggatttcaaagtctggtggggcatggatgggcatctggacctcagtcataactatctttaatacttcattataaaatctacaatatgggtcacgtggaagatattatcatggtacctggggagatatgactaattaatgagtatggggaaaattttcctagaaaaatgagtggttgtcgaagggctgaaggattttggagacaagagtctatgagaaaggtcttgataaacccaagaggggttatgaaattgtgcatatgaaacataagtaggtataacatatttatttgcatcacaaggtgtcggaaatagagggttcatttaggaacgggattattgggacgtattaacgtaagaggtatcgtttaaatagaagcccgggttccattaggggtagacctttccattctaaagggaggggaaaaatctacattgtctcgtgcacaatttgtggggggcagaaacaaaagaagaaaaagtgggggcgcaaatataatatatgcggcgcggaagaggaatgtcgatagaggggtc

SEQ ID NO: 534337 - DNA, 666 bp, Homo sapiens
  misc_feature (373)..(373): n is a, c, g, or t
cggacggtggtttcccctaccaaaaagagtgccccccgtttggcgcctcctcccccccggaagatggattttatcgtgtagagaaccccgttgtctcgcacggattactatgggtcccaaaacccacgagcttcttcaaatccctaggaggcgttgatattagaagaggcctccgtggggaacaataataagaatctcaaaaataaaaggacattcagaggatgcaaagttggtagtagttaatatgtgtgaggaaataacacaagtgggtgggcaaatctctataggtaacatctccgcctgtgtgcttgtcttctttaagatggcgctatcttcttgttacacacaaaaggtgtctaagacatcgccccangtcttgccttcaacaactgaatcgtgaatcgccctgccgaggtagtcccgcgcggagttcggtgctgggagtacagcgccgcaccttcacacgcgccaattagcggccgttgttttagcggacgctctgtagactctagtacagtactgactcaggtgatgaggtgctgtctttactcacctgcaagagacgcactgacccgccgcgccagtcgatcgttcaatagaggcgaggaccgccgtcccgcccgacttccgttactacgcatacacgtgagtgaacgaagtacactc

SEQ ID NO: 534338 - DNA, 1427 bp, Homo sapiens
tctggaggtaggaacttttattatcacaagtccaaaaagtgtaaagttacttgcccatggccccacagcaagcaagttggcctgtgttccaggagtgttgactcttaggtttggctctgacgtgcaggagcccccacccttcacttttccaggtggtgtgtgtgagggggctcaggaacagaagggaggacatatgtgtaagcggagccccaggcacgtgtgtagggtctcctgtgggagaaaattaaggggcgcaggtgggtgccaggaagcttcaacagggtgttgttccctgtggcccgtgggtgccgtggtgaaaaggtagccgaaatgtattagaggtggcaggtgtgcaagtgcgcaagacgtgggcacagcccgtggaagagaggggtctcaggtgttgaaagggcgttctgtgaagcgaagggtctctcataccaaaggaaccgtgatcattaggagggcctatgttgaggtctcttacagcgtggccaaaccaagaaaaactcgtgtggccccccgagagaacagtgttggcccaccagggaggcacagaagatcacagtgtgtggttctccccaaagtcaccagtgggtctacaacgctgttgttagtctaacaccagtgtgtgcacccgtgtatacgctgtgactgtggcaaacaaacaactgtggttcaaggtgcgccttgccaagcgtgtgggacccgagtgggacacatgctcagaaagcccttgtgtggcataacacaaacagatgaacagcgtgatcttggaaagagatcctctcttgtgaaaaaccccatttctcatggatatgctcccttttcgcgcgggaattggcgggccctattcacgtggcaaacctgtgttgcagacaatgagaccgcccacaattaacacaacatgtgttgctctccaagttattcaatggtgggccaagaccgttggaattcattcacccgttttagaaagaccagttgggggacgattccacataatacacggtgaccacggcacaaagcaaaggtgaggcgcattgatgagagccctttggtggtgatcctccgaaggcaccttggggttgaaaaagatcctctctgtgaggagcgaaaaataccttgtctgtgtaggaacaactttgtgatacggaacttaacaggcgcagagattttttaccccagtatgtctaggagaacacccgataaacccggtccccgtagcccctggtcatgggttcaccttgcgggcccgtgtaaaagctaaacccagaggatcgtagcacgggcaacccgtgggtgtaaaccataaagaacttcagtgacaaagatgatcaagaatacaaaccccaggaggttgagacccaagataacagagaaagtagaaagctacaactatagataccaacttgtgacaagcacctaca

SEQ ID NO: 534339 - DNA, 125 bp, Homo sapiens
cacgaggccgacgacaaccacgcccatgatgcggtgctctatgttctcgggctgatcggcacccactttcgattcggcggtcgcaactcggtcagcggggtggactgcagtggcatgcgtgagct

SEQ ID NO: 534340 - DNA, 351 bp, Homo sapiens
cccttttctcccaagaccagcttggcccagggaggggggattctgctttactgattcgccctgccccagaggaggcctttttttttttattagcttttgtttaccccgtggaattgaccccttcctcccggggttttgggggggggagcccaggggccctgtggcccctccttttttcctcccatcccccgtttgggtttagctgccaaataagattccccttggccccctgtgtttttttgggggggcagggggctgtcccctcccctttgttttcctttccccttttcccccctggtttgcattttggtgggttttttttttttgccaaattaagtggtgggaacccca

SEQ ID NO: 534341 - DNA, 118 bp, Homo sapiens
taatataatataataacttaaaatacacatactacacttatacacacactctcacacgtcacttcttatagaactgttgctatgagggtaaacttaccattatgtttgatatgccact

SEQ ID NO: 534342 - DNA, 518 bp, Homo sapiens
  misc_feature (226)..(226): n is a, c, g, or t
ctggcacatagtaggcacaactgtgtgttgcatggctgtgttcatttctatcatggctcttatgacattgcaccttgtgtattgattgaatggtggcttccccctttagcctgctggtcctgcgagggcatggacagtgtcttagtcacctctggagccctggtgcccactgcaggcctggatggtggctgggactcagtacaagtttactggtgaataatcaaangaatcacaaagtgacattgatggcaaaaactggttacggacagagcccacctatgttcttgactcattttggccacatccaatgttctcttgctaaagaaacatggacattctcaaatctcttctgagagccatgcaaaagccacatggcatggcaggcttgagcttaatggcatttgtggtgtcttttcccatttattgtgtgtgggatgaatatttggatctcagtttacctatcctaaaggcctgtttggtaataaaaatgaaataaaagcctcacagagttaccaaaa

SEQ ID NO: 534343 - DNA, 295 bp, Homo sapiens
agagcctccttgaagggctaccagtggttgaaggacaagatcctcagtgaggagggccggcgccagcaagccaagttgaaggagttgcaggccatcgccgagcgcttgggttgcaccctgccccagctggccatagcctggtgcctgaggaatgagggagtcagctccgtgttcctgggggcctccaatgcggaccagttcatggagaacattggggcaatacaggtccttccgaaactgttgttttccattatccacgagattgatagtattttgggcaataaaccctccagca

SEQ ID NO: 534344 - DNA, 395 bp, Homo sapiens
ctcctagaggatccccgatggccgaattccgcttaatagctgcgtaccatatctaaatcaagagtattattttgtaaaaacatgtactgctgactaagaacatccggatcttgtacgagaatgttaggaaacaaagacagtcgattcatattcatatcaacttgactttgaaaaaaaaacaactggtctaaacttgatttatttaactcatctgtgataatatttgtgctgacgtggttggaacatgcgtataataataaaatcggaataagcataaacaaaattaataaagttgttttcgtaaaaatattaagtgttttccacaataaagatccccccaaaataacaattactcaaacttgcattctttgtgttaaaactaataataaaagaga

SEQ ID NO: 534345 - DNA, 354 bp, Homo sapiens
  misc_feature (72)..(72): n is a, c, g, or t
  misc_feature (96)..(96): n is a, c, g, or t
agactctagcaggatcccccctacatttgcaggatgattctaaactacaactggttggtttctcctacgacntttcactaagctgtttagaactanaagggaaaagccgctaagttctgatggaatcttttgaaagcctacgtctgcttaatccaaatgtttcactggatcatcttacaggttttgccttttctctttatcactattctattgctatgtttgctctttcttcttggaggttcttggtatctatcatacatccaacttttactcttccacagacaatactatctacttttaaaatgttcgatttcaggtactatactgtagtagaaaatgtctgctttatggtaa

SEQ ID NO: 534346 - DNA, 719 bp, Homo sapiens
agcggagaggtttcagcaacaccagtggcctacaaagaaggagccttcctcctctccccagactccagactctaaagggcgacctcctcctgctcctgctcctggagcgcagcatagcgcacagcgtttccgcaggaatcttgagaatggcaaggcccgcatacccgtcggtggttcccaggcccgcccccatctcgcagactgcagccacagctgccagtgcgtgccgcctccgagcgacttccgggagccgggcggacaccgcggtgcaggcgcgcgcccaacggactttgcgaggctcactcggtctgagaggtcggaggctgacgagtgtcgctgctgaaggctgtggtggaccgggctggatcgcggatataggattagataatagatatgggatcgaccgataggagggcttggattgcggatatggggataggataggggatatggggctgggatcgagcgggggacaggggacggggcaggtgaaaaggtgaccagggacgctgcctcctcatcaagagcagattggtatgggagtctcgagaagtcaccaacatgacagtgtacggcttcaggagccacaggggccagacgggtccatgggcaaccatagaccacctgtacacgggttccgggtacccgaatcccggtaatcggaacttgcagaagatccacaaggcagactgtacaacgggcgaagcccgcgcgaatgc

SEQ ID NO: 534347 - DNA, 900 bp, Homo sapiens
ggggagcccccctttccaggggcggtccacaatatcaaccactggggcctaaacgacccattgggagacagtccttaacagggggtgctccgcacgcagacagctgtgctgccgaaaaggaaaccagtccgtgaaattgtctggaacgaccggcagacatgtgggagacacacaccgtgggactgcccgtggataaccccccataaggctagacagacacggcggtgtgcgcgcgtcctagcagcacacacaaggggtgcgacccccacacaaggtgctgtggaaaagcgcatgggacactctccgtcgggcagaacacacgccgtgtgacaaaagaaccgccgctcgacgcggggtatacccacgggcgagtgtttcagtcacaggcgtagtagtgactcaagggaagccgggtgggtcgctcgccaatataatcgtttgcggggaccgcgcaggtcatatgcttaacagtgcctttgggtcatgaaaatcatgaagtgttcccaaacagaatcgtgaaaggttgacaaactctgtagaagtactactaaggcgcatatttgccatcgttgtgaccacaaggagaacagcgcttgtctggggttctctcttcccgacaataatagagtttcagctttgctcagaatgaaactgactgtcgaattggtgtcagagacaaggatagtttgcaagcagcagagatctggcgatgggtggatgcatgcaccagctcactcttttaatgtggcgtgtggagacatactggtgggcggggtggcacacagacaggcaacgctctccctatccatgtgtgagatgaagaggcacgaggtgacgaagctgatgcgaccaccgtgaaagaagggttcttctaaagagaaaaccagcagacaaagacaa

SEQ ID NO: 534348 - DNA, 292 bp, Homo sapiens
  misc_feature (63)..(63): n is a, c, g, or t
tctcagaggatcccctcgaattcgacggtttctcgtctctctcacatcttgccttccaaaatngcgacactggactgtcagctatattacacacaaatgttaaaaaaaaaaaaaaaaaaaccggccttaaccaagaaattcccaaaggtccaaaactttcataaaacatttcatttttaccctacttgacccactttttggcaagggttacaacaaagggggcaaggcagacaggcgtagctggtgcattgtaaaaccctccttctcctttagaatggaaaccttccccttc

SEQ ID NO: 534349 - DNA, 186 bp, Homo sapiens
gaggcatccaggctcctccctgtgtctttgctgtacttcagactccatttatagagactgagggctgataacaggaatacagtggcaaagcactagactgtggaaagggtccagaaacctttttttttttttttttttttttttttttttttttttttttttttttttttttttttttttttttga

SEQ ID NO: 534350 - DNA, 582 bp, Homo sapiens
ctcctcacttgccctgcccctttgcactggtttgaattttgacctggtcccccacacgtgtgaagtgtagtggcaaccacatttctaaagtaatgcacattcaatcccacacgagttaatttaattggctggaagatggagaaatcaccacccaccctgacacggccttttgggcctcccaagcccacttccttggggttccccctccctgtgtgaaaatgtattattcacccacgcacgacacctgccgggcctccctcccgcggggcacctgcctgaaaggcgagtgtgggcactagcattagactgcttcctcccctcctggcaccccctgtggcctggcatcgcatcgtggtgtgtcaatagccaccaaaatcgtgtgtccgtgggacccagtcctagccgcgtgtgacagtcttgcattctgtttgtctcgtggggggaggtggaccagtcctgcggaaatgtgtcttgtctccctttggataaaaggagacccacccaccaaccatgccatcactgggatttccccccgctttgtgagccgtgtcgtatgacctagtaaactttgtacccattcca

SEQ ID NO: 534351 - DNA, 124 bp, Homo sapiens
ttgggagaggatgtgccattctccttagagagaagtgtggtggcttttaggatggcatgggacttcctgtaagaacgcatctcatattgggaatgactattaggaaaaacaacaattgtgcaat

SEQ ID NO: 534352 - DNA, 244 bp, Homo sapiens
cgatgccgttgctgtcgggaaccatgatcggcgccggcacgatcgccttcttgttgcggtcgagatatttgacgaattcctcgacaccgccggaatagtgcatctcctcgcgcttctcgaccgcgtggcgcatgtctgacagcacgatgtggacgccggaattgaggaaggcgagctcgcgcagccggtgctcgagcgtcgcgaaatcatattcgacgttcttgaaggtctcggtcgaggccaa

SEQ ID NO: 534353 - DNA, 1112 bp, Homo sapiens
agccgcgcgcgagtcagactcgggtgggggtcccgccgcctttgccgcccgtgcagcccggtggccgagtggcggcgtgtggaccgcgggttgggagacctggcctggcgcccaatggacaaatttgagcaacttctgaccccaccgtgcctggagcgcgcctccaagggctggcagcgcagatcttggagcagtcgcgttattgccaaggacgccctgaatctggcacagatgcagtagcagacgctgcagttggagcaacagtccaggctcataagagtatgcagtgcctgccgtggtagcgagctcatagagctgatcgagatccgggcgcaggttgaggagaggaggatgaccctgagcgaggagacccgggcatgcaccaggccaggtgcccaggtattcaagagcaatgctggcccgggcagcgctaggaggaccaactgaatctggagcaagttctcaatgaggagaattcaccggaagcaggaggagtccgtgcagaatccaggaagcctatgctgggagccaccggtgagcggtgagattgggcttgggtccaagacttgcgatgctgcgctttgtagtgccgtaggccgggcgcgcgtccaggccgagcggggagaattgctgacatcatccgggagcagatccggctgaaggcggtcgagccccggcagaccgtcttggacgtcccatcagggaacggctggcaccttggtttggggccagggttccggcctttgttggcgatttggccagtgtgaccagcacggtggctgggctgaacgcctgttggctcggtgggggctaccttcgggccaggaatgcgcggctttgttacaggcacggtccatcgaggggtccgcctgtgtggaagaaccggagcccataaatgagggaggggagaatcaccgcagattaacagagggtctttagagagccttgagaggcccccacccacaggttaacagaggggactcccatatagaagtacacaatagaccgtcgcacgtgagtagataggataacacaccacaacgagaaataaagagatcgctcggatatatacactaactaaaatgaacgcaacgacaaagagaacgaccata

SEQ ID NO: 534354 - DNA, 830 bp, Homo sapiens
atctcaatttgaattgtatctcccagaattcccacgtattgtgggagggcaccagagggaggtaattgaatcatggtgggccggtctttcccatgctattctcgtggtggtgaataagtctcactagatctgacgggtttatcaggggtttccgcttttgcttcttcctcatttttctcttgccccttgccacgcaagaagtgccttttgcctcccaccataattctgaggcctccccaagcatgtggaacctgtaagtccaattaaacctctttttcttcccagtctcaggtatgtctttatcagcagtgtgaaaacggactaatacacatggtaattccatgtttaactttttgaggaacagccaaactgttctccacagtggctgcaccattttacattcctgccagccgtcatgaagcttccaaattttcccatatcttggccaggaattaataatggcctggcataggatggtagcctttcttagtgggtgtgcagtggtatcccattgtggtttcgattgcatttccctagtaatcaacggtatggataatcacttttcatgaaccttatttgacacttgtatgttcttgggataatgtctttccggtcctttgcctatttaaaaatggtagcaatttgtcctttaattgacatcatcatagtatcatggatccgggatagtagatccttatatatctataattgcacagtattgctctccatctgggtatggcttcactttcttgaccggcggccctgtacgacagcaaacagggtcgaactgtccacacacacacgacgccaacagcaaccacacaagcacc

SEQ ID NO: 534355 - DNA, 1250 bp, Homo sapiens
taggaagagctcttagagtgttattttatagccctcatttgagagggtgtgggcaggagcacagcctctgggtccaatccacaaactgccatctactagtccatttgtgagctggctggtaaattcaccttcctgggcctcagtttcttcatcagtaaaatgggataatgatggtgccttcctagttgggttgtggtgaaggttaaatgagatgccatgtggaagtgcagaggagaagggctgctataaggggctccaggtgggtgctgctgttatgattgggcacctactgcatgctgtgtccctgcatacaggagtcgacctttgagacctgcttattcatggctgtttcacggatgtcgaagtggaggctcagcagggttggaggttcccggagtctcccagctgaaatggaagtgcttggtgaggtttggtgtgtccgagccgaagagcagccaatgacaggcctggggatcgtctggcacagcccacttcttgacaaggccttggaaacttggtctctgcagcagcaaccggatttcagcctgggcctcggacacctcggcctgggtacggatgcgacttggatgcagtccttccctggcagtggaggggatgcccaggctggcacaggagtctcgggtcctctccggctctaccccaatctgctgtgtgattttgggcccaggcagggacccctctgggctctgttactggagaaaaggcaaatggctggtacgggtgggtccccagccctccttgcctggaggtctgcgagttggagggctctggggtaaagccagagccgggcccggggagagcctgggctcatctctggtgaacagggtaccctctagccaaagcaggggcaaggcgaggcacatgcccctcatatgggagctggggctgaccccctctcctagccctgcacaccttgagcacgtggccttggcccatctgccctgtgggtggacactttccagccctgggtcctgaactctaccaatcagcaggaacctagactcctgaggggtgcagcctggatgggaggtcagggaactgggttcctgagcgcatctctgtgccattcatctctccattggtttcccaaatgtggactgagcacacactgtgagtcaggcctgagctaggttctagggatgctactgtcaacaagacagatgaaggttcctgccctcatggaggggagggaggcaataagcaaagaaataaatgcatgatgtaatgtc

SEQ ID NO: 534356 - DNA, 231 bp, Homo sapiens
gcaaaggggatgtaaatcacctgtctccgtcaaacccacgcctggggttgctgagggacccccctcgacccgtgcacgccgccgcatgagcggctgccagtgccgcacgacagacacaggccggaccagggcacacgccgacgtcaccgcgcacacacacacaccgcacgcacagccgcccaacacacaagcagagctgcagcgtcaacacccgacgaacccagcgtcttc

SEQ ID NO: 534357 - DNA, 369 bp, Homo sapiens
  misc_feature (97)..(97): n is a, c, g, or t
tttttgagacagggtgttgctccattgcccaggctgaagtgcagtggtgggatgataactcactgcagcctcaacttcctgggcttaacagatcctnccacctcagcctctcaagtagctgagattacaggtgcacaccaatacgcctggctaattaaaaaacaacaaacaaacaaacaaacaaacaaaaatatgttttttttgtagagtttcagaccagcctgggcaacccagtgagaccacatcgttgtagtggtcgggaagactgctccgagaggcagactgagggaaggaggatggacatctagatgtctgagggaagggccatttgggcagaggaaagagcacagggctcagtgtgtgtggggg

SEQ ID NO: 534358 - DNA, 640 bp, Homo sapiens
gataatggcagccctaggaaacaattcaattagaaaatgggcaaaagagatatttcaccaaagggaatatacagatggtaaataagtacataaacgtatgttcaaaatcattagctattagggaaatagaaattaaagccacaatgagaaattactaaattaaacctatcagaattgctaaaataaaaaattgtaacaacaccaaatgctggcaaggaatgcagagaaactagagcactttatcttgttggtgggaatataatatggtatagccactctggaaaatagtttgtcagtttcttgtaaaattaaacatgcaactgccatacaactcagcagttgcactcctgggcatttattccagggaaatgaaaacctatgttcacatacaaacctcaacacaaatgttcatagcagctttatctgtaatggtctaaaattagaaacaacccaaatatcattcaatgggtgaacgattaaacaaacttgaggtatgcacatcgtcaaatgccactcagcaataaaaagaaacaaactattgatagatgcaataatcagagtcactttccagataattatggtgaatgaaaaaagccaatccaggttcatactgtatagtaccttatctgagtctgtagaa

SEQ ID NO: 534359 - DNA, 1442 bp, Homo sapiens
taggaagagctcttagagtgttattttatagccctcatttgagagggtgtgggcaggagcacagcctctgggtccaatccacaaactgccatctactagtccatttgtgagctggctggtaaattcaccttcctgggcctcagtttcttcatcagtaaaatgggataatgatggtgccttcctagttgggttgtggtgaaggttaaatgagatgccatgtggaagtgcagaggagaagggctgctataaggggctccaggtgggtgctgctgttatgattgggcacctactgcatgctgtgtccctgcatacaggagtcgacctttgagacctgcttattcatggctgtttcacggatgtcgaagtggaggctcagcagggttggaggttcccggagtctcccagctgaaatggaagtgcttggtgaggtttggtgtgtccgagccgaagagcagccaatgacaggcctggggatcgtctggcacagcccacttcttgacaaggccttggaaacttggtctctgcagcagcaaccggatttcagcctgggcctcggacacctcggcctgggtacggatgcgacttggatgcagtccttccctggcagtggaggggatgcccaggctggcacaggagtctcgggtcctctccggctctaccccaatctgctgtgtgattttgggcccaggcagggacccctctgggctctgttactggagaaaaggcaaatggctggtacgggtgggtccccagccctccttgcctggaggtctgcgagttggagggctctggggtaaagccagagccgggcccggggagagcctgggctcatctctggtgaacagggtaccctctagccaaagcaggggcaaggcgaggcacatgcccctcatatgggagctggggctgaccccctctcctagccctgcacaccttgagcacgtggccttggcccatctgccctgtgggtggacactttccagccctgggtcctgaactctaccaatcagcaggaacctagactcctgaggggtgcagcctggatgggaggtcagggaactgggttcctgagcgcatctctgtgccattcatctctccattggtttcccaaatgtggactgagcacacactgtgagtcaggcctgagctaggttctagggatgctactgtcaacaagacagatgaaggttcctgccctcatggaggggagggaggcaataagcaaagaaataaatgcatgatgtaatgtcagccagggagcgatgctgcaaagcagggtgggcgtggggagtgacgcaggccggggttggggaggcatcgttgtagtggtcgggaagactgctccgagaggcagactgagggaaggaggatggacatctagatgtctgagggaagggccatttgggcagaggaaagagcacagggctcagtgtgtgtggggg

SEQ ID NO: 534360 - DNA, 805 bp, Homo sapiens
  misc_feature (97)..(97): n is a, c, g, or t
tttttgagacagggtgttgctccattgcccaggctgaagtgcagtggtgggatgataactcactgcagcctcaacttcctgggcttaacagatcctnccaccgggtgggtccccagccctccttgcctggaggtctgcgagttggagggctctggggtaaagccagagccgggcccggggagagcctgggctcatctctggtgaacagggtaccctctagccaaagcaggggcaaggcgaggcacatgcccctcatatgggagctggggctgaccccctctcctagccctgcacaccttgagcacgtggccttggcccatctgccctgtgggtggacactttccagccctgggtcctgaactctaccaatcagcaggaacctagactcctgaggggtgcagcctggatgggaggtcagggaactgggttcctgagcgcatctctgtgccattcatctctccattggtttcccaaatgtggactgagcacacactgtgagtcaggcctgagctaggttctagggatgctactgtcaacaagacagatgaaggttcctgccctcatggaggggagggaggcaataagcaaagaaataaatgcatgatgtaatgtcagccagggagcgatgctgcaaagcagggtgggcgtggggagtgacgcaggccggggttggggaggcatcgttgtagtggtcgggaagactgctccgagaggcagactgagggaaggaggatggacatctagatgtctgagggaagggccatttgggcagaggaaagagcacagggctcagtgtgtgtggggg

SEQ ID NO: 534361 - DNA, 349 bp, Homo sapiens
  misc_feature (3)..(3): n is a, c, g, or t
agnattctagagtacccttccggtgtcttaacacacaaaagaggaatgagggatacttataagggcaggtgaaaatgacagcagtcattcgaaactatggaggcggggaggaagtagcaaatttttccaatcaccaacaaaaaaagaccggtgtcacagcacattttggctatctgggtacaaaccatccttctcaaacaatgcaaagggaaattcaagaatgttccttacatgcacagaagggtaggagaacgatgttagcaacacctgtcctaatggggagaagagttgctatacaatatcctaacacagaaataatagattagggacaccggaaaataggggggtc

SEQ ID NO: 534362 - DNA, 222 bp, Homo sapiens
  misc_feature (219)..(219): n is a, c, g, or t
catggaggacaagactagttgaggccatcgactggaggtaaggctggctgcgagcacgggatgcatgctggccgcctgggacgccgcatggcgttccgtctacagtcaactgggcagccgtccaagagaacttaagtcaatcaacagacgtggactgaggcgaagagactgatgcacccacctggatggcccaagtcgacgcgacgcgcacgttgacancga

SEQ ID NO: 534363 - DNA, 633 bp, Homo sapiens
cgctctagagggggtagagggggtgctatagttttagaacagtgcattttatgacttccaaatccaagctaatcttatggctggggtctctgagcatgctggattacagccccacaccaccatatctggttaatttccggatattaattaatagagcctgggtttaaccatgttcgccaggctgatcttgaagtccagacctcaagtgatctgcccgccttgacctcccaaagtacctgcattacaagaatgagccaccgtggccagcctattctgttaaattaaagggcttttactctccagtctaaaaagcacaccacgtcctgctaaatcttagaccgtatcatcagtcagatgctcatcttcagacccacgaaaagatgattatcataataacctgcattaatgagacccaatgtcagaaattaagacttgtgaactcttctaaacccagagactgtcatagaagacattcgtttgcgaaattataagggccaactttgagagataacttacataagagtttccatataattaccccataatactataggttgctgaatagaccacatcacgccccctgttttaattaaacacgctcttattgcctcacccgactttttattaaaaacg

SEQ ID NO: 534364 - DNA, 349 bp, Homo sapiens
tgcatgattattgtgaatatttctaagtacctgtttaattcaccattacaactgaaagtcacatcggaaaagatcagctgggcgcggtggctcacgcctgtggtctcagcactttgggaggccgaggtgggcgggtcgcttgagcccaggcgttcaagaccagcctgggcagcacggtcaaacccccatctctacaaaaaaatacaatagttagccgggtgtggcggtgctcacctgtagtcccagctagtcgggaagagcccaggaggcggaggttgcagtgagccgagatcgcgccgccgtcgcattccagcctgggtgacagagcgagactcgtctcaaaaaaaaa

SEQ ID NO: 534365 - DNA, 246 bp, Homo sapiens
ccagaaacattttcccattattctttcatactataggagctaaacttgcgggctatttatgtaaaaaattttaggataaacaaattttttctttataacatttgtcacagtgacatattcttatgcacacataaagagtacccagataatacactgtatgttctggaggaaactgttatggaagacctaggcttaaaactcacttaataatgaaggtggggaaatagattacagttcttcttaaga

SEQ ID NO: 534366 - DNA, 999 bp, Homo sapiens
  misc_feature (177)..(177): n is a, c, g, or t
  misc_feature (304)..(304): n is a, c, g, or t
  misc_feature (532)..(532): n is a, c, g, or t
  misc_feature (581)..(581): n is a, c, g, or t
  misc_feature (990)..(990): n is a, c, g, or t
gaggaggctcattttgttgggcaccccgggacctcccgccactttaagggcccggcgcacgcaccagtccgttcctatgggcgggcgctgacgctgccgccgcacaacccaagagaagcagggagaagagcgcgggcaggagctaggctcgggtgccatgtcgaggacaaaggcggnctaatgggtataatactcaacttatctgattggttgatgtgatttagtcgatagagcgctccatacaaaacgaaaaaataatatgaggcactggaaaacggtccataaagagtccgagaggagaggnaggtaatcgaaagttggataaagaaataagtaataaaaaaccacttatgacaaaaccggcgcggtgggggagcagacacaggaggccgcgcagtaagccgcgcgcgacacaaaacaccacacataacaacgtgcagaccgaggagcagaacgacagaaagaaacgatcacgagaaggataatccgtaatgattaaattctcacaaactgtcacaagcaaccactcatnatatacatttatatttgcattattcactaggtccagcaacgccaacgangcttgcaacatataaccacttcaaccatcgacactcataacgtagtgatcggataggtgttagacgttattgttggttattagcgggtgtgagtgagtatgtaggtcgggtggagatcagaaagaacacaaataaaggtgctgatataaaacctacttatcgtagtgtgatcagtctgcggtcacggtgattggcgttgaggttatatcgatgtatcagtaacaagtaatgtctatacacccacacttctctcgtcattcctatactacctactcatcgaccgacagcacgatcgataaggctcatacactaattatctttaactcctactcatcatccacatatgaactgtatgagagattgctagttagaatatcgaaaatagagatgaattaaatgataatatcantgtatctct

SEQ ID NO: 534367 - DNA, 285 bp, Homo sapiens
  misc_feature (6)..(6): n is a, c, g, or t
  misc_feature (33)..(33): n is a, c, g, or t
  misc_feature (91)..(91): n is a, c, g, or t
  misc_feature (153)..(153): n is a, c, g, or t
  misc_feature (180)..(180): n is a, c, g, or t
  misc_feature (221)..(221): n is a, c, g, or t
aaaaanttggctgggcgtggtggtgggcacctntggtcccagctgctcgggaggctgaggcaggagaaaggcatgattccaggaggcgganttgcagtgagctgagatcacgccattgcactccagcctgggcaacagtgttaagactctgtntcaaatataaataaataaataaataantaaaaataaagcggagatgttgccctcaaacttcacctggncccggtcctggtttgctaatggctgtggggtgggggttactgtggggtgatgactgacttggtt

SEQ ID NO: 534368 - DNA, 209 bp, Homo sapiens
  misc_feature (1)..(1): n is a, c, g, or t
nagctgacaccctgctgtgcctgagggggttaattaaaatggaataatttttcagatggataaggcttttgtaaaagaagggtagagccaggtgtgttggcacactcctttaatcccagcacttgggaggcaaaaggctggagggttgctgtgagcttaggcagccttatgtacacagtgagactttctctcctccccaaccccagaag

SEQ ID NO: 534369 - DNA, 485 bp, Homo sapiens
  misc_feature (235)..(235): n is a, c, g, or t
  misc_feature (402)..(402): n is a, c, g, or t
tctctcggcttagcgcattttttgggaaacctctgcgccatgagagccaagtggaggaagaagcgaatgcgcaggtgaaggcaaaagaagaacagatgaggcagagggtccaatgtaaacccgctagcttgtggcaccggtggagggccacagggagcagaaacatggaatgccagacgctgggggaatgcctgggtaacaaatgtggttggggacctggcaattgctaatggtnctaaagaagcctttgtcctccaaagtggacttctaagaaaccttacatcggcccttctgaatcggccagatcaactttctgtgaggaccccaacctttgcttcattaagacaaatatggccccattgttgtggtccctcttgcccttggagaccttggtggacattntcgtggaccaatttcgtcgtggtaaatttgtggtggcgccggaggttgtaacaacccattattagataaattcaccttctttc

SEQ ID NO: 534370 - DNA, 531 bp, Homo sapiens
aaatggatacgctagctaaaactaaaagttatttaaaagaacgggggtcaggacatagattatcgtgcatcaccaaaatcatctaattctggccgggcacggtggttcacacctacaatcccagcacttgggaggctgaggcgggtgggtcatttgaggtcaggaatttgagaccagcctggccaacatggtgaaaccccatctctactaaaaacacaaaattagctgggcatgttggcgcacgtctgttgtcccagctaatcaggaggctgaggcagaagaattgcttcaacctgggaggtggaggttgcagtgagccaagattgtgccacttccagcctaggtgacagagtgagactccgtctcaaaaaaaaaaaaaaaaaaagaaaaaagaatttctatggtgtaaaaggcaaagttccctcttcaaggctcccccttaaactcataaatgtaatggatatcttttctcagaactaccttcctccaagtccctaagttcatagtaatacctctcggtaaagccttatg

SEQ ID NO: 534371 - DNA, 292 bp, Homo sapiens
aaaaaaaaaaaaacccccaaaaaaaggggttttttttctccgggtttttttttttctttggggggcccctttcgggggaaaaacggccccctttttcccccccggggggggtttttttttttttttgggggggggggggaaaaaggccccccccaaaaaaatgggggcccggccttttttgcccccttaaaaatttttttgggggggggggggggccccccttggggggttttttttttcccccccccccccccttttttgggtaaaattttgggaagggggagggggggga

SEQ ID NO: 534372 - DNA, 385 bp, Homo sapiens
gagctctgaatacgcggtaggtgcctccgagatcgttgtggcccatgccttgacagaaataatccaaggttcatgacttggtgagaaccaatgggcatacagggctgttgcccaggccctagatgtcattcctcgtaccctgatccagaactgtggggccagcaccatccgtctacttacctctcttcggtgccaagcacacccaggatgaactgtgatgacctccggtctccctggtgagacgggtatcttcggtggacatgaatgaactgtgcatatgggagccactctggcttgtacgctgcagacttatcagacagcagtggagacggcagttctgctactgcgaattgatgacatcgtttcaggccacaaaaagacaggc

SEQ ID NO: 534373 - DNA, 242 bp, Homo sapiens
aagaggcctcctgttgcgctcagcagggaaaaaggaaaacccttcaaaggagagacttggataatgcaataaaagctgtggatgaatttgcttttttgcaaggtcttcccctgtttctgtctgttttccatatcaagcctggatgcagctgctgctgcttagagcaaagatgaagaaagtgttttgcataagtggcttcctgaatgatgagggccagaataaaggtttttcgtcccccccca

SEQ ID NO: 534374 - DNA, 256 bp, Homo sapiens
  misc_feature (137)..(137): n is a, c, g, or t
ttggttctttcctctctttctttctttcttttcttcctttcctgcctttccctttcccggcctttccctttccctttcccttgcctttcctttcttttcttttctttttgaggcagggtcttgctcctgttgcccanggctggagtgcagtggcacaatcttggctcactgcgacctctgcctcctgggttcaagccattcggatgcctcagcctcccgagtagctgagattacaggcatgcaccaccgtgcctgg

SEQ ID NO: 534375 - DNA, 357 bp, Homo sapiens
  misc_feature (79)..(79): n is a, c, g, or t
  misc_feature (87)..(87): n is a, c, g, or t
  misc_feature (90)..(90): n is a, c, g, or t
  misc_feature (95)..(95): n is a, c, g, or t
  misc_feature (132)..(132): n is a, c, g, or t
  misc_feature (136)..(136): n is a, c, g, or t
  misc_feature (164)..(164): n is a, c, g, or t
  misc_feature (190)..(190): n is a, c, g, or t
  misc_feature (212)..(212): n is a, c, g, or t
  misc_feature (242)..(242): n is a, c, g, or t
  misc_feature (279)..(279): n is a, c, g, or t
  misc_feature (301)..(301): n is a, c, g, or t
tggttttttggatggttcccaaagggtttccatggggtaggaggatgggctcgccccccagtgactttttttaaaagcncccggggnggnggaanaggggacaggtccctccccccccccaatcctattttngggntgaaaaccctgggtggggacagggctcncctcaggaatgggctgtttttggccnaaccctcaaaaaccctgggggnggcccaaacttttggttttttcaacagganaattttactgggttttttttggttccattgtttgganacattcctgggcccagtttggnccgttaaaattaaaagttgaattttttttttttttaaatttttttttttcccccca

SEQ ID NO: 534376 - DNA, 178 bp, Homo sapiens
ccagaatatggtgagtcgcagtgggcaaagtagtcaggatcacgacattaccgtgctgcctaataagttgcttttaatccaatccagtaacactttagttatatgcactggttttacacagagaagtacaaaataaagatcacacatcaagactatctacaaaaatttactatatata

SEQ ID NO: 534377 - DNA, 145 bp, Homo sapiens
tctagggtgttgtgcgtgtagtttagtgcgatgagttggggaaggggtcggtactagtggtgtcgcactaggaagtatgtgcctgcgttcaggcgtcatgctggttgacctcatcgggctgcatgatacccaggagccgtggcat

SEQ ID NO: 534378 - DNA, 452 bp, Homo sapiens
tcctagctcgcccgtactccaacagcatgtgatactcgtctccatggagtcgatccaccgacataggagtctgcaagcgcttccgctggagcatgtttggtgaattccatgttggataggcttcatgcgccccgtgtagggcatgatccaatgtttgtccggattggacgcgtaatttgtagctcggcgtgatgtgctgagatgcgtttgtaatgagtgcgttacatattgtggggctgaatcctcagtgcgccgatgtcggaggctgcatggttgatgaccatgacgactggcctttgtacaacaatcttcttggacgtgcggaagaagctcacgctgtcattggtgatgaggtctgtgaggtaatccttggagtagtcggagccgtgcttctctttcaccccgttccgacacagcgtgtagttataaaagcgggagtccctaaggagtcc

SEQ ID NO: 534379 - DNA, 248 bp, Homo sapiens
cacgaggtgctggtccagaggaggggaaggggaccacggtcccggtgtgattggggaccatttggcaggacacacggttcatagaggcttcatttgttagtctcttgacataatacatggcttcaggacgtgggaatgttttgtcttaattcatcctaaaaaggggtttaatatgtttcaggcttaggaatatccatactgcttaacattttttattctggtggacttatgctttaagttgcaaacca

SEQ ID NO: 534380 - DNA, 339 bp, Homo sapiens
  misc_feature (33)..(33): n is a, c, g, or t
  misc_feature (76)..(76): n is a, c, g, or t
  misc_feature (86)..(86): n is a, c, g, or t
  misc_feature (157)..(157): n is a, c, g, or t
  misc_feature (175)..(175): n is a, c, g, or t
  misc_feature (244)..(244): n is a, c, g, or t
ctttgcataacagccaaaactggaagggatctnaagggccctggctggccacagcagcatcagccatggagaaaanaaagggcaanaaggggctgggtgcagtggctcatgcctgtaaacccaggtgtgagtttgagaccagcctagctaacatggnaaaaccccgtccctattnaaaatacagaacattggccaagtgtggtggtgcatgcctgtagtcccagctacttgggaggctgaggcnggagaattgcttgaactcaggaggtggaggttgcagtgagccgagattgtgccaccacactcccacctgggtgacagagagagactccatctcgg

SEQ ID NO: 534381 - DNA, 254 bp, Homo sapiens
atcctcgtgaaaaaagctgacattgaaagattttgaagagcttagttaaaaagttaaaaacagcccagcgcagtggctgacgcctgtgatcccagcactttgagaggctgaggtgggcggatcacttgaggtcaggagttcgagaccagcctggccaacatggcgaggccccgtctctgctaaaaatacaaaaagaaatagccaggcgtggtgatgcatgcctgtaatcccagctactcgggagactgaggcag

SEQ ID NO: 534382 - DNA, 928 bp, Homo sapiens
  misc_feature (71)..(71): n is a, c, g, or t
  misc_feature (90)..(90): n is a, c, g, or t
  misc_feature (133)..(133): n is a, c, g, or t
  misc_feature (152)..(152): n is a, c, g, or t
  misc_feature (155)..(155): n is a, c, g, or t
  misc_feature (176)..(176): n is a, c, g, or t
  misc_feature (194)..(194): n is a, c, g, or t
  misc_feature (198)..(198): n is a, c, g, or t
  misc_feature (209)..(210): n is a, c, g, or t
  misc_feature (213)..(213): n is a, c, g, or t
  misc_feature (227)..(227): n is a, c, g, or t
  misc_feature (229)..(232): n is a, c, g, or t
  misc_feature (235)..(235): n is a, c, g, or t
  misc_feature (270)..(271): n is a, c, g, or t
  misc_feature (276)..(276): n is a, c, g, or t
  misc_feature (285)..(285): n is a, c, g, or t
  misc_feature (294)..(294): n is a, c, g, or t
  misc_feature (299)..(299): n is a, c, g, or t
  misc_feature (322)..(322): n is a, c, g, or t
  misc_feature (338)..(338): n is a, c, g, or t
  misc_feature (353)..(354): n is a, c, g, or t
  misc_feature (356)..(356): n is a, c, g, or t
  misc_feature (375)..(376): n is a, c, g, or t
  misc_feature (388)..(388): n is a, c, g, or t
  misc_feature (399)..(399): n is a, c, g, or t
  misc_feature (404)..(405): n is a, c, g, or t
  misc_feature (410)..(410): n is a, c, g, or t
  misc_feature (447)..(447): n is a, c, g, or t
  misc_feature (459)..(459): n is a, c, g, or t
  misc_feature (465)..(465): n is a, c, g, or t
  misc_feature (469)..(469): n is a, c, g, or t
  misc_feature (473)..(474): n is a, c, g, or t
  misc_feature (741)..(741): n is a, c, g, or t
tccgtacagccaagatgcagcagcatgtgtgtgaaaccatcatccgcatctttaaaagacatggagctgtncagttgtgtactccactantgcttccccgaaacagacaaatatatgagcacaacgaagctgncctattcatggaccacagnggnatgctggtgatgcttcctttngacctgcggatccctttngcangatatgtggcnnganataatatattgaantnnnnaancgatactgcgtagtaacgtgtgttcaggccgcgcnnagttnagatcgatntcatcccanagaanttctggagtgtgcatttgatatngtctactgctaccacnctaacagctttctgnncnactgctgaaattatctacnnctatctatgaanatcatccaagnagttnnccagncacttcaggaatagaagattacagtattgtatttganccataccatgtnattganagcnatanncttacactgtgggatcccagaagataaactcagtcaagtctacattattctgtaatgatgctgtgacagagaagctgacgaggagagaagtggaagctaaagtttgtaatctgtctttgtcttctaatagtctgtgtcgactcaccccgggttttatggaccagaagggagatttgccagatcttatgccaacaataaattcattaataaaacagaaaacaggtattgcacagtttggtgaagtatggcttaaaaagatctagaggnaggttgttggactgttgaagaaactcgggcttcaagtttacggtcttgtatccactttggggtctgggttaccaggggggcggcgccccaagggatctcttccagttggggggtttcactacaaacgaaggcaaaggggtgtccggaaaactcgccggtggaggggatttaccgctgttcccccggt

SEQ ID NO: 534383 - DNA, 1178 bp, Homo sapiens
  misc_feature (628)..(628): n is a, c, g, or t
  misc_feature (1103)..(1103): n is a, c, g, or t
ggcttccggtagcgtggctgacgcctcgctcaatttctcacagggctgcgcaggtttcccccgtctgcgaatggaccactggaggggttcaaaggttcgcgtcccagtacgggaatgagcctctttgatctcttccggggctttttcgggctttcctggacctcggagccacagagatcccttttttggagggatgactcgagatgaagatgatgatgaggaagaagaagaagaagggggctcatggggccgtgggaacccaaggttccatagtcctcagcacccccctgaggaatttggcttcggcttcagcttcagcccaggaggagggatacgtttccacgataacttcggctttgatgacctagtacgagatttcaatagcatcttcagacgatatgggggcctggaccttggccttcccatccttcctgaacttccaggtcctgagtcagagaccacctggtgagagactacgggagggacagacacttcgggactcaatggcttaagtatccagatagtcaccagcccaggatctttgggggggtcttggagagtgatgcaagaaggtgaatccccccaagcagcaccagactggggctcccagaggccatttcatagcttngatgatgtatggctatggaccccatcctagaaccagagaggacaatgatcttgatgcccaggtttcccaggagggtcttggccggttctacagcccagccaaatctatttcaagagcatctctgtgaccaagatcactaaagcagatggactagtggaggaagcgcggactgtggtgggacagcgaggggcgggccagagaactacaggaaagcgacacgaaggagatagcacgccttagggtgatcccggaatcacgaagaactccagtctgggagaaagcgtctccacctggaagatcctggggcgtgggtaccggggccggaggctggttaaccctaaagagccaaaaggtcattaagactcttacctgtggccattaaaaggatgttccttggccccaggggggagctactgagtaaaactggggcgcgagtagtggtgtcccagcgggaagtctttttgagaaacaaaanacgcctctcgtgggcggagaggcggctgacgtagaggctcatcgtcaaagatagagaaggcaagtagcacattgc

SEQ ID NO: 534384 - DNA, 214 bp, Homo sapiens
gaaagcccagttacctttcacaagccatcattctttcccattatgacacacgatagccaacctcatgcacaccatgattcacgaggctgagtacaggacgagacatagtagacaccacttctgagagcaagaaagaaggatgacgcgcatactacaccagcagacactgacactttatagcccacagcttctttcaacacatattctctgacat

SEQ ID NO: 534385 - DNA, 952 bp, Homo sapiens
gttcacatgtccgtcgccgttttttcccgcccccctttgtgtattattggcacacccacctggtgcatcgcccccccccccttgagaaatttttaacgggccgccgccccgtttaacgctctgttaaagaagggcccggctttgctccacggccttcctctatgtaaaacccccccttggtgaaatactgattctcgccttcatcgccgggatcaaaaagcagttctctccacataaaatattgtcgtgtcaatggaggaccactctttcctttaaaaacgagagtttgttacaaagatccggacccccaaacttgtcgtttctagaaagtaacgccatccattatttgaccccgacaacgctgcttctttcccgcgagacgctattctgtcctgtagaaggtctccaatcgggccaagcgatttattctacgaatgaggcacactccttggggaagacagcagattccctggggccacccaccctcgttattgatagttattaaatggaccagagaagggagctcctcttgctggcggaaccacacaagaaggtagtgtctcccccccctccaccatagtgggtggacaattataccaaggaaccccctctgcgtttcgcacactggagactctccttggttaaacaaaattatttattattcaagaggaattccccctcacctatgctagagtcacttctctcttagaggtcttcttcttattaataaggagataaaatccccccaaacacttgttatttaatagtcccaccgatacatcggagaccacgccatcttataaatgcgcccccaaaattccccaagtggtgcccgcgatgtcacggtgcgaagcctacacaccccaggttattagctatttaatatgttaattatactatgctctcgcacaaaagggataaaaatttcttttggcgaacacaacaaaacaca

SEQ ID NO: 534386 - DNA, 1211 bp, Homo sapiens
  misc_feature (661)..(661): n is a, c, g, or t
  misc_feature (1136)..(1136): n is a, c, g, or t
gaggaggaaggcggtcagtaggaaactgagagtgctgtcacgcccactcccgtcacggaagactggtctctgaaagggctgcgcaggtttcccccgtctgcgaatggaccactggaggggttcaaaggttcgcgtcccagtacgggaatgagcctctttgatctcttccggggctttttcgggctttcctggacctcggagccacagagatcccttttttggagggatgactcgagatgaagatgatgatgaggaagaagaagaagaagggggctcatggggccgtgggaacccaaggttccatagtcctcagcacccccctgaggaatttggcttcggcttcagcttcagcccaggaggagggatacgtttccacgataacttcggctttgatgacctagtacgagatttcaatagcatcttcagacgatatgggggcctggaccttggccttcccatccttcctgaacttccaggtcctgagtcagagaccacctggtgagagactacgggagggacagacacttcgggactcaatggcttaagtatccagatagtcaccagcccaggatctttgggggggtcttggagagtgatgcaagaaggtgaatccccccaagcagcaccagactggggctcccagaggccatttcatagcttngatgatgtatggctatggaccccatcctagaaccagagaggacaatgatcttgatgcccaggtttcccaggagggtcttggccggttctacagcccagccaaatctatttcaagagcatctctgtgaccaagatcactaaagcagatggactagtggaggaagcgcggactgtggtgggacagcgaggggcgggccagagaactacaggaaagcgacacgaaggagatagcacgccttagggtgatcccggaatcacgaagaactccagtctgggagaaagcgtctccacctggaagatcctggggcgtgggtaccggggccggaggctggttaaccctaaagagccaaaaggtcattaagactcttacctgtggccattaaaaggatgttccttggccccaggggggagctactgagtaaaactggggcgcgagtagtggtgtcccagcgggaagtctttttgagaaacaaaanacgcctctcgtgggcggagaggcggctgacgtagaggctcatcgtcaaagatagagaaggcaagtagcacattgc

SEQ ID NO: 534387 - DNA, 393 bp, Homo sapiens
  misc_feature (317)..(317): n is a, c, g, or t
  misc_feature (372)..(372): n is a, c, g, or t
ctttttttcccctcccagttaaactcaggcaaagcatgtcttcaaaactatgtagggagctgatatacatgggtacttattaaaatggacagtaacaagtaaatatccttattatacaactacctgatttatgtgaaatgcatttgacaagccaaaaatctgggatgaagaaatctgaggggaataaaatcatacccctgggattcacttcccaaggtatatatattttttaagttaatttgggaaattaacagcatttcacttttcctgcaagtcctttgccacatccgaccttatccaagcctggttggttaatncatttggaagccacctggttggttgggctgtgttgacaggtgccgtgtggttatnggaaggcacaactggggtttt

SEQ ID NO: 534388 - DNA, 271 bp, Homo sapiens
  misc_feature (10)..(10): n is a, c, g, or t
  misc_feature (13)..(13): n is a, c, g, or t
gggtttcccnccnccccccaattcccccccccctccccttatttccccgggcccccttgagaaggagccttttattcccaagggggggcactttatttttaaaaagggtgccagggttcatgcttgttgcccaaaccgtttagggccctcttggttcaggttttttttttcttcccaggggcccttagctgttgggggcggggtcccccccatattgttatgccgaggggttctttaggaaaaacttttttatttttttaaaaatttttta

SEQ ID NO: 534389 - DNA, 714 bp, Homo sapiens
  misc_feature (705)..(705): n is a, c, g, or t
ctctagagatcccccctaaccagtgagctgtatcctgccctgcgagttgcagtggaggtgaggcctgcagtccctcattgctcagccttgtagattcaggccctttcctgggagtctgcaaaggagcctggcctcccccattgccagaactgcagctactggtgttggggtgctggagaatccaaggctccttcgactctgcttgtgcctgtgtggcttggtctgctcagactccccacagcacttcatgtgggtgtggaggctcctgtgttgggaaatcacagggaatgtcctgagcccagggatgcaaaggctgtagcagaagtatgagtccctgcagactatcactcagtcactcatcatttccccacagtataggggtctcctctatctccatgccagttccaggtaggcagtcgtcctatcttgctcttctctgttctctgtgggtaacattgtttccttgatgaatcccaatgtgtccacctggatgttctagttgaagagctagtgttacttgttacttttccttctttccacgagagcagcacacactagctgcttctagtcagccatcttggccccagaacctggttttctcatatttttgacttgtgatttatgatgcaaaagaagtgtcagtttgtggacacatcagaaattacattaattgtttctgatatttcatctccaaataaaaatcanacctgtaaa

SEQ ID NO: 534390 - DNA, 795 bp, Homo sapiens
ggctgcagcccgggtagggccaggagagcctggtccacgtttgcaaacgcagctgaacgcccagtgccgaccctgtgcgcgccgagcgcctgctgctgcgtcctgtgccactcttctcgccgcccgatggcgtcctggggctggatggccccctgtcgccacctgctgctcctgctgctgctctgggtgacctgggcatggcatgcgccctgtggcggtgcctgggctccgactgcggagctgcagatctgagcggcgcttcgtgcccgacgagtgcccgcgcaccgttgctgcatctggcgacttcgtgctgctaccactacgtggggacgttccccgacggccagaagttcgacctccagctatgacatcacactccactttcaattgtgctcgtgggaaaaggacatgctgatcacagggatgcaccatggctcttgttgggatgtgcgtaaacgatcagacgttttcgtgaacattcccccaaagcttgcctacgcgacactgcacggagtctcttgttgtgatccccctcccaattcatctcgcttcatttttgatgtaccttctgcatgggcatcatctcgtgcaacttcttgacgcgatcaggttcagcattcacacctatttcaagccccccgatcgttgcccttcggaacccatccagggtgttctggattcatcggtgacgggtacccactttaacactggtcacgttccttgggactggtacctctgctcgagttccgagtctccattcgcctttatactcattattaaccggtatgtccgaac

SEQ ID NO: 534391 - DNA, 137 bp, Homo sapiens
atattgaattattgtcataagccacgcttgtagattatattcatgtactgacttcaaattggggtaccccctattcaatattttgctctactaatcctcagtctgttaatcgatgccttgggtactacgctttggca

SEQ ID NO: 534392 - DNA, 149 bp, Homo sapiens
ggtgactctagcggatcttcaacacgcatctacatcttgacttcttaggatcaaactaacattgtgagagacctttactgcataacttgttagttttcacatcactgtacaagtgtggctttcatgataagaaagaggagctgagacat

SEQ ID NO: 534393 - DNA, 1001 bp, Homo sapiens
  misc_feature (56)..(56): n is a, c, g, or t
caaaaatttttttggggaacaaacaaccagagaaggagatgtgaacgtgtacaagntcgcacaaggagaggagccccaccacggagaaatataaggtccttcgccccatataagcgggggcacaaccaggcggtcaagaaaaggtgtgctggtcgccagacgccccgcggccgcagggtgaatgttccccccccacaccacctggcgaagccccaccgggagacctccttgtgtttgtctctgaatgagagggtggcaacagacacccgcaggaggggatcacacacctcgaatacctctggggggtttggacatacaagcccccccccggggggagactcctgttgggcccccccacaggggttaagcgaccgcccccagtcttttcacccaagttttctccctttgtgtgaaaagatattctatttcccccctccttctcgttgctcgttagtgtgaacccgtggtaaccaagtttgtagtttttatagtacaccgcacccatagtgcctcgatgacgacacccatttgcgaacaccactggagcgacaggcgttaaggtgcgtggggttcgtgagcgccacccagggcacagaggggagagtgagggcccttccctcccacttcatggatgactacttagcactcgccctcttctgtgtggcaagtacacaatttcgaggactgcacaccacgcacagcactgctcctctttggaaaatatcttttgcctcccgagattgttttaaagtccattagaatacaaggtcctgaagtcccccgacctgttcaagaagagcctttacaagggccacgctccctcacaccaagagaggcctggcacaccccccctggtggcacccttatgagagaggaaagaagaggtccctttggtttttatttccattttttttttccgagggcccccgagctttttccaatttaaaccctgggtgttgatcaattgggggaaaccaaataatccctttgtcaaatttata

SEQ ID NO: 534394 - DNA, 612 bp, Homo sapiens
  misc_feature (47)..(47): n is a, c, g, or t
taccatgttttttctctccccccccacccccccgaggaggaaaaaanaaaaaaaacccccccccccccccccccaaggaaaaaaaacccccccccaaaaaggggggggcgcgcgcgttttttaaaaaaaaaaaaaaagacccccccccccccttttttttttctctttggagagggggggagaaatttttttttttttttcccaaaaaagaaagggggtgttttttttttttcctggggggccccaagaaaaaaaaaaaggtttccccccccccaggtccccccctcttaaaaaaaaaaaaaaggagcgcctctccttttttttttttcccaaaaaagattttttccccccacaaaaaataaaaaaaaaagtttttttgtccccaattttcccccccaatattcccaccggggggcctggggaacaccaaaaaacccccctttttttaaagggcccaaaattttccgaattttaaaaatttttttcaaaaattacccccagtcaacccggaccccccgggtgcactcattttcccccggtcaataaaaaagggagctgggcttccctgccatgaaagcagtctcctggagtttctctaagcttgtaaacgct

SEQ ID NO: 534395 - DNA, 394 bp, Homo sapiens
cgtcatccgcatcaacaagatgttgtcctgtgctggggcgtattatgaagtgttggatcactgctcctccatcctcaacaagtatgatgacaatgtcaaggcttacttcaagaggggtaaggcccatgctgccgtgtggaatgcccaggaggcccaggctgactttgccaaggtgttggagctagaccctgccctggcgcctgtggtaagcagagagctgcgggccctggagacacggatccggcagaaggatgaggaggacaaagctcgcttccggggcatcttttcccactgacagggccccagttctgccctgccttgccatgccctgccctgccctgccaagcccactgctgccaccacctgtcaatcccccactgtcactttgcgcttc

SEQ ID NO: 534396 - DNA, 719 bp, Homo sapiens
  misc_feature (511)..(511): n is a, c, g, or t
  misc_feature (552)..(552): n is a, c, g, or t
  misc_feature (574)..(574): n is a, c, g, or t
  misc_feature (589)..(589): n is a, c, g, or t
  misc_feature (613)..(613): n is a, c, g, or t
  misc_feature (624)..(624): n is a, c, g, or t
  misc_feature (699)..(699): n is a, c, g, or t
gaatgctggaccagcgatacgtaacgatagtgttcagactcaccacctaccccgtcacccgaaacaagcgcatgaatgtcttcatcatttcagctttgcgatctgccagatctttgaagcgctggaatacatcattgagggcctgctcgctctccatttcaatgccgagagcctctaatcgttgcttgaaggcgtttcgacccgatagcttgcccagcacaattttgtttgctgaccaacccacgtcttcggcagtcatgatttcgtaggtctggcgagccttgagcacaccgtcctggtgaataccagacgcatgggcaaaggcattggcacccacaattgctttgttgggctgcaccacgaaaccggtaatattgctgaccaggcggctggcggacacgatctgggtggtgtcgatgcccacatccagatcgaagaaatcccgacgggttttgacggccatcacaatctcttcaagcgagcagttgccagcgcgttcgcccaatccgtngattgtgcactcgacctgacgttgctcaccaatggcaacanctgccagtgagttggccaccgncatgcccaagtcgtngtggcagtgaaccgaccacactgncttgtcgctgntgggcgtcaatgtgcgctcacgcatgaatttcgcgtacagcgagggcacagcatagccctacggtgtccggtgtngattgttttgcacctgcttg

SEQ ID NO: 534397 - DNA, 167 bp, Homo sapiens
  misc_feature (116)..(116): n is a, c, g, or t
cttaaacttcagacttcctgtcctgctggtatcatggagaaagtccaatacctcactcgcaagcctaagaagagctcaaccattgaatgctcaacaagcgtaaaagcccagatctnattataatttctgtctcatcttaatatgtctcttgctgatctgtatcatcg

SEQ ID NO: 534398 - DNA, 112 bp, Homo sapiens
ggctcccacttctacgctgccctgtctgggtgacagagtgacgactctgcttaaaatttttttacaagtctagaaataaacccatacatttatggtcacttgcttttttttt

SEQ ID NO: 534399 - DNA, 239 bp, Homo sapiens
  misc_feature (2)..(2): n is a, c, g, or t
  misc_feature (27)..(28): n is a, c, g, or t
  misc_feature (44)..(44): n is a, c, g, or t
  misc_feature (46)..(46): n is a, c, g, or t
  misc_feature (50)..(52): n is a, c, g, or t
  misc_feature (57)..(57): n is a, c, g, or t
  misc_feature (61)..(61): n is a, c, g, or t
  misc_feature (188)..(188): n is a, c, g, or t
  misc_feature (218)..(219): n is a, c, g, or t
  misc_feature (222)..(222): n is a, c, g, or t
tnaaaagctacctttattgtatattanntttcttaatacttaantntttnnnacttnagancaccgtggaatactatgcagccataataaaggatgagttcatgtcctttgtagggacatggatgaacctggaaaccatcattctcagcaaactatcgcaaggacagaaaaccaaagaccgcatgttnttactcacaggtgggaattgaacatgagannccntggacacaggaaaggga

SEQ ID NO: 534400 - DNA, 103 bp, Homo sapiens
catccctacgcggcggcgcgggtactctgatgttccccatgaacgagatccagcgttagcttgcgttgattaagtccctgccctttgtacacaccgcccgccc

SEQ ID NO: 534401 - DNA, 760 bp, Homo sapiens
  misc_feature (89)..(89): n is a, c, g, or t
  misc_feature (98)..(98): n is a, c, g, or t
  misc_feature (327)..(327): n is a, c, g, or t
  misc_feature (362)..(362): n is a, c, g, or t
ctgcattctgttacactgtctaaaattaataattgtgtaaacctcgttctacaaggagattaactccctttgtggggccaaggtgtggnacaacaaanttgggaatttaaaattggccccttaaatttttccccaatttttttgttctttgtaaatttaaagggtttttgttatttaaataattaacttcatatgatttctcatttacttaaaaaaaaggtcgggccccgccctatatttttataacgcatcctttccccagcccaaccccttcttttttgtgttggggcgggggaccacaaaattctaaaatgtttcatacaggtnattcaaacaaccaacaaatatttctttccccaaancggtcggcttgtgggcaaacacagggactctagcggggctgttttcatcatctgcgtagcggggagcaagaaattttagttctgcctttctacctcaccgacaagacgggagaatttttcatcttaatgagtggaggagccgcaaaatcttttcatttcatagaacggagggcgagggtattgtcaaaaactgttttgtcttttcgacttctaaaaacgaacaagcttcgtctgacgaggagacaagacggggttttttcacggggaaaaacgatgggggcgagtgggtaaaaacagccctgacaccaggaaaaaaagaaagagaaaaatttattctggtgtgttgagggggcttttcgaaggggaaaaaccacacgcgggaaacacaccaacaggcg

SEQ ID NO: 534402 - DNA, 365 bp, Homo sapiens
agtgccccaaccattgcaatgggaggaggagggccagctgttttgaaaattttgcctaaaaaaaggtattttaggcgggcgcggtggctcacgcctgtaggcccagccctttgggaggccgaggcaggcggatcacgaggtcaggagatcgagaccatcccggctaaaacggtgaaaccccgtctctactaaaaatacaaaaaattagccgggcgtggtggcgggcgcctgtagtcccagctactcgggaggctgaggcaggagaatggcgtgaacccgggaggcggagcttgcagagagccgagatcccgccactgcactccagcctgggcgacagagcaagactccgtctcaaaaaaaaaaaa

SEQ ID NO: 534403 - DNA, 462 bp, Homo sapiens
tgcgccatccgttcacgtctctgcatccattccttcatgtctttatttagttgtttatttatttagttatttatcttatttattgagaggtgaggagtgccacggctgcccgtttacacctttagcgtctggtcctcctgcgtgtcctcccctccactgcctgcatggggggcgcggggagtgaccaggcgggggcctcaccgccccagggccgttgcctgctcagaccttgcaggctgtggagcaagaggccctgggtctctccaagcagctgcagaccccagctcgaattttgcacatggcggggtcccgggaagggtggggagcaggtgtccttcctgtcgtcgtctgccgtgtgccatctttcctggatcttgtagcgggtgcacacgcgtgcactgggaccccacacagcaatacgagtccaacttaataaacacatttctggggttaaaaaaaaaa

SEQ ID NO: 534404 - DNA, 351 bp, Homo sapiens
cctcaggagtaatggaaaataacttggacccagacacaaaaggccacatgttgtatgattccatttattccattaccagactgggtaaacccaaagagacagaacacagattggtggctgtccggggctaggaagagggcgaaaagcgacactggctgcttaacagggatggggtttctctttggagtgatgagagtgttggaactagataaaagtggtagctgcacagcgtcgtgaatgtgctaaatgccactgaattgttcactttaaaatggtcaatttcgttgttttttatttattttgtggagatgggctttctccatgttggccaggctggtctcgaactcctgg

SEQ ID NO: 534405 - DNA, 160 bp, Homo sapiens
cgcaggtagagtacgctgagtgtgatcctcgccacgttgagcctcccaagtacctgggtctaaaggatgcaataccacaccgggctgtctgtttgtttggttttcgtttttttgtagagatggagtcccactatgttgcccaggcttgtctcaaactccg

SEQ ID NO: 534406 - DNA, 863 bp, Homo sapiens
gaaagaatggcagacttggaggacttcttcggagaccctggtgaaccctcctgaatttaatcccgtctgggaagtaaatgcatgtgcacataatacgaatcttttaacctacagcaaatgaagttattgtgtgaatgagattacgagatctatactgaccaatagagtgacataaagggtcaacatacagaaactttgctggcaggatccctggcctaacatgccctttgctacattcatatgaatgtaacaagggaagttaaagacaatcatggacaatggaacatctaaggatatcggtgcattacggctgcagaatgacagtgcgtatgcacgtattatagaactttcagtgaagtgtcatctattgctagctagcagaaatcagaatacttattgattgatgcctgtgttattagaacgtccgactcatgggcatcctccaatcaggcattgtgacattcactgggtgggactgtatactgaacgggtagcctcaagatgccattctacatatctagcaagtactcttgacatgctgcgcgatgttatcattacccgatacaagaatcagagatctcggattaaatcctcgccacgcccacaagttcaatgttgaactaccagggcatgctttgcttactgtcatcgaaatctcatttgaaattggttatgtctggttctgtgtgtttgtcaatattctgcaaatttcagccccattttgtactacgtgcgagacaggctttaaaattctctgcctccagtgctgaaggccaagaagaaagaaactgaaagtgtctgcctgaggataaaagtatttccccatctctaagagctgttaatagaaattcatatagcagatc

SEQ ID NO: 534407 - DNA, 202 bp, Homo sapiens
tcgcggattccctggctgtcattcagtttgatccagcaccggctttggtcgcatggcacttgcctccagttaggagacaggccatgcctttccagtgcatgcgctcactgatttcatcctgcagtttccgcacagtgcccaccagacgtatgtccgacacgcctggccgaaggcagacatcaatactcactgtccagcccgg

SEQ ID NO: 534408 - DNA, 350 bp, Homo sapiens
tggctctcctagcctacctccagtattaaatttaagtatttatgtcaattgtactatgtcttcatttacttcgaagttcacttaaaaatacgactggttgggagttcccctcgtggctcagtggttaatgaatctcactaagaaccatgaggttgtgcgttcgatccctggccttgctcagtgggttaaggatccggcattgctttgagctgtggtgtgggtcacagacactgcttggatcccccgttgcctgtggctctcgtgttcgccggtggctacagctcctatttgacccctatcctgtgaacctccatatactgtgggagctgcgtgctaagacagccaagttc

SEQ ID NO: 534409 - DNA, 885 bp, Homo sapiens
ggggtttgcatatgttccccagttatgcgccccgccgactccatgtggtgtgcacacttgcgaggagtccatgtgtaattgaatttagtccccaatgtcaggtgggccctgttgttcatgccttgttcctttcccttttcggggtcttgaggtcggccaattcacttgaggttaagggttccaaccagcctgtcgcacattgttgaacccgttcccgtccgtaattgaatcattctttaatagcccggtttgtgcttggcccctgtgatctcagctacctgggaggctgaggccgtgagaatctcgttggacctatggagccagaggttccagtgatcccagattgtgcccgcctgggcgaaccgggtgaggctcttgtctccagataaaaagtccccatcttcatggaccctccgactctggaattgggtgtcggcttttttagcccgcttttgtgggaattgcctcttgacctattaaagaaggaaagtgggtatatggagtcccagcccctccagagactggatatcccccgcagaatggcttgggttacccgctattggacccctggaagatgaatctaatccttctcacctggtttttctttgccaattcactttgcttttaatttttctaataacccattaactctaattttccacatgttctccgggcccctgggtagacacagacaccacgcttgagtttcacgagcacgagcactatgagcgaaagaaaaaccactggcacttgagtgtgctgagtccacgaccaatgttactttatatacaccactcccaaatttgaacgaagaaaaatgtaatttctttaaggtttcaaaccctgtaatagatataaagccaaaataaaaacctgttgccaaca

SEQ ID NO: 534410 - DNA, 355 bp, Homo sapiens
gctttcattcgtctcccgtctttggttctccagttcaaattattgcaagcaactcaaaatatttaaaataaagtttacattgtagttattttcaaatctttgcttgataagtattaagacatattggacttgctgccgtaatttaaagctctgttgattccgtttccgtttcgatttttgggcgaggggagcactgtgtttatgctggaatatgaagtctgagaccttccagtgctgggaacacacaagagttgttgaaagttgacacccagactccgcatgtaaaccctgcttctgtatcattaaagagcaatcgctcggtccctggacaataaacagtcccatcaaagagaaa

SEQ ID NO: 534411 - DNA, 928 bp, Homo sapiens
  misc_feature (11)..(11): n is a, c, g, or t
  misc_feature (62)..(62): n is a, c, g, or t
  misc_feature (78)..(79): n is a, c, g, or t
  misc_feature (82)..(82): n is a, c, g, or t
  misc_feature (106)..(106): n is a, c, g, or t
  misc_feature (135)..(135): n is a, c, g, or t
  misc_feature (141)..(143): n is a, c, g, or t
  misc_feature (152)..(152): n is a, c, g, or t
  misc_feature (180)..(180): n is a, c, g, or t
  misc_feature (183)..(183): n is a, c, g, or t
  misc_feature (197)..(197): n is a, c, g, or t
  misc_feature (199)..(199): n is a, c, g, or t
  misc_feature (202)..(202): n is a, c, g, or t
  misc_feature (206)..(208): n is a, c, g, or t
  misc_feature (210)..(211): n is a, c, g, or t
  misc_feature (217)..(217): n is a, c, g, or t
  misc_feature (222)..(222): n is a, c, g, or t
  misc_feature (224)..(224): n is a, c, g, or t
  misc_feature (237)..(239): n is a, c, g, or t
  misc_feature (245)..(245): n is a, c, g, or t
  misc_feature (266)..(266): n is a, c, g, or t
  misc_feature (268)..(268): n is a, c, g, or t
  misc_feature (278)..(278): n is a, c, g, or t
  misc_feature (285)..(286): n is a, c, g, or t
  misc_feature (304)..(304): n is a, c, g, or t
  misc_feature (306)..(306): n is a, c, g, or t
  misc_feature (314)..(314): n is a, c, g, or t
  misc_feature (318)..(318): n is a, c, g, or t
  misc_feature (342)..(342): n is a, c, g, or t
  misc_feature (363)..(363): n is a, c, g, or t
  misc_feature (418)..(418): n is a, c, g, or t
  misc_feature (478)..(478): n is a, c, g, or t
  misc_feature (524)..(524): n is a, c, g, or t
  misc_feature (887)..(887): n is a, c, g, or t
aaaaaatgttnaattaaatatcaaaacaaaattagtctaggctaaaatgtaaaaaggttgtnactcaactgcatctcnnganggaggtgtctgtatgatgaaatgnggcaaccacgtttggagttgaattaatgngaaaannnagctttgancaatgaatgaatagtaagctatgcagtnggnctccaacctggggntnggngagnnngnngggtgnaggtngngaggcagggtttnnnccaggnagccaaggtaaagggaaccananaggggccatntttttgnntacggtggccagctggancntctgggcntctntcctgctgaggggcttgttttgcntggtacccaggcatccttctnctctcctggcaaggtcttactgaagggctaggacagggctggtgtcttggcccanagctaccttgtgccttcctggccagaaccacccacacctgggcaggggccggggccacanagagaggagcagcttgtggagtactaggagagtgaaacccgaagantggacaatgataacaacactgacagggctgggctgttctagcagcctgtgagagaaagtggagagtggctccggacgggacgcaccaccatgacagaaacgagacagtcactacccacagggacatgggatgggaacagtggccaggatccccagtcttggggcgagggtggtgtctttcccctgcccccgctttgtcctgggcagcccctgcacctgatcgtagagggcagctggacccccaaccccagagtgagcaggtgtggcccaagaggggaaagccttccccaggccagtccattccaggctagggacacacgtcctgggcagtgctatccccttctcaggacctcagtcctggggncaaggtgctgagggactgggggaacttggcaggggagccca

SEQ ID NO: 534412 - DNA, 384 bp, Homo sapiens
attctatgatggtatccctgtaaacccactccgaggacacgcccctttattcggtactcgagtcatctcagggttttagcagggagaggtctacttactctagagcgaaccacaatcagtagtcggtagcgctgggattccagcccggtccatccaaagcgttcaggccctatgtctctcctctggacctctctggaaatgcttctcaactttgatgatggctccagtgacaggcagcagccaccaggactgtgatctccctgggatttaaagtgggaggttaaaccaggctccacgccactgcggaattgtgcaattgtaagtcaagtctcaattgtgagccaagcttctcccagggtcagaggtggagttagaaaggcccca

SEQ ID NO: 534413 - DNA, 355 bp, Homo sapiens
atacgcaaccatgccgatgttttctaacactgtgaaaatattgagatgatactaaaaagtggtagctaggtcatctattacccatgttttacaaatgaggaagctgatgggataatttgtgatttggttgtgataaggctggaattggaattgtgccttctgtatctggattcagcattctttttcatggatcctgctgattttaatgttggggcttgccatgactgtggctccagtgtctgtagtgcccatcaaggatgacagatgcctagttctgtgttgacaagagttgcaaatgcatattactctgggtttttttttttgtttttaagacaagagtgactctctgtctcaa

SEQ ID NO: 534414 - DNA, 122 bp, Homo sapiens
cctcccgagctcgacgctcacgctctggctggtcgggcgggatgccttccttgtctgggctctttgccttgtccttctcactggtgtcactcgggtccacttccgttagtgattggtcttag

SEQ ID NO: 534415 - DNA, 224 bp, Homo sapiens
gtccccagacctcctaactacatagcacccaaaatacccaaacccctatggtgaagtggaactcttccccacttagtggatccccccgggaccctgctgtccccctgccctgaccactattatcggaatctgggaagtggggcatctatatctccagtgcactcataactctaacatttgcatccactcttgcattaatgacacaaaagtgattgttccccgcg

SEQ ID NO: 534416 - DNA, 100 bp, Homo sapiens
cagattatacagagccgtgagaacaaaatgaacgaaaatctgtcgcgttcattcattgcccccacaatcctaggcctacccgccgttaggccgatcatga

SEQ ID NO: 534417 - DNA, 116 bp, Homo sapiens
atttttttaaaacaactttttaaaaatggttatcaaagcccaaaatgctccttatataaaatttagaagccaaaagaagggaataaaaattttccataattttccccggtagggga

SEQ ID NO: 534418 - DNA, 322 bp, Homo sapiens
tttaccgccatcatcgctaactgagctggcagctcttcaagtcgtccgccgtcctcggtcgtcaatgtctgactggcagaaccccttgcgggctacatgctggccatgctggagttcatgatcctcccagtcggtgcagcaaacgtctctcgtggaagccatgcgcattggagcagaggtttaccacatacctgaagaatgtcatcgaggagaaatatcggaaatgatgccaccaatgtgggggatgaaggcgcgtttgctcccaacatcctggagaataaagaaggcctggagctgctgaagactgctattgggaaagctg

SEQ ID NO: 534419 - DNA, 395 bp, Homo sapiens
cccagtagtcattgatcatttcaagttgactttttgttcgtgactgatgaggaaggaaacagattaagccaggaagacatccgagaggaagttgacaccttcatgtttgaggtaacttttgtcgccaggtaattttccttactgtatttcacaactcagaatgtactcatggcagcaacacctgcttagtgcaagaactaggttccattcccagcaccacagcaacaagcaagcaaaaggggcagggtgctgggcagatggcttagtaattaatagcactggctgctcttctaaaggacctgggttcaagtcccagtatctacctggcagctcacagctgtctgtaactctacttccagtcgacccgcccgcgaatttagtagtagtagtcgacc

SEQ ID NO: 534420 - DNA, 338 bp, Homo sapiens
tgacggcgatagcatctgaatatggaaccatgataagcgccggatcactagatatctcgtgagcggcgattatattcattccattgcttcttgcagtctgcgcaagctcaactttctgttccagaagccgcagttctgtctgtttagcgacgcctctcttcaaacagtgtctctcctgttcattttcaacctgctttctctcttacttactgcctgaacttcaagtttatgtcaatttcactgtcgccgctttagcctttcaggttgcaacagtggattcttgtgtcaatttataaagggtacccatcaacaagccaaataatcgccggtcacgagat

SEQ ID NO: 534421 - DNA, 281 bp, Homo sapiens
tcggtaccgacgctctctctgtggggatcccaagtttatctccagctgactctttcatgaaacaaataatattgtttcctatggctgcataacaaattactacgcatttagcagcttaaagccactaagcaattattatgctcacagttccgcgtaagatcccagctgtatggagtgtgactgcggttcttaagctcaggtctcaaatagggcaacagtctaaggtgattggactgaggctgggcctctgtatccaggatgcctttgaaggaaggaactcc

SEQ ID NO: 534422 - DNA, 146 bp, Homo sapiens
aaaaaagaaaaacaaaaaaacctactttggcagattagtgttatgatgaaaagggatacatgtatgttcctgaaataaaggctgtgctcagttatagctgttaccattgattgggagatgttctttttattccagggtttgataat

SEQ ID NO: 534423 - DNA, 201 bp, Homo sapiens
  misc_feature (3)..(3): n is a, c, g, or t
  misc_feature (23)..(23): n is a, c, g, or t
aanggtaatcttaacctaaaatnggtttcaacatttcgtaagaacttctgaacttcttccccccgctccatttgtgctctcaagttaaggtaaatagaggctgggcacagtggctcatgtctgtaatcctagcactttaggagaccaaggcagacagatagcttgagaccagcctgggcaacatggcaagacctcatctct

SEQ ID NO: 534424 - DNA, 112 bp, Homo sapiens
ctcgaggatccccaaactcctgtactctgatctactcgctcggctcccaaagtgctaggattgcaggcatgagccacttggggctggccaagactccatctcttttttatag

SEQ ID NO: 534425 - DNA, 373 bp, Homo sapiens
atccccgtaaaaagacgagaatgtcatgtgggctgctctggccctgcgtgtgcacagctgtggcatctgcttgatgcctgtgattctctaaactcatgctgtccttgtgattatatcacctctactctccctttgtaataagcacatacaggctttagctctaagatagattagtgtgtttgtccttttaccatcgagctacttcccataataatccactttgcaatcctacactcttcacccacctcccatacgcaaggagatgtgtatacttcgcccagagtaactggtgttaagaatcttagaatcaagaccacttatactgtctgtctgaggcagaagatcacagcagcatctcctctcttctcttgta

SEQ ID NO: 534426 - DNA, 187 bp, Homo sapiens
ttcccgaaaaaaatttggggaaaaaaagggcgggggttttaaacccctaaaccggggggcgggctccccccccccggttttttaggagggggaggctttaaaggcaacccttgccgggccaaaaacccttgttttggggatttttccaaaaagggggccccccaggaaaaaaattttgtggccttta

SEQ ID NO: 534427 - DNA, 198 bp, Homo sapiens
cacatgctcactcacacacgagccaagaaacacggacacaatacaagccaccgagcacacaacacaccgacaaccagtacaaaccacgaacacacgacacacacacaccacaaacaacaacaccgcacgcacaacaagagcactacacaccactgcaaaccaaccaaccaaccaaccacacaacaacaaactaacaaa

SEQ ID NO: 534428 - DNA, 472 bp, Homo sapiens
ggtcgacgcctgagcctctggctggagggaagtggatgtggcacttgatgtctgcagagatgcctccagaaaggcccgagagccccagaatgcatgtgccaggaagcacgaagcaacatgagggtaaaattatgtttttaacagaagaaaagacctctgccttgcagcgtgtagacagatttctattcccacccccacgcagccccagggacctgaaagaatgtggttttctgagcacggccttccgttgctgaagggggcggattcactcctaaaaagttgctgtgaaatggatttttctatatccaatggtatttttccgttggttggtgtttaaggacatgggtttcatcccactcgggaattacccgcccttgtggttcccgattgaggcagccactaaagagataataattaaaaagtgtgatacaaaccatggtgtcccaggggacactggttgggcagacaagta

SEQ ID NO: 534429 - DNA, 1631 bp, Homo sapiens
ggagagtgcggggctgatgcatcgcagcagtcctgtgaccctgacttcggacttggagaagaaacgccgaggagtgaactgggagttagggggttatgcatgcttgtgctgcgctggtgatgccggcacccctggtctccggaccttcacttcccaggaggcctcgcgcgcgactggacgtgctgctgagcctataagacagtgcgagtgctggcaccctgcctgctcctgcatcttgagtgagctggcatttgccagcctgagcttgtacggcatttcatgtggcacgatgtctatctggccatctaccataaggacacctctggagatgctgtgccatgatccctgtgcatgccatgggattaaaccgagacagagacagggttcccagagaagcaatccccgggacacattcaaacttcagaacacccaacttgatgagggtccagggaggattgaagatcctttgtcccacacttgtatcaaggtggaactttaggatacaacagaggatgaacccaattatacggccagtgaacctttttggagacgcccccatggcacaatgtatcttcattgaacgccactaattcactttacgcgagcctaacacgtgcaggatcgcagttcgaagtccacgcacacttggagttcgtctggggaaccggggaacataaccttaggtcccttagacgcttggcatagcattggagtgagatcccacttgggggagcttccatacatctgttcggcattacccatcctttttccacccttaattcctcaacattggagacattgccacagatacacatgggagacggcttggtagttgaggactttttttggcccgttgagcaaaccttggtcgcaagggcaatacctacacactatgattgcacaaacgttggagccagcaccaaaggtgtcattcagtgtggctttggccttggcactttgggatcgagccacattccttactcggtccatcggctagcgacgtccaaaaaataggagtaggtacaccacaaggacttagacacaacacagatctagttggcagtatatcaaagacacccacaaatacttaggagcatatgaaaacaattactatacaatgtaaccaagacgcacagaacgccattgacatgggcaccattcaagtccatcaacctatagtatcggatacgatcagtacatcagatcgaaatgaacatacaaacaggattaacgcaacatacgcattagggaatatgactatgcgcaaagccattcatctccccattaaacacaagatgaggttatgcatgacttcacccaaattattggattctcatatcaacagtccaagacgacatcacggagcatcagcaagaaatcacacagagcatggagatcaccaatgaatggaaaaaacaatagaagaaccacagagacataatggcgcaagaacatatcggacaaacaatggcaaccgagatgagacagcgtcatatgcaaccatcagtgtaacacgagaaaaaggatcaaacagaatataggtgatggagaaaacccatacaagaacaaacgtcaacaaataggagaacctaagtcaacatggtctgctgtcctttaggaaaatagaagag

SEQ ID NO: 534430 - DNA, 1241 bp, Homo sapiens
aacaactacccctaaaagccaaaatgggacaaggaaaagactcatactcaacattgtcgctcattggacacgctacattcgggcaagtccaccactactggccatctgatctataaactgcgcgtggcatcgacaaaagaaccacttgaacaacatttgacgaaggacggctgctgacgatgggaaagggctccttcaacgatatgcctgggctcttgcgactaaacctgaacagctgacgcgctgaacgctggctatcaccacttgactatctaccttgctggcaaatttgcagaccacgcaacgtactactgctgactactcacttgactgccccaggacaccagagcacctttactcaacacacaccactgcacttacacgcggacactcctcacggcctgcacctgctggctgtcccttgactctgctctgcatcgcctgcgtgctcggtgcaacctcttgacacagccctcggtactcttccaaaccacactgcgcgccgcaccccgacgagccactgaccccctctcctgcgcctctaccagcacccctgcgcgctgtcgcacaaccaaccctacactccgctccgcgtgcctccacaccaccacaattggcactatcccaactagagcccacacgcataccagtccacgcaaacccacgcactacttgacgcgcaacaccactgcgcctccaccgggcaacgcgtccacgccaccttcatcccccctctccacgccacacaccaccgcgcccaccacaacccccccgacccaaccagcccacccccctccggctcgaccaacctccccctgcggccccgcacacactgcggacgcaacccacacccacatcgccctcgccgatcgcccaaaaagcacagcctacaacacactacgaccactagggaacaccacacggccgaccccgcgcgcacacgccgcaccccccgcccaacaccgaccactgccccaccctccgcccccactgtcccaccccccacccgcccctcccccctgcagccccctcccgccacaccttcgcctttccctaaaccaaactccaaatcattcccctctccaacatccgcaccccacgccgcacatctcgacacccattgcccctcatcccacacattctcatctaccaccaactcgacccgcactcctcagcccaacccacgccccccccgcacaagaccccaacacacccaacaaacgccccccccctccccccca

SEQ ID NO: 534431 - DNA, 207 bp, Homo sapiens
tctagacggactcgcccgggagccttaacctcaggagttcgagaccagcttgggcacaaagtgaaaccgatctctactataacaatacaaaatggcggggcatggtgatgcatgcttgtgatcccaggtacaagagaggctgaggcggagactcacttgaatccgtgaggcacaggttgcagtgaagctagattgtgcacttcactc

SEQ ID NO: 534432 - DNA, 659 bp, Homo sapiens
agttctcaagagatgtttcgcaagttgtgggcaacacgaaagttcgctgggtttgcctcccgatatttagggtgcttacccacttgaactggcacgccaccatttcaggggcgccaatcgaatcggcggggccccccaatgtgccacccatgaatcaaggggcttgggaacattcctgggatgtctggcatcaaaagccccaaccccgtgccgtttttgcacggcttaacctcctagttgtccaggattaggccagtctggtgcatcgaagacaaatcttgtgtcaaacacgccggggcactgtttcgtccgtccgtcgcttagcaaaatgacggaataacctgaggcctattggccgtgccctagtgttctgttcgacgataatgtcaagcaattgagctcgtctgtttgtcctctgagaccaccatgctcaagttctcagcccagttcctctctcgctgtcccgtgacgcccgcatcgcacagcatgttcgcctccttagagatccaggcacgggaatggaatgttcgttgtaaaattcaacacccagccaggctcataagcggcgatctgtgcataaagaggtcaggacccagccgaagtcctcggcgtttgacagcgcagctggggggacatgatcacactggacaaggccatcc

SEQ ID NO: 534433 - DNA, 134 bp, Homo sapiens
cgaattgtcaacttgtctgccctgatgctggtcagcaggctggacgggtggtggcggtggcggtggcaacattggggtgggaaggaatgggttgtgcaccttgccttggctgctcccgttgcagtgtgcttccg

SEQ ID NO: 534434 - DNA, 941 bp, Homo sapiens
  misc_feature (1)..(1): n is a, c, g, or t
  misc_feature (700)..(700): n is a, c, g, or t
nggtcctggagggtataagcattctagttggctgggcccggtgggccgatatccccacttggccgcgtcttcctgctggtgttctctggccctccgcgcattttcctccggtgtgcccgctttgtgggtcccgccgggtcctcgtcagcgcagttgtgttggtctgagggaaaggtgtgtcgccctctgttggtaatacctgtgagattggcccgcaatactttctgtagtccttgggtgctcgcgccccctttgttgtaattgggtgtccctggccaccgcaccacgtgtgtgtgtgaggacgttttctcaagagctaatcccacccacttgggggcgcccttgttcgggttccggtaatattgtgaagccacgacccgtgccgggtatggggggtctaatcacaaaacaccgatggggcaacaaaaaggcgcttcctttggtgatcctctgccaaggtggctccccccacatagtgtgcgccccccagaatgcctcctacaaggacccttataatgtgaatatttgtattccgcccttgatgtcacgtcgccccccccctcgttttactccactgtgtgtagacaaacacgctttcttccaaacactctgtttgtttgcccaatgtggccccacttttaaggattatatatattaataacaacctgtggtttattgatcacaccacagccgctttgtnttaaccctctctctctgacgggtataagaagaaattgttttttttggagcccacctctgggtttgttttgttttggcctggggcacactgtttaaagatatattattgtgtttttaaaaacacgcgcacgcttgtttaatgtggagaacccacacccgtgcccccaaaatttgttgcaccacgcgaagtttgtggggcccccccttatagaaaaaggttgtagaacccccacaaaaaaaaa

SEQ ID NO: 534435 - DNA, 376 bp, Homo sapiens
  misc_feature (148)..(148): n is a, c, g, or t
tcctttggggcattaaccccctgcctccccccccccaaccctttggggtgcaaaaagctaactcacagtccaggtggtcccttagcatcccccattggtgcatcagagaggttttaaaacaggaagctaaagttttggggcatgctcnaagtgaaccggggtcaccccaaaccagggtaaaattttcccgtttacttttccccagagctatggctggaatcaaaggtttaaaaaatgtgagcctggcccccaaaagctttttataagcccccgtaatatcctgttagactcttcgaaatttttttccccccttttttttaatcaaaacttcagtgtcccaaataaagttggcaaaagggttcccttggaaatttta

SEQ ID NO: 534436 - DNA, 150 bp, Homo sapiens
  misc_feature (41)..(41): n is a, c, g, or t
gaaaggcaaaggcaaaggcggctcgggaatccagccgtgangcagtgcagatagatggccttgtggtattagagatactcacacattatcaagaagagggacacggacctgaagttgtacaaggagtgctttgggctggttgagagacgg

SEQ ID NO: 534437 - DNA, 297 bp, Homo sapiens
actagcaacttagatctttgattaagaggaccgacaatatgccacaccctgtgacgttagtacttgagacatgagagcgatgacacaacggggacataactgctgcctgcacatagtttacaatccagcaagcaaggggcaccgaacagcagctcgggcagcctgtgctgtggcctgcagagaattccaggtgacgccccagagggcctaggagaggatacccttcttagaacagccgtggctcgcccggaatcaccccactcaagaggccagacggagtcccagctggggtgacac

SEQ ID NO: 534438 - DNA, 230 bp, Homo sapiens
accgttgttaaaagtacaaaattcagctggccatggtgtgtagcacgccactatagacccagactacttggtaggcttaggtgcgaggattgcttggatctgggaggtcgatgctgcagtgaactgtgattgtgccagtgcattccagcctgggcaacagagcaagaccctgtctcaaaaaacaaaacaaaacaaaacaaaaactgatgcttctgaaggctgtgccggag

SEQ ID NO: 534439 - DNA, 115 bp, Homo sapiens
aaaaattggtcaagaaaaactgcgcagaatgtccgggccttctatgtcaagagccccatgggcaagccccagcgcctttgttaaggcacttttgcctaatttatattaccagtta

SEQ ID NO: 534440 - DNA, 280 bp, Homo sapiens
  misc_feature (17)..(17): n is a, c, g, or t
  misc_feature (205)..(205): n is a, c, g, or t
  misc_feature (228)..(228): n is a, c, g, or t
accctgtaacccctttnttttggccaatttctctcatttggaacagctgtatttacccaatacctgtaccccccattgtatctaggaggtaactagcttgcttttacaggcttgtaagtggaagggacttgccttgtctcagatgagactttggactgtggacttttgggttaatgctgaaatgagttaagactttggggaactnttgggaaggaatgattggttttnaaatgtgaggattatgaaatttggaggagcccagggaggaatgatatggttt

SEQ ID NO: 534441 - DNA, 2547 bp, Homo sapiens
  misc_feature (108)..(108): n is a, c, g, or t
  misc_feature (118)..(119): n is a, c, g, or t
  misc_feature (121)..(122): n is a, c, g, or t
  misc_feature (135)..(136): n is a, c, g, or t
  misc_feature (143)..(143): n is a, c, g, or t
  misc_feature (148)..(149): n is a, c, g, or t
  misc_feature (161)..(161): n is a, c, g, or t
  misc_feature (167)..(168): n is a, c, g, or t
  misc_feature (177)..(178): n is a, c, g, or t
  misc_feature (233)..(233): n is a, c, g, or t
  misc_feature (250)..(250): n is a, c, g, or t
agcgggctgggggcctggggctcggcgtcggtccccgggggatgtggagagctggcagcatgtcggccgagctgggagtcgggtgctgcattgcgggcggtgaacgangcgcgtgcanncnnggctgtggcgcgnncggccgnagggnntctcccagccantccagnncccggctanntggcggtcagcaaaaccaaacctgcagacatggtgatcgaggcctatggacatgnggcagcagcacttttgngcgagaactacgttcagggaactgctagaaaaagcatcaaatcccaaaattctgtctttgtgtcctgagatcaaatggcacttcattggccacctacagaaacaaaatgtcaacaaattgatggctgtccccaatctcttcatgctggaaacagtggattctgtgaagttggcagacaaagtgaacagttcctggcagagaaaaggttctcctgaaaggttaaaggttatggtccagattaacaccagcggagaaggagaggtaaacatggccttccaccttcagagaccatagccatcgtggagcacataaatcgccaagtgtcctaacctggagtttgtggggctgatgaccataggaagctttgggcatgatcttagtcaaggaccaaatccagacttccagctgttattgtccctccgggaggagctgtgtaaaaagctgaacatccctgctgaccaggttgagctgagcatgggcatgtccgcggatttccagcatgcggttgaagtaggatctacaaatgtccgaataggaagcacgatttttggagagcgggattactcaaagaaacccaccccggacaagtgcgcagcagacgtgaaggccccgctggaggtggcacaggagcactgagccagggaatactgagagcactaactatgcactaacctagattttcatttcgatattccctgtgtcccagcgcagtcctgctctcctgtgacctgtggagagcactaatgatcacgtgtgttgatggaaaccatctgtgcttagtctctgacataggaagcttgcttcaggcaatggctttggattgagtttgagaaattcaaacatttctgcagaacagataccaaatcaatagctaggaatcatgttcaatattgaattctgcccaggagcatgaactgatccatgaatgccttttccaggttaaaatttggtcactgatgcctataatcgtggaagtcagagggattcccctttttcatctcattttaataggaaaattccttatggttaacatctccctacaaactcctactacgtcgtctaaattgctgctctggaataaggtgatttctgcccccagattcttccctagccggtagatacgtgaagatattcccaactgtggaatggcagtgtaggtagcttcaggaaatggctcaggttaattctcaaaacacaaattgttgctggccaggcatggtgactcatgcctgtaatcccagcaatttgggagacagaggcggaaggatcacctgagcctaggagttcaagaccagcctcagcaacagcaggagccccaccccccgtctctacaaaaaaatttaaaaattaactgggcatggtggctgaggtggaagaatggaagaatcacttgagcccaggagtttgaggctgcagtgagctatgattgcaccactgtactcctgccttaaaaaaaaaaaaaaaatcccaatagtccatgaaggctttgatctctggggaagttcttcatagatgctgtcacatttcttaaagcaaccttttaatatgcagataataccccccaacttttttagagacagcctgtctcttaaaaaaaaaattaatttggtagtgagagcttgtgtcactgccactctgttttatccctgaaattaaaggataacataaggaggacttgggcctttctgacatcatcctgaagagacaggactttgcgtttttcctctgggacctacagtgatgagaatttaatgattatctcctccactataatcctctttagggtgattttttaaatcaaaacccagtgaatctcattactcctaagaaacgaaagattccttcaaagccttttcaggcacatggtttcaacaaagcctggctttgacattccttgtcctgaggagcactttccaggcatagttacagcttccccactgtatttacaagccagaattgtgcaactcttctggatcattaataaagtagcaagatcctcaaaaaacccaaaaacaccattctctaatagtcatgacaaatggcttcagtatggcttgttttttattttccagatggctttttctcttattttttgaagccccagtctttgattttacaggtaactttcaaaacatcatgatgctgccaaatgtacttttgtaaacttaaacattatgattcctgtattatttcagtgagagctacagtgtgatatttcagagtctattaaataaaaatgtgagtttgaattacaccatctgtgccaattacaaagcaattaaaagatttatttttta

SEQ ID NO: 534442 - DNA, 466 bp, Homo sapiens
ctctatctctacttcataactatcattctctttttatacctattagaaccagagtaagaaagaagcagtctggctactatacaacattcatgtggattctgttagagtagttcagcttccttaaaataagcatatatccactaacaaactaaatataaaagctaaacaagtgaaattgaagcagttttattgtacagatttggaagagtgcaggatgtttatcatagcacattattaatatttattattcttcctatgtagatatagaagagtgcacttatggtgcactcttctatatctaccatcatggccatggtccaagctggaggtagccgccaggattgccatgagcacctcagcgtgctttctcagcaggcagcttctgtggttaagcaggaagggggtgaccaatgacctcatagagcgtatccaggttgctgcctacttccgtcccattcactctcag

SEQ ID NO: 534443 - DNA, 2507 bp, Homo sapiens
  misc_feature (108)..(108): n is a, c, g, or t
  misc_feature (118)..(119): n is a, c, g, or t
  misc_feature (121)..(122): n is a, c, g, or t
  misc_feature (135)..(136): n is a, c, g, or t
  misc_feature (143)..(143): n is a, c, g, or t
  misc_feature (148)..(149): n is a, c, g, or t
  misc_feature (161)..(161): n is a, c, g, or t
  misc_feature (167)..(168): n is a, c, g, or t
  misc_feature (177)..(178): n is a, c, g, or t
  misc_feature (233)..(233): n is a, c, g, or t
  misc_feature (250)..(250): n is a, c, g, or t
agcgggctgggggcctggggctcggcgtcggtccccgggggatgtggagagctggcagcatgtcggccgagctgggagtcgggtgctgcattgcgggcggtgaacgangcgcgtgcanncnnggctgtggcgcgnncggccgnagggnntctcccagccantccagnncccggctanntggcggtcagcaaaaccaaacctgcagacatggtgatcgaggcctatggacatgnggcagcagcacttttgngcgagaactacgttcagggaactgctagaaaaagcatcaaatcccaaaattctgtctttgtgtcctgagatcaaatggcacttcattggccacctacagaaacaaaatgtcaacaaattgatggctgtccccaatctcttcatgctggaaacagtggattctgtgaagttggcagacaaagtgaacagttcctggcagagaaaaggttctcctgaaaggttaaaggttatggtccagattaacaccagcggagaaggagaggtaaacatggccttccaccttcagagaccatagccatcgtggagcacataaatcgccaagtgtcctaacctggagtttgtggggctgatgaccataggaagctttgggcatgatcttagtcaaggaccaaatccagacttccagctgttattgtccctccgggaggagctgtgtaaaaagctgaacatccctgctgaccaggttgagctgagcatgggcatgtccgcggatttccagcatgcggttgaagtaggatctacaaatgtccgaataggaagcacgatttttggagagcgggattactcaaagaaacccaccccggacaagtgcgcagcagacgtgaaggccccgctggaggtggcacaggagcactgagccagggaatactgagagcactaactatgcactaacctagattttcatttcgatattccctgtgtcccagcgcagtcctgctctcctgtgacctgtggagagcactaatgatcacgtgtgttgatggaaaccatctgtgcttagtctctgacataggaagcttgcttcaggcaatggctttggattgagtttgagaaattcaaacatttctgcagaacagataccaaatcaatagctaggaatcatgttcaatattgaattctgcccaggagcatgaactgatccatgaatgccttttccaggttaaaatttggtcactgatgcctataatcgtggaagtcagagggattcccctttttcatctcattttaataggaaaattccttatggttaacatctccctacaaactcctactacgtcgtctaaattgctgctctggaataaggtgatttctgcccccagattcttccctagccggtagatacgtgaagatattcccaactgtggaatggcagtgtaggtagcttcaggaaatggctcaggttaattctcaaaacacaaattgttgctggccaggcatggtgactcatgcctgtaatcccagcaatttgggagacagaggcggaaggatcacctgagcctaggagttcaagaccagcctcagcaacagcaggagccccaccccccgtctctacaaaaaaatttaaaaattaactgggcatggtggctgaggtggaagaatggaagaatcacttgagcccaggagtttgaggctgcagtgagctatgattgcaccactgtactcctgccttaaaaaaaaaaaaaaaatcccaatagtccatgaaggctttgatctctggggaagttcttcatagatgctgtcacatttcttaaagcaaccttttaatatgcagataataccccccaacttttttagagacagcctgtctcttaaaaaaaaaattaatttggtagtgagagcttgtgtcactgccactctgttttatccctgaaattaaaggataacataaggaggacttgggcctttctgacatcatcctgaagagacaggactttgcgtttttcctctgggacctacagtgatgagaatttaatgattatctcctccactataatcctctttagggtgattttttaaatcaaaacccagtgaatctcattactcctaagaaacgaaagattccttcaaagccttttcaggcacatggtttcaacaaagcctggctttgacattccttgtcctgaggagcactttccaggcatagttacagcttccccactgtatttacaagccagaattgtgcaactcttctggatcattaataaagtagcaagatcctcaaaaaacccaaaaacaccattctctaatagtcatgacaaatggcttcagtatggcttgttttttattttccagatggctttttctcttattttttgaagccccagtctttgattttacaggtaactttcaaaacatcatgatgctgccaaatgtacttttgtaaacttaaacattatgattcctgtattatttcagtgagagctacagtgtgatatttcagagtctattaaataaaaatgtgagtttgaattacacca

SEQ ID NO: 534444 - DNA, 262 bp, Homo sapiens
  misc_feature (128)..(128): n is a, c, g, or t
ttagctgggcaaggtagtatgtgcctctaatcccagctactcaggaggctgaagtgggagaatcacttgaacccgggaggtggaggttgcagtgagctgagatcatgcaactacactccagcctgggntggcagagggagaccccatctcaaaaaaaaaaggtatgtgtataaaaaaaaggaaaagtgtgtgtgttaaaccaatctaatggatgtccttgggaatttgggccgagaggagtgatatttaagggttaagaaga

SEQ ID NO: 534445 - DNA, 678 bp, Homo sapiens
cgatcttggcttactgtaacctccgcctcccgggttcaagtggttctccttcctcagcctcccaagtagctggaactacaggtgcatgccaccatgcccagctaatttttatatttttagcagagacggagtttcaccatgttggccaggagggtctcaatctcttgacctcatgatctgcccaccttggcctcccaaaatgctgggattagaggcgtgagccaccacacctggttgaaaaatacctttctttctttctttcttttttttttttttttttaagatggagtcttgctctgtcgcccaggctggagtgctgtggtgagatctctgctgactgcagcctctgcttccgggattcaagcgattctcctgcctcagcctcctgagtagctgggattacaggcacatgccaccacgcccaattaacttttgtatttttagtagagatggggtttcaccatgttggtcaggctggtctcaaacttctgacctcgtgatcctcctgccttggcctcccaaaatgctgggattacagccgtgaaccaccgtgcccggctgaaaaataccatttcttattcagttttatatactttaaaatttagaaccactttgaacccttttcttttccttttgctctttttctttttcttttctggcagggttttactcttgtca

SEQ ID NO: 534446 - DNA, 2607 bp, Homo sapiens
  misc_feature (108)..(108): n is a, c, g, or t
  misc_feature (118)..(119): n is a, c, g, or t
  misc_feature (121)..(122): n is a, c, g, or t
  misc_feature (135)..(136): n is a, c, g, or t
  misc_feature (143)..(143): n is a, c, g, or t
  misc_feature (148)..(149): n is a, c, g, or t
  misc_feature (161)..(161): n is a, c, g, or t
  misc_feature (167)..(168): n is a, c, g, or t
  misc_feature (177)..(178): n is a, c, g, or t
  misc_feature (233)..(233): n is a, c, g, or t
  misc_feature (250)..(250): n is a, c, g, or t
agcgggctgggggcctggggctcggcgtcggtccccgggggatgtggagagctggcagcatgtcggccgagctgggagtcgggtgctgcattgcgggcggtgaacgangcgcgtgcanncnnggctgtggcgcgnncggccgnagggnntctcccagccantccagnncccggctanntggcggtcagcaaaaccaaacctgcagacatggtgatcgaggcctatggacatgnggcagcagcacttttgngcgagaactacgttcagggaactgctagaaaaagcatcaaatcccaaaattctgtctttgtgtcctgagatcaaatggcacttcattggccacctacagaaacaaaatgtcaacaaattgatggctgtccccaatctcttcatgctggaaacagtggattctgtgaagttggcagacaaagtgaacagttcctggcagagaaaaggttctcctgaaaggttaaaggttatggtccagattaacaccagcggagaaggagaggtaaacatggccttccaccttcagagaccatagccatcgtggagcacataaatcgccaagtgtcctaacctggagtttgtggggctgatgaccataggaagctttgggcatgatcttagtcaaggaccaaatccagacttccagctgttattgtccctccgggaggagctgtgtaaaaagctgaacatccctgctgaccaggttgagctgagcatgggcatgtccgcggatttccagcatgcggttgaagtaggatctacaaatgtccgaataggaagcacgatttttggagagcgggattactcaaagaaacccaccccggacaagtgcgcagcagacgtgaaggccccgctggaggtggcacaggagcactgagccagggaatactgagagcactaactatgcactaacctagattttcatttcgatattccctgtgtcccagcgcagtcctgctctcctgtgacctgtggagagcactaatgatcacgtgtgttgatggaaaccatctgtgcttagtctctgacataggaagcttgcttcaggcaatggctttggattgagtttgagaaattcaaacatttctgcagaacagataccaaatcaatagctaggaatcatgttcaatattgaattctgcccaggagcatgaactgatccatgaatgccttttccaggttaaaatttggtcactgatgcctataatcgtggaagtcagagggattcccctttttcatctcattttaataggaaaattccttatggttaacatctccctacaaactcctactacgtcgtctaaattgctgctctggaataaggtgatttctgcccccagattcttccctagccggtagatacgtgaagatattcccaactgtggaatggcagtgtaggtagcttcaggaaatggctcaggttaattctcaaaacacaaattgttgctggccaggcatggtgactcatgcctgtaatcccagcaatttgggagacagaggcggaaggatcacctgagcctaggagttcaagaccagcctcagcaacagcaggagccccaccccccgtctctacaaaaaaatttaaaaattaactgggcatggtggctgaggtggaagaatggaagaatcacttgagcccaggagtttgaggctgcagtgagctatgattgcaccactgtactcctgccttaaaaaaaaaaaaaaaatcccaatagtccatgaaggctttgatctctggggaagttcttcatagatgctgtcacatttcttaaagcaaccttttaatatgcagataataccccccaacttttttagagacagcctgtctcttaaaaaaaaaattaatttggtagtgagagcttgtgtcactgccactctgttttatccctgaaattaaaggataacataaggaggacttgggcctttctgacatcatcctgaagagacaggactttgcgtttttcctctgggacctacagtgatgagaatttaatgattatctcctccactataatcctctttagggtgattttttaaatcaaaacccagtgaatctcattactcctaagaaacgaaagattccttcaaagccttttcaggcacatggtttcaacaaagcctggctttgacattccttgtcctgaggagcactttccaggcatagttacagcttccccactgtatttacaagccagaattgtgcaactcttctggatcattaataaagtagcaagatcctcaaaaaacccaaaaacaccattctctaatagtcatgacaaatggcttcagtatggcttgttttttattttccagatggctttttctcttattttttgaagccccagtctttgattttacaggtaactttcaaaacatcatgatgctgccaaatgtacttttgtaaacttaaacattatgattcctgtattatttcagtgagagctacagtgtgatatttcagagtctattaaataaaaatgtgagtttgaattacaccatctgtgccaattacaaagcaattaaaagatttattttttatgaaaaaaaaaaacacaaaacaacaaaaaattgtcggggcggccgtggcccaaagaatcc

SEQ ID NO: 534447 - DNA, 435 bp, Homo sapiens
gctcgacggctggagtgcagtgacaccatcttggctccctgaaacctccacctctcaggctcaagcgatcctcctgcctcagcatccctagtagctgggactacaggctaattttttgtagagaggttttgccatgctgcccaggctggtcttgaactcctgggctcaagcaatccttctgccttggcctcccaaagtgctgggattacaggcgtgacgaccgcacccggccccaagtgagatttacctgaagtatgcaaggctgattcaatgtttgaaaattaattaatataatccatcacatcagtaggctaaagaagaaaaatatgatcagattgatagaggccagttatttgacaaaattcaaaactcattcatgataaaaactctcagtaagctaggaatagacaacgtcctcaacctgataaaaaaaaa

SEQ ID NO: 534448 - DNA, 2578 bp, Homo sapiens
  misc_feature (108)..(108): n is a, c, g, or t
  misc_feature (118)..(119): n is a, c, g, or t
  misc_feature (121)..(122): n is a, c, g, or t
  misc_feature (135)..(136): n is a, c, g, or t
  misc_feature (143)..(143): n is a, c, g, or t
  misc_feature (148)..(149): n is a, c, g, or t
  misc_feature (161)..(161): n is a, c, g, or t
  misc_feature (167)..(168): n is a, c, g, or t
  misc_feature (177)..(178): n is a, c, g, or t
  misc_feature (233)..(233): n is a, c, g, or t
  misc_feature (250)..(250): n is a, c, g, or t
agcgggctgggggcctggggctcggcgtcggtccccgggggatgtggagagctggcagcatgtcggccgagctgggagtcgggtgctgcattgcgggcggtgaacgangcgcgtgcanncnnggctgtggcgcgnncggccgnagggnntctcccagccantccagnncccggctanntggcggtcagcaaaaccaaacctgcagacatggtgatcgaggcctatggacatgnggcagcagcacttttgngcgagaactacgttcagggaactgctagaaaaagcatcaaatcccaaaattctgtctttgtgtcctgagatcaaatggcacttcattggccacctacagaaacaaaatgtcaacaaattgatggctgtccccaatctcttcatgctggaaacagtggattctgtgaagttggcagacaaagtgaacagttcctggcagagaaaaggttctcctgaaaggttaaaggttatggtccagattaacaccagcggagaagagatatacctgttttctgtttctcttcttgagagaggtaaacatggccttccaccttcagagaccatagccatcgtggagcacataaatcgccaagtgtcctaacctggagtttgtggggctgatgaccataggaagctttgggcatgatcttagtcaaggaccaaatccagacttccagctgttattgtccctccgggaggagctgtgtaaaaagctgaacatccctgctgaccaggttgagctgagcatgggcatgtccgcggatttccagcatgcggttgaagtaggatctacaaatgtccgaataggaagcacgatttttggagagcgggattactcaaagaaacccaccccggacaagtgcgcagcagacgtgaaggccccgctggaggtggcacaggagcactgagccagggaatactgagagcactaactatgcactaacctagattttcatttcgatattccctgtgtcccagcgcagtcctgctctcctgtgacctgtggagagcactaatgatcacgtgtgttgatggaaaccatctgtgcttagtctctgacataggaagcttgcttcaggcaatggctttggattgagtttgagaaattcaaacatttctgcagaacagataccaaatcaatagctaggaatcatgttcaatattgaattctgcccaggagcatgaactgatccatgaatgccttttccaggttaaaatttggtcactgatgcctataatcgtggaagtcagagggattcccctttttcatctcattttaataggaaaattccttatggttaacatctccctacaaactcctactacgtcgtctaaattgctgctctggaataaggtgatttctgcccccagattcttccctagccggtagatacgtgaagatattcccaactgtggaatggcagtgtaggtagcttcaggaaatggctcaggttaattctcaaaacacaaattgttgctggccaggcatggtgactcatgcctgtaatcccagcaatttgggagacagaggcggaaggatcacctgagcctaggagttcaagaccagcctcagcaacagcaggagccccaccccccgtctctacaaaaaaatttaaaaattaactgggcatggtggctgaggtggaagaatggaagaatcacttgagcccaggagtttgaggctgcagtgagctatgattgcaccactgtactcctgccttaaaaaaaaaaaaaaaatcccaatagtccatgaaggctttgatctctggggaagttcttcatagatgctgtcacatttcttaaagcaaccttttaatatgcagataataccccccaacttttttagagacagcctgtctcttaaaaaaaaaattaatttggtagtgagagcttgtgtcactgccactctgttttatccctgaaattaaaggataacataaggaggacttgggcctttctgacatcatcctgaagagacaggactttgcgtttttcctctgggacctacagtgatgagaatttaatgattatctcctccactataatcctctttagggtgattttttaaatcaaaacccagtgaatctcattactcctaagaaacgaaagattccttcaaagccttttcaggcacatggtttcaacaaagcctggctttgacattccttgtcctgaggagcactttccaggcatagttacagcttccccactgtatttacaagccagaattgtgcaactcttctggatcattaataaagtagcaagatcctcaaaaaacccaaaaacaccattctctaatagtcatgacaaatggcttcagtatggcttgttttttattttccagatggctttttctcttattttttgaagccccagtctttgattttacaggtaactttcaaaacatcatgatgctgccaaatgtacttttgtaaacttaaacattatgattcctgtattatttcagtgagagctacagtgtgatatttcagagtctattaaataaaaatgtgagtttgaattacaccatctgtgccaattacaaagcaattaaaagatttatttttta

SEQ ID NO: 534449 - DNA, 106 bp, Homo sapiens
taaatgggaagacataccacgtagggagaacagtggcagaaggaatatctcgcgtgccatatatgctacctgcacatgcttatgtgaggccagcgtgcttgcggct

SEQ ID NO: 534450 - DNA, 2492 bp, Homo sapiens
  misc_feature (108)..(108): n is a, c, g, or t
  misc_feature (118)..(119): n is a, c, g, or t
  misc_feature (121)..(122): n is a, c, g, or t
  misc_feature (135)..(136): n is a, c, g, or t
  misc_feature (143)..(143): n is a, c, g, or t
  misc_feature (148)..(149): n is a, c, g, or t
  misc_feature (161)..(161): n is a, c, g, or t
  misc_feature (167)..(168): n is a, c, g, or t
  misc_feature (177)..(178): n is a, c, g, or t
  misc_feature (233)..(233): n is a, c, g, or t
  misc_feature (250)..(250): n is a, c, g, or t
agcgggctgggggcctggggctcggcgtcggtccccgggggatgtggagagctggcagcatgtcggccgagctgggagtcgggtgctgcattgcgggcggtgaacgangcgcgtgcanncnnggctgtggcgcgnncggccgnagggnntctcccagccantccagnncccggctanntggcggtcagcaaaaccaaacctgcagacatggtgatcgaggcctatggacatgnggcagcagcacttttgngcgagaactacgttcagggaactgctagaaaaagcatcaaatcccaaaattctgtctttgtgtcctgagatcaaatggcacttcattggccacctacagaaacaaaatgtcaacaaattgatggctgtccccaatctcttcatgctggaaacagtggattctgtgaagttggcagacaaagtgaacagttcctggcagagaaaaggttctcctgaaaggttaaaggttatggtccagattaacaccagcggagaaggagaggtaaacatggccttccaccttcagagaccatagccatcgtggagcacataaatcgccaagtgtcctaacctggagtttgtggggctgatgaccataggaagctttgggcatgatcttagtcaaggaccaaatccagacttccagctgttattgtccctccgggaggagctgtgtaaaaagctgaacatccctgctgaccaggttgagctgagcatgggcatgtccgcggatttccagcatgcggttgaagtaggatctacaaatgtccgaataggaagcacgatttttggagagcgggattactcaaagaaacccaccccggacaagtgcgcagcagacgtgaaggccccgctggaggtggcacaggagcactgagccagggaatactgagagcactaactatgcactaacctagattttcatttcgatattccctgtgtcccagcgcagtcctgctctcctgtgacctgtggagagcactaatgatcacgtgtgttgatggaaaccatctgtgcttagtctctgacataggaagcttgcttcaggcaatggctttggattgagtttgagaaattcaaacatttctgcagaacagataccaaatcaatagctaggaatcatgttcaatattgaattctgcccaggagcatgaactgatccatgaatgccttttccaggttaaaatttggtcactgatgcctataatcgtggaagtcagagggattcccctttttcatctcattttaataggaaaattccttatggttaacatctccctacaaactcctactacgtcgtctaaattgctgctctggaataaggtgatttctgcccccagattcttccctagccggtagatacgtgaagatattcccaactgtggaatggcagtgtaggtagcttcaggaaatggctcaggttaattctcaaaacacaaattgttgctggccaggcatggtgactcatgcctgtaatcccagcaatttgggagacagaggcggaaggatcacctgagcctaggagttcaagaccagcctcagcaacagcaggagccccaccccccgtctctacaaaaaaatttaaaaattaactgggcatggtggctgaggtggaagaatggaagaatcacttgagcccaggagtttgaggctgcagtgagctatgattgcaccactgtactcctgccttaaaaaaaaaagctgtcacatttcttaaagcaaccttttaatatgcagataataccccccaacttttttagagacagcctgtctcttaaaaaaaaaattaatttggtagtgagagcttgtgtcactgccactctgttttatccctgaaattaaaggataacataaggaggacttgggcctttctgacatcatcctgaagagacaggactttgcgtttttcctctgggacctacagtgatgagaatttaatgattatctcctccactataatcctctttagggtgattttttaaatcaaaacccagtgaatctcattactcctaagaaacgaaagattccttcaaagccttttcaggcacatggtttcaacaaagcctggctttgacattccttgtcctgaggagcactttccaggcatagttacagcttccccactgtatttacaagccagaattgtgcaactcttctggatcattaataaagtagcaagatcctcaaaaaacccaaaaacaccattctctaatagtcatgacaaatggcttcagtatggcttgttttttattttccagatggctttttctcttattttttgaagccccagtctttgattttacaggtaactttcaaaacatcatgatgctgccaaatgtacttttgtaaacttaaacattatgattcctgtattatttcagtgagagctacagtgtgatatttcagagtctattaaataaaaatgtgagtttgaattacaccatctgtgccaattacaaagcaattaaaagatttatttttta

SEQ ID NO: 534451 - DNA, 362 bp, Homo sapiens
aaagggttttttttcctccaaaccccctggcctttcagtttttaaatatttccctccaggccaaaaagtttttttttaggaaggaaaggaaaggggggcaataaagcctttgatttggaattggacatttttttgtcaaagcacaaaggagggtcaaatcaccttttccctttcctaattggcccaggtggttggaggaccgaccccatggttgaaaatattacggcaaaaggaacaaagtttgctccaagtgggaaagggtcccaaacagtccaaaaaaaaagtttgtgggggtttccctccctgcctcccccagctcccccactggcctttgtaaaaaaaagggggggttttttttgtga

SEQ ID NO: 534452 - DNA, 1730 bp, Homo sapiens
actcttgagggaaaaactagggccagagcagcccgaagactcccctggggtggtcacatgggcacaaaagccagggaatactgagagcactaactatgcactaacctagattttcatttcgatattccctgtgtcccagcgcagtcctgctctcctgtgacctgtggagagcactaatgatcacgtgtgttgatggaaaccatctgtgcttagtctctgacataggaagcttgcttcaggcaatggctttggattgagtttgagaaattcaaacatttctgcagaacagataccaaatcaatagctaggaatcatgttcaatattgaattctgcccaggagcatgaactgatccatgaatgccttttccaggttaaaatttggtcactgatgcctataatcgtggaagtcagagggattcccctttttcatctcattttaataggaaaattccttatggttaacatctccctacaaactcctactacgtcgtctaaattgctgctctggaataaggtgatttctgcccccagattcttccctagccggtagatacgtgaagatattcccaactgtggaatggcagtgtaggtagcttcaggaaatggctcaggttaattctcaaaacacaaattgttgctggccaggcatggtgactcatgcctgtaatcccagcaatttgggagacagaggcggaaggatcacctgagcctaggagttcaagaccagcctcagcaacagcaggagccccaccccccgtctctacaaaaaaatttaaaaattaactgggcatggtggctgaggtggaagaatggaagaatcacttgagcccaggagtttgaggctgcagtgagctatgattgcaccactgtactcctgccttaaaaaaaaaaaaaaaatcccaatagtccatgaaggctttgatctctggggaagttcttcatagatgctgtcacatttcttaaagcaaccttttaatatgcagataataccccccaacttttttagagacagcctgtctcttaaaaaaaaaattaatttggtagtgagagcttgtgtcactgccactctgttttatccctgaaattaaaggataacataaggaggacttgggcctttctgacatcatcctgaagagacaggactttgcgtttttcctctgggacctacagtgatgagaatttaatgattatctcctccactataatcctctttagggtgattttttaaatcaaaacccagtgaatctcattactcctaagaaacgaaagattccttcaaagccttttcaggcacatggtttcaacaaagcctggctttgacattccttgtcctgaggagcactttccaggcatagttacagcttccccactgtatttacaagccagaattgtgcaactcttctggatcattaataaagtagcaagatcctcaaaaaacccaaaaacaccattctctaatagtcatgacaaatggcttcagtatggcttgttttttattttccagatggctttttctcttattttttgaagccccagtctttgattttacaggtaactttcaaaacatcatgatgctgccaaatgtacttttgtaaacttaaacattatgattcctgtattatttcagtgagagctacagtgtgatatttcagagtctattaaataaaaatgtgagtttgaattacaccatctgtgccaattacaaagcaattaaaagatttatttttta

SEQ ID NO: 534453 - DNA, 103 bp, Homo sapiens
ccttttatatgggtcttcactctgactagaatttagtctctgttgtcagcacagtttaatctctattggctagttccccttgacgactctcatcttgttgcgc

SEQ ID NO: 534454 - DNA, 150 bp, Homo sapiens
aaggaagttaagaaggagagaagaggaagtgaaaaggaagaaaggaccccaaaagaataagctccctaaagacgcaaagaaatcatctactcctctgtctgaagcaaaaaaaccagctgctttaaaaccaaaagtacccaagaaggaaga

SEQ ID NO: 534455 - DNA, 1293 bp, Homo sapiens
  misc_feature (108)..(108): n is a, c, g, or t
  misc_feature (118)..(119): n is a, c, g, or t
  misc_feature (121)..(122): n is a, c, g, or t
  misc_feature (135)..(136): n is a, c, g, or t
  misc_feature (143)..(143): n is a, c, g, or t
  misc_feature (148)..(149): n is a, c, g, or t
  misc_feature (161)..(161): n is a, c, g, or t
  misc_feature (167)..(168): n is a, c, g, or t
  misc_feature (177)..(178): n is a, c, g, or t
  misc_feature (233)..(233): n is a, c, g, or t
  misc_feature (250)..(250): n is a, c, g, or t
agcgggctgggggcctggggctcggcgtcggtccccgggggatgtggagagctggcagcatgtcggccgagctgggagtcgggtgctgcattgcgggcggtgaacgangcgcgtgcanncnnggctgtggcgcgnncggccgnagggnntctcccagccantccagnncccggctanntggcggtcagcaaaaccaaacctgcagacatggtgatcgaggcctatggacatgnggcagcagcacttttgngcgagaactacgttcagggaactgctagaaaaagcatcaaatcccaaaattctgtctttgtgtcctgagatcaaatggcacttcattggccacctacagaaacaaaatgtcaacaaattgatggctgtccccaatctcttcatgctggaaacagtggattctgtgaagttggcagacaaagtgaacagttcctggcagagaaaaggttctcctgaaaggttaaaggttatggtccagattaacaccagcggagaaggagaggtaaacatggccttccaccttcagagaccatagccatcgtggagcacataaatcgccaagtgtcctaacctggagtttgtggggctgatgaccataggaagctttgggcatgatcttagtcaaggaccaaatccagacttccagctgttattgtccctccgggaggagctgtgtaaaaagctgaacatccctgctgaccaggttgagctgagcatgggcatgtccgcggatttccagcatgcggttgaagtaggatctacaaatgtccgaataggaagcacgatttttggagagcgggattactcaaagaaacccaccccggacaagtgcgcagcagacgtgaaggccccgctggaggtggcacaggagcactgagccagggaatactgagagcactaactatgcactaacctagattttcatttcgatattccctgtgtcccagcgcagtcctgctctcctgtgacctgtggagagcactaatgatcacgtgtgttgatggaaaccatctgtgcttagtctctgacataggaagcttgcttcaggcaatggctttggattgagtttgagaaattcaaacatttctgcagaacagataccaaatcaatagctaggaatcatgttcaatattgaattctgcccaggagcaagcttcctatgtcagagactaagcacagatggtttccatcaacacacgtgatcattagtgctctccacaggtcacaggagagcagtactgcgctgggacacatgtcgacgcggccgctaatttagtagtagta

SEQ ID NO: 534456 - DNA, 989 bp, Homo sapiens
  misc_feature (243)..(243): n is a, c, g, or t
  misc_feature (608)..(608): n is a, c, g, or t
  misc_feature (664)..(664): n is a, c, g, or t
ggagagaactagtctcgagttttttattatttttttttggagtcatgtgcgcctttataagctgagccattacttgaaagggataaagcggaaggagtgggtggccccgaatgccgggccggcaatgcttaacgggcttgtaggtaatgagaaaactcgcccaggtatgtggccagatcatctcgggcttagatctccaccgggttagaagggtcttgcctgttgtaaacgcccaccatgctngcccaccatctcggtgtagagatagatcattgtcccagacaggtgcgtcttcaccatttccggttctccacagggagcggggcctccattttctggagctcttgcgccaggcgcttacagaaggaatgtagctagtttcccgccagaagggccccggttacaagccgagccagccgtttggtcacccgacatcttgtacagtttgactctcaagctagtctcgatagagactttgtccagccagtcttgtgtacagagggtccaagcacacacgtggataagggtcgaaattttgcgcggaaaaagggtacccgaattattacatatactggactcataatcttctgggcccttttcttgttganaaaaaccccaatgccctaggaaacccccctaaaacagtgggcgccccctttaaatnctctccgtaaaaaactctagaactctttatctagcaaaaagaggtctattatcacccttaaagagcacaaatttttcccacacgagacaccaccaaaatttctcaacccttccacattgatatcacctttcagaccgccaaaaagagggcgccacataatcttaaacaccttttaaaacctatcccactctactcgtatcactttctttccccccaacattcattctaaatagaacccataaatctcctataaattcacatataataccactattatttcccccccgaaagaaacactcctcaaactctacccaatatctttgtc

SEQ ID NO: 534457 - DNA, 1131 bp, Homo sapiens
acccccaatgagtctagcctactattcactgctttgtgtgcatgtaatttctccctctgttaagagacagaccctcttaacaagcaaaaaacaagacagtagcatagtgcataaactattgtcagcttcatgtaacactcgggtctaggatcgagctgggggtacaagtccccgaaatgaccttcgtggtaacaggtagccagggtacgttggaattctcggtcaacgcggttcactgttctacacggttcaggaatggcgtaccgggacaagaggtgatagccagcggatatttaagacctccttttatacccgtgtcgtccgcgtgtccactgttcgtgcagcatcgtcaacatttccaatcataatcacccagggggatttatatcaacaagcaccaactgctgcaacgtgttacaccaagggaaagctccaactgtgggccaacctcatgaacgactattcaatggcatatctcaacaggctcaataggacaggtggcctcaagagacttgtggacaggcgtcatagaaatgtgccaatgtcacgcagaaggagaaccaaaaggcacgaccaagagagtataattggacccgtgtaacaacttttgggcacgccgtcggtatagtttatacgccccctatggacgtggaatacaaggtgtggaacctatggaaaaaaggttcaccccggggacaaataatgtcaccccaacgtggtggctcccgatatccccccattccgacattgtacgtggatcacgttatcgcaatgtggatggttgggtagggacaaacccggggctggatcccgctgccggatataagcaaccctagggaggaaataccccaaacaggacggccccaggtacagtaatgcacgtccaccatttccaaccaatttactctcccaaaggtttgcccagagctaacaccatttattgtcagtgcaaagtgcccaagaggtttgggacaatgtcgatcttaggggggcaacatatcccataaggaagcaaaatagatgttatgacccaaagagtacttgtacagcattgtggaacgaaggggataagtaggcggaaaggatggtgtaataatcaaaagaaagattggaaaacaagcaatgagtagc

SEQ ID NO: 534458 - DNA, 1578 bp, Homo sapiens
aagggccacctggaaccttaatatcggtggtgtacatcgtgcgcagcgcgactactacaaggccactggcgccagcagtaaatcctgaacgggaaggagatctccgcgcaaataagggcgagactgaaaaatcaagtcactcagttgaatggagcaagctacctggcttctcacaccacgcctggcaactattacaggttggtcaacacgagaatgattccagatctgttactataaagtgtgaacgctgacaggctgctgcaaggagattgggatcaaagccacctcacacttaaggttaccaagaacaaccagcactgaatctgacggctgactgaaggctacagttacagtcttctgaactgacagacctcctacctgctacacgtgggatacccttacgtgcacgcctacccatcttagaaacttgcacgcacgcacactatcccagtgtaagccactgaacgacaagtgcactcagacctgccgtactctgccatccgcagcacaacacgcgacctgcgtgcgcactgcgcactctgcacctacggcactccaaatgcgctaggcgcaacaccatcgtggccttagcacgggatgtaccctctcaatacatgcacccctgatagtatcactctacccactttggcctaacctgccataaacgcgcgcacctgacctgtcgggcaaaccgatctaatcgacaaacgcaggaccacagagcagattgtccgcgaatttttgcacagcgaaaaggcgcacactggccacgctgagcaatggataagggacgcccgccaaggaatacgacacactaaggctacggcaggagccaaccgcaatagacaaatggaaccctaggaccatattcccagcatagccaaacccaaactgccacaaccacgctgcaaccccaaacacatagcgccagcactcacaaaactgcacgctggccccctcagttccattggggcacttgtcaacgcgacaggggttaatcacgcttaacacaggagggttagcaatccaattatcccatggtgctcgcgcctgttgcctcacaccccttgggcctctacaaggcacctttcgctacgacatctggcgtaataaaacgcagcgcccaagctctgtggacttctcacccacgccccttaggcccggcgcccacacgcaagcattcacatcccgaacactctggtcagagacacactccaacgctacacatggctcacccacagcaaccgtgaaatgtaccacaaaaacccgcacacacgggggcaccacaacaacacgcaccgcaccgacacgaaaacgaagggacacaatctaacggaaacgcccgcgggcgccaagcacgcaacacatcgggcgtgaagcacgcaaacgcaagccaccaccgcgcaacaaccagcgacacgcacacaaatcaacaaccacgaactcaacacacgcgcgcaacacgcggccgcccaccccgcaacaccgacaacaccaagcgacgaccgaagtagcaagcaccctaccaccagcgcacaacaaacaccaccgacataccgcacaccaggccacaagacc

SEQ ID NO: 534459 - DNA, 183 bp, Homo sapiens
atgcctagtgcgcgtgtccgggtggagccgccgcagtgtgcaggtcttggtgggtcgtacgcagatattcgacacgagaactttgaagggccgctgcgggtgagcctctgaatcctagatgcgcggtgcccgggttggagcgcgccgtcaggtgcagactcttggcgggtcgtagcaagatat

SEQ ID NO: 534460 - DNA, 347 bp, Homo sapiens
  misc_feature (30)..(30): n is a, c, g, or t
gtattctaaagaaggcattactatcacagnagatgacaacctccatgcgtgttattgcccctgaagacctttcagtgggatacagtgtggaggtggaagacagtgatactgatgatcctgaccctgtgtagacctatgctaatgtgtgcttgtgtcttagtttttcacaaaaaaggtttaaaaataaaaatacaaaagaataaaaaaggttatagaataaggatataaagaaagaaaatacttttgtacagctgtataagtgtttgtgttttaaattaagtgttattacaaaggagcaatagagttttcacaaattaaaaagttaataaatattaacagtcactgta

SEQ ID NO: 534461 - DNA, 855 bp, Homo sapiens
ccaacttcagtaatcggctggatagctctaaagtcgcaagaacgagtacgtagaatgtgaggccctactggttagcctttttgaagacaccaacctagtgtgccatccatgccaaacgtggtaacaattatgccaaaagacatgcagctagcacgccgcatacgtggagaacgtgcttaagaatacagtatgatagggaaacgtttcattctcaaaaaaaacaaagaacccctcttcttccggtaagtgggcgttatgaacgttagatattgtcttcccatggggttacatggtacctaaccctgtgattgcgagtggaagaatagtggacagaaatcaagtataggcagttttggccaatctcatttgtgtgtaaatcctgaaatcaagcgaggacacgttgaccattacggcattgaaaaatgttatatgggacttgttgggaggtgtaacctttaataaaggaattattaccacttgtaaggtgttcgcgctagcagcgcgctttgggatttttttataaattcaaccgatatactagtcgatgcgcatgatctggaagcatgtagcagtgttatacatccacgtcaccaacaagaatttaccattggtatataactgagatggagcacgtggatgttccttatggtagatgtataaagctagtgcggtggagagagaattttatattcgatgacgctcccactctacactatcgtgcgtgtgcgcttggtcgggttgtgggattcagtctttttatacagctcgcccgtgcggtggggcagcaagtggagctgaatacttgatgctttgactgcgcgacgagattagttactatttatatggttgagtggt

SEQ ID NO: 534462 - DNA, 149 bp, Homo sapiens
gccggcgctgaacccacggccctctgaacggagagagatgagtaatggggccggacagctattgggcccctccctgaagcaacagtgaagccaggaacatgccccaagcaggcagggagagccacatctgccctgtgcctatagccagc

SEQ ID NO: 534463 - DNA, 153 bp, Homo sapiens
aggtgacatattctctatatatcagaacttagcagagagccctttaccgagtcgccccgggcctcccaagcagctcagctcttcctactgaaagcactgacggagtggtagttagctacatccctgagtgtcggctgacggccgctggtgatc

SEQ ID NO: 534464 - DNA, 796 bp, Homo sapiens
ccgtggcccatgaccaactttttcagactctatcaacccagccatcaccacctcagtctgaaaccacactcctaaaaagggcagaagagatacacgatgaggaatcgatctacgaggagctcccaaccccaccattttgtcaggacctccagtgctgtagagagaaggcagaaccacgcccatggcctttctcgccaagaaagggtacccgcatgaccagctccacccaaccatggcccgccagcccccgaggccatgggcagaccgcgagacaacccaggacgcaggaagaaggaagcccacaaggcgaccagagcccacccccaccggagaaccctggccgaccgccagaggagccaaggcatgatccccatcctgagacctggtgcagggccccgtggggaggcagcggcacccagactcacccaggccgtgctcccactcgcctggggcctcctcacctaggggcccccagttcactcaacccctcacagcctcagctttgcacgcccctgagaaggccgcctctcactctaccacgccacgccactgagcgccttcctgcacgacaccacccgtgccttatgccccacgccgaagaatccgctggggccggcagcacggcacccttccccccgctgcgctagcgggaaagagatggggatggagtcccacaggcacagcgcccccaacctcgggccaccagacaccccttcccctttaccctggaccgccggaaacctgtatattccaaaaccccaaaagtcctgctaataaaatttttgacccctttcca

SEQ ID NO: 534465 - DNA, 358 bp, Homo sapiens
gaagccgggcgataaatgcacgtcagttaataggcggtggtagtactcctgctaaatattatagctcagtttatccgaatggtgtaactctgagttccgcatttagcaaaatttccagtacctttgtcacaatcctaagacattatcgggagcagtgtcttccataagtgtataaagaagcaaggtagttttgacctaccacagtgtctgtatcggagacagtgatctccatatgttacactaagggtgtaagtaattatcgggaacagtgtgtcccataattttcttcatgcaatgacatcttcaaagcttgcagatcgttagtatctaacatgtatcccaaacccgaacacggata

SEQ ID NO: 534466 - DNA, 184 bp, Homo sapiens
  misc_feature (5)..(5): n is a, c, g, or t
atatnatgagtctagatacagaagccctgctcaaaagatacaatttttctcataaaaataaaccaaattaggccgggtgcagtggctcacacctgtatccccaggggccactattggggaggcagaagtggggtggatcacccggagtgtcaggagtttgagaccaggctgccaacatggtgaa

SEQ ID NO: 534467 - DNA, 337 bp, Homo sapiens
ccagattcatgcttcttgaaaccggggtgtgtgtggctcagcttccacggcgtgtattggttcggtctatgtgtgtgcgtgtgtatacttcaatgagaactgtcgtgtctgataagcactattggaggaggactaaagttgcctgatcaactattatgtagttatgccatgaactctgagggacaactgctgacaaacaaagggtttcaggatgacatttctgaccatttgtgtgtaagttgttgtaactagtattgtgtagatacttttaatgtaaacccatacagctttggaaaggggaagtctcaaacaggtgataggtcttactctctctaga

SEQ ID NO: 534468 - DNA, 1179 bp, Homo sapiens
  misc_feature (383)..(383): n is a, c, g, or t
tgacaacgccgctcccagccggccctggttgcgtccacgtcctgaacaagagccgcttccggatggctcttcccaagggaggaggagctcaatgtgtcgggaactgtctaacttcaggttgtgtgagtgcgttaaagaaaagaaaaaaaaaaaaggaattcccttatagccgtcattgtggtattgtttctaaaagtggcggtgagtgtttgtactgaaatgggtgtccattttttgtaggcgtacttaggatattgggcagaaaaagaaccattttccactagtgcaaagtttcttttagcacgctcagtgtgagaacattccagacctcttcattacccttcgatgtggggtcctcgctctttatagattgtggacccaanaaacctgttcccagttttattcttctgtaaagcatcacagaagccgaaatcgtggtggtctcgtgagcaaaccttatttccccggaaacgaccaccaggccttctcagtgtgccaagacaacgctgtgaacccgtgagagtatattctcaccaagtgtgtgccgaggcacacaagcgtgctgtggggcccaacaaccgaaagggctacccaaagggctcccggggaccaacctgtgtccacgcggcaagcaagagggcccaagactgtgaaaggtgtgggtgagaaggggaaggccccctgtgaagggtctccagcgggaccgtctctttgcgggatctcgacgggggcgtggcccacgggtgttgttttcacaggcccactgtggggggcctagtgggccgtctccgcaaggggcttttccccatgtggaggggttggcgggtcaagtggccccagttcttttccactttccgtgagacgaagggccactggggcgcgcaccatttaacccatgtgtgcggcccatgtgatgattgactggaacttatgggggttgtaccaacaaaatcccctcgggtgtgtgtatttcaccaaatgggggtcgtagtaccaacagaattcacggttcgaccaaataagggtgaaagaaacccatccgccgaaagaaacgccgctttttctccacaagaggacacacgtggggcacccgggggcgcacaaaactgagttgctgcacttcggtctcgcccggttaactgtgcaccagcgcacacttctccacggcttggtcgtaag

SEQ ID NO: 534469 - DNA, 274 bp, Homo sapiens
tgcggggctgccgacctcgggggggtcctaggacagcagcatgttgacagcaggccagagccttcagtgcgctgaatgagagggtgagctgtatgaccgccctgagaggttccttcctggggcctcgtgtacatggtctctatctatatgtccccacatcccatctcagggtctgctcaccaagtgtggccagataccgccaaagtgcccgcaatcattgctgtgacccggtcccgggtcacatggcaagggtatgggccccgatacatgccag

SEQ ID NO: 534470 - DNA, 968 bp, Homo sapiens
  misc_feature (148)..(148): n is a, c, g, or t
gacagatcctgcggtgagactactggtatgccctaggaatcttggccaggcagggctcaagtatagtgtctatgctaaaccaatatatttacagaaaaggtgtctagctcgtacttatacgtaaataatcgcgctgcatagatctacngtgtatattatatactacttcactaggaaccccatgtacagtaaaatactagtatacagatgatacatgtacttcgaccactactttaatactcaatgtggggatcatacgccccgagtgagaggcaaatcgagacacggaatcgccttgaaaccgctaaggctaacatcactatgcgctagtatcttacggccctaattcaaggacttcccatatcacgcactgagtgctactcgtctactggaatgtatgacgtgacagcacacaatctgtactgactctatctaaaaggaattcattgctagaacgatctcgtgcagtggtggcgatagaatgttatctaggacttgcgcgtggacgcacaatcgcacatataatatagatcttagttgaaccaatacatgagacttattgatcgtgactggattgccgtgcttgacgagagacccaattgcattgaacgtgcccttaatggaacgcgcgtgcagaaggccccccatacagactagaggatcaccggatgaacgtccgtcggcaagggagtgcttaacatttaaggcagtgggaatggtaattatcatgggctcggcattgctcttaatctaacacacgataggacaacatgactattaggcgaaagcgggtttcaggtgggtatttagtgggtactgaaagcatgagatggatagaacaaggggtaatgtggactagggaatcattaagaccttgatatcgagtctggtggcatttgggcttgcaaatggggggtaggaaggggaaagggttgaagtaacagtcaatgggaaggggaaagaaaaag

SEQ ID NO: 534471 - DNA, 331 bp, Homo sapiens
atgttgcgcacgttctgttttctgtgccgcaggacgcgataactgccctgtctgtttcccgtgcggtcaacccttgtcccattgcgcccggacacctcgcctgtttcgtgcgctgctgctatcccgatgctctggtcatgttgcgccggcggtgtactggcccccgtttttgacgcaacggcggagccggtggcaaaaaccaccatggcgcaagccgcgccgatactcagggattggaaggacttcatgacgatgccgtgggagaaagggagaaaacaagggagagaacaggttcaaagccatgatctcaccagccccacgtggcgtctgt

SEQ ID NO: 534472 - DNA, 567 bp, Homo sapiens
ttctttctgtagatggggaaactgaggcaggcttgcccatggtgaagtggccagtcggacacagggccagattgaaacctgcagcctgggctcccggctacaacagcgccagcctccacaggcattagaaggggactcactgcgagggccccagccagggcagctttcagggtggggtctctggcctcaccctggggaaacagccggggcgctggctgcctcctgctgagcctggcgtgggaacaatgtggcctctatccctggagcgagccaggccgcctggacgcccagcccttcagagcagcccggccaggcaggcgcccacagcatggcgcccgggccgcgctgtccgtccacggggtgcgggcgccttggccaggcccaggcaagccgctccccgtgtcctccctggctggccactgagtggccagacgccggcttcctcctccctctcccgcccggccagcctcctccttttttggtggtgggtttgggggcccagcccacccgccactgccacgtctgccatcctcccgcacccacgagcatctttcaaaaattcccggt

SEQ ID NO: 534473 - DNA, 132 bp, Homo sapiens
tctcatatcgcaaggccagcagttgtgtaaggcagcggacatgtgcaagataagtgtggtgggaagactaaccacgctcacgaattattaaaaacgctacgtgcccctacttggccttcccatatgctaggc

SEQ ID NO: 534474 - DNA, 376 bp, Homo sapiens
  misc_feature (216)..(216): n is a, c, g, or t
attttaatatcttactaatctctataggggaggtgtgaaacctctgttctgtgtcgagttgcctattgttttgaggcctttatgaaaaatcagatgattcatatttaggatggtctaaagatacatttaaatccaaacaccacccacaaaaaaactcagcaggtaaaatacatagagtagccataaacttaaaaaaaaattatctcaccaagatancaaagtgcagaatttattggtttgtatcaacctccttgagggcagagcagtttttacagcctcctccttttttggtggtgggtttgggggcccagcccacccgccactgccacgtctgccatcctcccgcacccacgagcatctttcaaaaattcccggt

SEQ ID NO: 534475 - DNA, 1471 bp, Homo sapiens
tgcttcttatatgtgctgttgtcgcttatccatcctttgttctcttttctcacttgtgttggtgtttcgcaactattctttcactgtacattctggtactatctgcacccctcgctctggctatggctcttcgtatctcccattgccacctttggcttgtcttttccgtggttggtactgctccgctttttgtacttctctctgtgccttttgggtctctattcctctctttctggtttgcctgtcccttgtttcttttggttgcgcctttcctctaatgtatggtccgtcttttcttttccgcttattcgtatccattctcaatctgctttctatttactgtgtcatcccttttactttctgcccctgtccatccgagttttattgttcgtgtctttcttcttttgtgtgttgttatggttacaatcttgccgtttttttctttgcgctcggttttatgcccttccctaactatgtgtttagcttacgaaactttcctattatatcgttgatgtactttctccctctttccgtcaacttttcttggtctgcaatatctcacctgtcatgtctttttcatctgtttatacctattccttataccttttttctccactattttccagtatattccacattttttgggtacttgtaatacccttctcattttccatctggcctgtttaatttttctttgtctgtactttatctgccttatattatctcctatctatattttttccttgtaaatgtcaatatttgtccttgatagtttcctccttgagtgtattcccactaattatgttggaacttcttgacattcacccctcagggttcttccactatcgtccctactttaaggatatattataacttctctttgtcaatccctatgctattcttaccacctctagtatacattctctagttgaaataatgaaatttcaagtgcattctctctgtaaaaacatcatgaaaactttttcctatatcctatacaccatcttatctctgtcccctacccccttttacatgtgttgtcgattaatattggactaaaaaagagtggatgacccatgtttattcccagatatggacctagttgcttaagcttcgaaagagaagacaatagaacttactaaagaaaataagcttgctgcgtgtcctatagcacggtcacaactattcttaattagattgtcaaatggagagagaactcgcttacgtacacattgcgagatctacaattattctggaatgttaaatatggttacgtcttacaaatagcatggcgtgtatgtgtaactatctactctagccacttataagatttcagcacttgcacttcattgcattctagtgtacatcacttaatgacaaaaatgtggcaaactaactgaccgatcgtctccttcagtctgctctgtttaattccgcctgtgctgctcttctcttaactgctgcgtcccta

SEQ ID NO: 534476 - DNA, 249 bp, Homo sapiens
catctacgaggggtatgccctcccccatgccattctgcgtctggacctggctgggcgggaccgactggctaccttatgaagaatcttaccgaacgcggttccggtttaccaacaccggccaaccggaaaatgtgcgtgacattaaagaaaaactgggctaccttgccctggaatttcaaccaaaaaagggcaccggtggtttcaacttcttccttgaaaaaaactaccaacttgctggcgggccgggta

SEQ ID NO: 534477 - DNA, 319 bp, Homo sapiens
tgggcctattaattaccccacctcctttctagcctcccactgcccttcccagcctctggtaactaaccagtcatctactctctatgtccatgagttcagttgttttgtttttagcttctacaaataagaacataggaagtttgcctttctgtgcctggcttattccacttaacataactatctttagctccatccatgctgttgcaaataatgggatctcattattttttatagctgaatagtagtccattgtatatatgtaccacattttctttttccattcatctattgatggacacttaggttctgtggtattgtt

SEQ ID NO: 534478 - DNA, 282 bp, Homo sapiens
  misc_feature (53)..(53): n is a, c, g, or t
  misc_feature (127)..(127): n is a, c, g, or t
gttaaagatatcagcctgctgactacaaaggaaaatatgttgtgtctcttttncctcttgacttcacctttgtgtgccccacggagatcattgctttcagtgatagggcagaagaatttaagaaacncaactgccaagtgattggtctctgtggatctcacttctgtcatcctagcatgggcaatcacctaagaaacaaggaggctggaccatgaacatcctttggtacagcccgaacccaccattcccaagatatgggctaaagctataagcactcgtcag

SEQ ID NO: 534479 - DNA, 961 bp, Homo sapiens
gcggcggccgccccgggttgaggcaggctggccaggtggacaggcgggcaaggtacagctccagcagttagccccctacaactctgttttccttccgttcacccttcgcaagttgcggctgacatggtcggcagcgtagtggaccatgagctgggctcctgtgtggacgaataaggcaccattctccctcgtcggattccaggacttcacgttcctcccagggacaccagaagctgagtgcccggatcctgaaggaggctctactatgtgctgtggtacttgtgaagccgcacgtgtaacgagcttgcgaggagactcctccagccccggtgggcaagaacgattgctgtacgaactgctccagaaggcagacgccagatcctattcgccgagtccagaagtctccagatgagacctccccaatctgtctatggcctgccatcactacccgcaaatctgtacaacgtccccccactggcgcgtagtccaagccccatggttacgcggtcattcgttatcgggcatgggttccccttgctaggccttggtacgccccgtgtgtcccattgtccactgtccctcgagtctcccgcagagtagtctcgcattgtgtcgccgtttgtctaggggagctggttccggcatcctcgtctttggtcttttccccagggtcagggtcagtggctcgcgcaaggaatgcggttgaagcaggcgtgttggcgagagtcctgagaatctgggtgctgcactgccagcatgcacattacttgtgtgcctcatttgtgttgtctcagccacgttccctgatcccttgctgaggctgagagccaagtggctgttgttggaggtcctggtcgcctgtgcggataatttcctgactaagatggcccctggtgtagcctgactgggccaacgacacgagaatgcacgggggaaagattcggtgggggaccagacctgt

SEQ ID NO: 534480 - DNA, 167 bp, Homo sapiens
  misc_feature (99)..(99): n is a, c, g, or t
tcgtatacgacttcgtcttgatatgaatctgtctgcttggcggtcagaattcactctagcgcgcatacgatgcccggcgcctcttatcatggctcagtnctgaaaacaacaaatagaacgcggtctattcattattctagctgggtatcaggcgggttggatgagtc

SEQ ID NO: 534481 - DNA, 853 bp, Homo sapiens
tcaaaaactggagtctggctctgtcacccaggcgggagtgcaggggcgcaatttcggtcatggcaacctggagctcattgaaacctccgtttcccgggtctcaagcgattctccggcctcagcctcccgattagctggaataacaggcgtgcgccaccatgcatggctaatttcgtggtgatattttaaataaggaagaagggggtttcaccatgttagccagggtggggtctcgaactcttgaccttagggagatccccccgcctggtgccttccaaagtgctgggcaatcgcaggcgtagacgccacgggctcccgggcctcgcctctgcttcttccacagtttgttcggtacaggttgggccgcccaggggggactggagcaatactaaaagaaccatagattcttccatggcaattcttcccggtagggtggtctccggtttcacatacttccttgagccagaggtcatcccattcctctcccttttcccaaaaggggttttctctctaggggggtccccccaaaccaaggtcttggaaaaggacagtctatggtaactatccaacgtgtaacaaatattgtgccattccaagacccaatttttccatcctaatcactgtgctcaccccaattccaagtaagaagattggtcttaaggcagtgtatttctccaccacgtggttgtgatgaccaataaagagaaaatgcccattcagattcttaattaacaaagtattcctctaaaaaaaaaaaactcgggcttcattcggtgggaaaacgagctagaactggcggcatagtgtttccgcctttcttgaagggagtgcggcccaggagatatgacgcgtg

SEQ ID NO: 534482 - DNA, 408 bp, Homo sapiens
ttacctttattcaattaatgcaaaaacaaaaggggagatgttggaggccgaaggaatgagggtcgtgaccaactcagtataccactggaggctctgtgagcaaacagcaaactgttctcatgaaagcaggatgttggcgaactgacaaactctgtctgccgccagaaggaatgctgggggcagtcatgtcccaggtcccgtgctccttgaggttatccacaggaacatccagaacctgttgaacaaagaaaggaatcatgtgggcctgtgttaaatcaaatagctgaccgacagttatcccttcctccctattcactctacctaataaatatgaagggctgtaaaagctcaggtccctgttccctaatatcaaggagccccctgcccccttctttcaaacagaaaaaa

SEQ ID NO: 534483 - DNA, 143 bp, Homo sapiens
gactaactggtcgagtctatcttgtggaattcagctaggatgtatgccggtacagatgtacacagtcaaaaggctatcgagctgttgagagttcttggaggtgtctggatcagtgatctagctgtgaactttaattcacgctg

SEQ ID NO: 534484 - DNA, 150 bp, Homo sapiens
aatctacaattctgcaatcatgccttttaacagaaagtacaaatatgaatagcattataatttgtaactgcatgtaaaaatgtaaaatatttctctccgaatccaaaacaccacacaatctttatctgttctcatcttggttgggagctg

SEQ ID NO: 534485 - DNA, 145 bp, Homo sapiens
cgatatgccagcgacatgaagggcttgacagagatggcggaggagctacgtaatgcgcccctgtctttccgaagagccatgatgttctacgcttcgaaactaccggaaggaccttgctaacctccatcgggagggggagacacca

SEQ ID NO: 534486 - DNA, 986 bp, Homo sapiens
gactgagccactgcactccagcctgggcaatagagcaagactccatctcaaaaaaaaaaaaaatcgggctcatcttttattggctggtgggttgagatgaatctactggatgaagaaaactggtactttggcttacattcagaataaggctttcaaaactggtgggtgtgctgtttacgtgagccttctatttgaccaccaaagacagtattttggcagctgtatcaaatgaaccgagtgggaggaaatggtataggagtatatcttaagggcactacagcaaactggggttaaattggggttttgggcaaagattggaagaaaacgggtattcaagatgtactggcagctgtcaccaccaagcatgaactttcactggattacccataacctacgtgaaatcttcagcctggctgtcagcattagaccactggtgagaaacagtacattccattccagttggcccggcttttggacgatctaaatggccattccatggtttcctggtgaccatatggaagtttctgggtggccacacgaaaacagggattctggctgaacttgtgggccagaacaaccccaaggtgggcaggacaaattgaacgacatagttctatagtttgcaccctttcaacacgttgaaaattttcaacaagagtgttaaaacaagtgaagttaaagatacatgggacactgaactgggtcatgggggcaaaacaccaaatgcgcggatccatgatgaaattacatcaagcaaaatgggcagaatgacacagtataagattttatggcaaatggttttggtgtgacgcacaataagtgtgtaagaagtggtctaagtttctggggataggtattgagagggagcagaattcatggaggttatttggagggggaaccaggtgaaaacctgtggaatatggaagagaagtgccctgagtggtatcaaacttaacagggaggctgtgggagaagtggttcaacgg

SEQ ID NO: 534487 - DNA, 493 bp, Homo sapiens
tcgagctgtgtgaaggctggattgggtcctgatggggtgttagcctcatctcacattgggagtactagcgttacgattgtctctcgtgcaatggacgtccgcgaaatgcgtattagtcgaaccctcgcgcgggttctacggttgcccagagtactcttgactggtgcacagcgcgaatgccgcgaagctcgcaggactttcccgagctcgatgtgagcctcggtggaggcgtagacgtcgcatgcgtggcacgcgcagcggtcgcgtagggatgggtagcccgtgtctttgctaccccacgcgcgcaccgtacgaggacgtgtggtagaggcgacgtggcgcgtctgtggcgcctcggcggctcccacgagctctgctcggcacctctgggtccgtccgcgtgctggctccgtcgacacgacgtgcattttgcggccaggctgggcacgctttgcttgttcgtgtgcttctaaccctctggtatggttttctg

SEQ ID NO: 534488 - DNA, 178 bp, Homo sapiens
tttaccacccgcttagggctgcactctcaagcaacctgactctaaggagaggttcacccgataccagcaccggccaactacgggcctggcaccctctcgggaccgtggcctcgttcaagatggacttggacgcggtgcggcggtatcgggtatgcgaaccctcccgaacaccacatgt

SEQ ID NO: 534489 - DNA, 255 bp, Homo sapiens
aacagtctttcttgatacgactatactgagacacagttgtcaccaggcagaagatagataatatgacctttattaagttgatgaattaacttaaccaagacgggataagtagttgactatttatcctaaaaatttctcgtggctgggtaaccctctgagtaggcctataatatctacccttgactgtgtacatcatattgtgagccaggcgaacctatgtggtgaaaatgcacaggagcttggtagattgcggtg

SEQ ID NO: 534490 - DNA, 962 bp, Homo sapiens
aggatgggcatttaccggtgggcgctagaccaggatatcggtgaagcaccgtcgtagtaaaaaaatccgcggtgacccgaatgccccggggtagtgcgcgagcgccctcgcatgggggttatacatctccccggcccaattcggggcctgcccttggcccccccggggaacagctacagcgcaccccaaagggagcccgaatgccacgatagtcagactggcgcccagtaagggcaaaccgcaaatctctccggcgcaggcccggcctacacatagagcgccccgatacctggccaagtcggggtgtgaaaccccacagcatgcgccgcaacaaagggtctaaagcccccagggtttgagaaaaatggtagcaacgataaaaaagccgggcgcaacaaccaacggcccccgaaggaattagccggggccaccaccaaaggtggggggggagctcacccacaggcccacaggattttcaaaagatgactgcatcaaactaattcttggcgacgcacaaagctgagaataagcgagggttgtaaacaatccccaggagggtccagcctcatgggcccggcgccccgtgggggtcaaaccccccgggaatagcccagacaacactatggggatagccgaagacgggggagtcccgactgtcatcagaaggacaggacaagccactcccccgggcacaaaacgcggggcaacacccccgcctgctctgcttaacaagcccaccaagttaaatcccgcgggtcaattcggcgggcggcccgctgatactgcgcacagccagtacctgcggagacggccgacgagccgcccgatgagattagagctgtgaaacacccgcgagaggccgggagagcgcctgaccacactgcggcccgagaaatgaccccagcccccgggcacacccacaccgcccggggggcaagggagcacccctttccaaaaaaaca

SEQ ID NO: 534491 - DNA, 369 bp, Homo sapiens
tctcagggcggccccccggggtcccggcccgatttccccgggtccccccccgccccccgggggggacgggggggtcattgcaggggccctcccccccgcggggctttttttgttttttttttaaaaggggccccttttttaaaccccccccctcctttgttttaacccccgggggggttttttttctcccctcccgcccccccccggcctccgggaagggccccttccccgggggtttttttttttaaaccccccggttggcccccggggggggtcctttttttttcccctttttttttttttttccggggggtgggggggcccctttttttttttggcggggggggtttttactttttccccccccca

SEQ ID NO: 534492 - DNA, 151 bp, Homo sapiens
  misc_feature (1)..(1): n is a, c, g, or t
naggagcagaggaacacaggagggaggactggccataaagtacgttaatcaggcaaacccaatcacgtgctgtgcgcccacttcacccttgcatgtgaaatggggcaggatatgcacgtgagttcatggtgaaggagctggagaggagcta

SEQ ID NO: 534493 - DNA, 320 bp, Homo sapiens
ccacacttcccgcaactgtggaagccagttatccagctagtatagttattaatacaagatgggtgaaagatgttcaacggcatcagacagcatgagtggtaagattttagtgtgtcaaacgattgcattagttgtgtcatgtttttatggcagcatagcctaggttagccttaattaattcaataaataaagttgcgcattatttgtacatgtaaaagtgttttgtatgtttgctttacagtggcttgccacttttctatcagagaatcccccctcctgttatgtaccatgctatattaataagttggaaggtgctggta

SEQ ID NO: 534494 - DNA, 412 bp, Homo sapiens
  misc_feature (359)..(359): n is a, c, g, or t
tattcggccatcttggctccctcaaatgcattcttttgacatgtattaattagttaactttccagtctaagggagcactttcccttctacatttatttatttatatcctcatgagctcatggttgttgacttagttcattttgtgttgctataacagaatccctgaggctgggtaatttataaagaaaggaggtttacttagctcctgattctgcaggctggaagttccatggcgtagccctggcttctgatgaggacttttgtgctgtgtcataatgtggcagagaaggtcgaagaggaggtgaacatatgcgagactcggaaggggtgccctggctttataacaacccactcttggngtaattaattgattcctgtgagaactaacccagtcttgccagagtgagctcct

SEQ ID NO: 534495 - DNA, 1357 bp, Homo sapiens
gtcgtgggggcggcactgggagcgccttccggagagacgcagtcggctgccaccccgggatgggtcgctggtgccagaccgtcgcgcgcgggcagcgcccccggacgtctgccccctcccgcgccggtgccctgctgctgctgcttctgttgctgaggtctgcaggttgctggggcgcaggggaagccccgggggcgctgtccactgctgatcccgccgaccagagcgtccagtgtgtccccaaggccacctgtccttccagccggcctcgccttctctggcagaccccgaccacccagacactgccctcgaccaccatggagacccaattcccagtttctgaaggcaaagtcgacccataccgctcctgtggcttttcctacgagcaggaccccaccctcagggacccagaagccgtggctcggcggtggccctggatggtcagcgtgcgggccaatggcacacacatctgtgccggcaccatcattgcctcccagtgggtgctgactgtggcccactgcctgatctggcgtgatgttatctactcagtgagggtggggagtccgtggattgaccagatgacgcagaccgcctccgatgtcccggtgctccaggtcatcatgcatagcaggtaccgggcccagcggttctggtcctgggtgggccaggccaacgacatcggcctcctcaagctcaagcaggaactcaagtacagcaattacgtgcggcccatctgcctgcctggcacggactatgtgttgaaggaccattcccgctgcactgtgacgggctggggactttccaaggctgacggcatgtggcctcagttccggaccattcaggagaaggaagtcatcatcctgaacaacaaagagtgtgacaatttctaccacaacttcaccaaaatccccactctggttcagatcatcaagtcccagatgatgtgtgcggaggacacccacagggagaagttctgctatgagctaactggagagcccttggtctgctccatggagggcacgtggtacctggtgggattggtgagctggggtgcaggctgccagaagagcgaggccccacccatctacctacaggtctcctcctaccaacactggatctgggactgcctcaacgggcaggccctggccctgccagccccatccaggaccctgctcctggcactcccactgcccctcagcctccttgctgccctctgactctgtgtgccctccctcacttgtgggccccccttgcctccgtgcccaggttgctgtgggtgcagctgtcacagccctgagagtcagggtggagatgaggtgctcaattaaacattactgttttccatgaaaaaaaaaaa

SEQ ID NO: 534496 - DNA, 212 bp, Homo sapiens
ccgctgtacagttgcgtaacaaccggtggccataggcagtcgcatccaggccggtccatgcgagaagacgtgcttcttacccatttagagtttgagaataggttgagatcgttgcgggccgaagagctctaatcattcgctttagcggataagactgtgcggggggagtgcgtcgggtctgtgagagctgcattaatcctgagggagaactt

SEQ ID NO: 534497 - DNA, 405 bp, Homo sapiens
ggttgcccggtcgctctagaggtccctcctctgttccgcctaaatctctcttcattccctgtccccaagcatccttcccaaccactggtaaccaccattctactctctgcttccttgagacctcagcttttttagctcccacatacaagtgggaagattcagtattcgtttttctgtgccgggcttattcacttaataaccttcagttccatccatatagttgcaaattacatgatttcattcttattaatggctgagtaatatcccattgtgtatatagaccacattttctttatccattcacccactggacacaacttgattccgtatcttggtaactgtaaagagcactgcaataaacatggaagtgcagatatccctttttgatttgatatactgatttcc

SEQ ID NO: 534498 - DNA, 437 bp, Homo sapiens
tgcctcagttacatggaggatgcttctttaccatttccctacaccctgattcccaaaacctatttgctttcacctggactgaccctgacaccctccagtcacaagcagctcacatggactgtcctccctcagggcttcagggatagccctcatttctttggacaagctctagcccgaaacctcacttccttaaacctgtctcccagtcatcttcaatatgtggacgaccttcttctttgcagcccctctctaaaagactctcaaactcacacggccactgctctcttaaactttctcgctatcaaagggtatagggtctccccctccaaggcccaactctccatctccatgatgacttacttaggaattcaactttcccctggggcccaggctatgactccagccagggcagcatttatagaaaatctacccccagc

SEQ ID NO: 534499 - DNA, 1011 bp, Homo sapiens
  misc_feature (284)..(284): n is a, c, g, or t
tggaaacagagttttggctcttgttgcccaggctggagtggtgatgggctcgatcttggtctcaccacaacctctctgtgccctcctgtgggtttcaagcaatttctctcctgtgccctcagcctctctttgagttagcttgggtttaataggcgcatgtgccaccatgtgccgtggcttaatttgtgggggttttatagataaagacagggtttctcctcccagtgtgtgtggttcagaggcggtggtctctctcaacacctcccaaacctctcgaggtgtgnatctgtgcccctctctcgtgtggcctctccccgagaagtgtgcggtgggaatttcacgggtgtgtgtgtacgccccacgtgttttcgcgcggagccccgcgttgtccccccctctcccttttttatagagagcgccgctgaaatatcacaagaggtttacaaaagaaatctccactttctccttatcagctgtggtggcggggagaaaatattcctcttagaaaatactatagcaagtgtctcttttactctcctctctctcttctcccccgtgttggtgtctctctctccgagtgttgggtggcacccgcgggaagcggcgcgtgagagagggggacactccgtggtgtgtccacgcgtgtgatgaggttcactgtgggggggcccccgagtgaaaagggctgtgagggtgatgaaaagtgttgaacccccactctttataaatctgtggcaggggaattgggggtaggaaatttttatctcccccccaatctgtggctccccataaagggggggggcttatacctctccctctcttgtggcggccctttttttgaggacacctctccacctttttcacaaaagaggatctctataggggggcgccctcaatttctttataaacacgggctcccattaaaattccaccttcaattcttggggcccctggggatataatttcctcaagtgtggcccctttgggccaacaatttccccccatttttgg

SEQ ID NO: 534500 - DNA, 144 bp, Homo sapiens
aagcatttactgatactgtgaccagcaaacttgttttacctggcacgactgagagagttaaagcagaaagccctggaatggtcccttaatacaggtagtttcatagcattaaagagccaacagccgttcccgagcttgaccagc

SEQ ID NO: 534501 - DNA, 188 bp, Homo sapiens
ctaaaacaagtttaattttgtacaccctaaaagtcacgtgcttacggcctgttcagcgagcagagctgccatctcagtactcctgtcctacgcagtgcttcacttgaaaaatgatcaagtgactttacattgtatattcccattgtatccgtgacatttttcaaggatatggcactttttgttcatga

SEQ ID NO: 534502 - DNA, 163 bp, Homo sapiens
ctgtaggtccccttgcatgtaccggggctcttcgtatgtgtggtacgggtggggggcatccatactagtcctccaggtttatggagggttcttctactacttaggatcttttcgcttcgaagcgtaatggcttctcaaactcatgaacaattattaactatta

SEQ ID NO: 534503 - DNA, 320 bp, Homo sapiens
cacacctgtgatcccagcactttgggaggccgaggcaggtggatcacctgaggtcaggagttcgagaccagcctgaccaacgttgtgaaaccctgtctctactaaaaatatgaaaattagctgggtatggtggcaggtgcctgtaatcccagctactcaggaggctgaggtaggagaattgcttgaacctgggaagcggtggttgcagtgagctgagaccacaccactgcactctagcatggatgacagagtagactccattttttaatataaagaaataatatagacaagagacatgctctcatgtgcacaatgataac

SEQ ID NO: 534504 - DNA, 136 bp, Homo sapiens
tcggtcgacttctgctcagctaatgcagacagtttgacaggcggttgtctgaacagctgcggtactcagggatctggagactgtgagaatcgcaaagctgggtattcgggccgaagacctttcaggacttttacaa

SEQ ID NO: 534505 - DNA, 88 bp, Homo sapiens
ccccggggggggttcccccttttttgttttttaaaattttttccccaaacccccaaaatttgaaaaaggggggggggggcccctttta

SEQ ID NO: 534506 - DNA, 188 bp, Homo sapiens
ggcctttttttaaaaaacaaaaaccccaaaaattccccacccatacttgctaaaaattttggtaagtatgtgcttttttgtgggggtgggatttggaaggggggttgggttgggctggatatttttgtaaatgtggccccccaaggggttgttgaaaactaattgtattaaatgttttttgataagca

SEQ ID NO: 534507 - DNA, 1472 bp, Homo sapiens
cggctgctattactatacgatctctaataaatccacgcatagatatatcattgtgcgtggaacatgactctaagtgtacttagcactactctctccgaccttcactctgcctgcttctactactggctgtaccaagacgcctactggcagcttgctcacctactgaccttccagcctgtacaccaccaagcgcactacaaccacttcctccgcgactgcgcctactgcttccaaccaagcatcaacctttgcacccacttcccccacaccctctgccctctacaccatgagcctccccacacaccacctgcccctaccacacaccccccccaccccgccccccacccacccttctcccccaccacctcctcgctccctctcctacacctatctccacgcgacatctgcaccgccacacccaccccctgcgcgcacccacccctcacgagcccttacgccacacccggtcacccccgccacgcacctcccacccccaactccctgcacacctccactgcgctgaactgccctgcccgcgcaccccccactcgcgccccccgagcgtaccaccaccgcaccacttcctactccaccaaactgccttttgcccttgcccaacccaccctctccaacaccccttaggcactgcaaatcaccgagcgaccccacacgccacccccacccttcctaaccactggtccccccctcacctaccaccccacccccccaccacatcttcacgctcccaccactcaccttcactactctgggcacactctctgcttccccccacacactcaactaaccactctccaccccccccattctaccaccactgctctccttaccttcatctccacccacatccgacgcacccaccctcgctctcatcacaccccctccctcacaaaactcgcccaacatcccttccactcgcactccacccaaacctaccatcacacccttctctctctgctccgcctccaaaccccaccccaccccagctcaccctccaaccaccctcttcactccgcccaccacaccccttccttccaccctctactctcaccttgcaccccacctcattccccccttatccgacctcccccccctccccacctctcttcctccccctcacaatccccaacctcctcatcaccccctctataccccaccacccccctcgtacttgccccctcactactcacacacactcctccccccacactcaccactaccaaacccatccccccgcctcccccctctctcccacccccaccaccaccctgaccccaacccctccacccctaccacctcaccactccccccccccaccttcccccctccccctcccccaccccctccccccccacaccaccccacccccctcccccccctccaccccccacccccccccacacaccacccccaccaccttccatacttatatttttacatcccccccccccccc

SEQ ID NO: 534508 - DNA, 430 bp, Homo sapiens
atatttggtgtattaatgtttttaagttactatataatttttagtgcaatgttaaataacagtatattggacggaatgagaagacggaatagaacaaagaagatacatgtttatatttttgatagcggaggggtatggacgaaggcccagccgcataaacatagtaacaataaagacacatttgcctgatagccaagcacttaacagtgtgcaaccagtatggcgaagctacaacggacggacggccgcggggggtgatattaattaccttttaaaatttaaaatgtatataaactgtgatgttgcccggccggggcgggtgtgttatggaggatggaagcaaacgccgcgctacagtttatcaaggcatataagcacacaccggtacaaataatgatacagggaaccgggtggtggcgtgactggcgac

SEQ ID NO: 534509 - DNA, 295 bp, Homo sapiens
ctccataatgtgtgcccagcgacatggaaaggactattttagatacggctgttagaaaggactctcaagacaggcacaatggctcacgcctgtaatcccagcactttgggaggccgaggcaggtggatcacctgaggtcaggagttcgagaccagcctgaccaatatggagaaaccccttctctgctaaaaatacaaaaattagccaggcgtggtggcacatacctgtaatcctagctaccaggaggctgaagcaggagaatctcttgaacctgggagatggaggttgcagtgag

SEQ ID NO: 534510 - DNA, 226 bp, Homo sapiens
gtgtgccgccggggtagatggtttcatggatctcaacgctatcatttgctgatcatgctctcgatgtctctggcacgatgcacgacactgggtttcgctgtctcgaggaggagaaaattgtgagtgactgcagaacacagactaacccaccacccagaacaacacctctgtggagttagaacaattgtttccctgaagccctactctgacacatgtcgaccgactg

SEQ ID NO: 534511 - DNA, 763 bp, Homo sapiens
  misc_feature (736)..(736): n is a, c, g, or t
  misc_feature (741)..(741): n is a, c, g, or t
  misc_feature (744)..(744): n is a, c, g, or t
gaacagtgaggaaaagccagagaaagggttcgaatgtgttttttgcaactttgtctgcaagacgaagaacatgtttgagcgtcatctgcagatacacctcatcacccggatgtttgagtgtgatgtgtgccacaagttcatgaagacccccgaacagctgctggagcataagaaatgccacactgtccccaccggtgggctcaactcaggacagtggtgagtttcagactcctctaggtgcccattctgcatttatttccaccaaccgccccgctgccatggagtgccacctcaagacccactacaagatggagtacaagtgccggatctgccagacggtgaaggccaaccagctggagctggagacgcacacccgggagcaccgcctgggcaaccactacaagtgcgaccagtgcggctacctgtccaaaccgccaacaagctcatcgagcacgtgcgcgtccacaccggggagcggcccttccactgtgaccagtgcagctacagctgcaagcgcaaggacaatctcaacctgcacaagaagctgaagcacgccccacgccagaccttcagctgcgaagagtgcctgttcaagaccacacaccctttcgtcttcagccgccacgtcaagaagcaccagagtggggactgcccgaggaggaccagaagggcctgtgtccagcccccaaaggaacccggcggccccgggggcccccgtcctggtggtcgggagctnccganatntcctgtctcccctgtcagt

SEQ ID NO: 534512 - DNA, 247 bp, Homo sapiens
agccactgcgcccagccttgttttattggttttctgttttctattttatttatttctactctaatctttgttatttctgtccttctgtgtgctttatgctaaatgtcttcttcttcctctagtttcttaaggtgggatgtgtggttactgattttagatctgtctctgtctaatctaggcattcaaagccataaacattcattaggcactgcttagcggcatcacacatatgtgatatagtgtatgt

SEQ ID NO: 534513 - DNA, 652 bp, Homo sapiens
  misc_feature (17)..(17): n is a, c, g, or t
  misc_feature (21)..(21): n is a, c, g, or t
  misc_feature (140)..(140): n is a, c, g, or t
  misc_feature (183)..(183): n is a, c, g, or t
  misc_feature (286)..(286): n is a, c, g, or t
  misc_feature (395)..(395): n is a, c, g, or t
  misc_feature (422)..(422): n is a, c, g, or t
  misc_feature (547)..(547): n is a, c, g, or t
  misc_feature (567)..(567): n is a, c, g, or t
ggggaggggaagtcttnctgngggacgggagtgttactgacgagtgagtccagggggtttgttgggaatactctgtacattccagcaatttggctgtgaacctaaaactgtcctaaaaaaaaaagtctgtttaaaaattngaacagttaaggccggtgtggtggttcacacctgtaatcacancactttggggggccaaggcacgtggattacctgacgtcatgagttcgagaccagcctggccaacatggcgaaaccccgtctcttttaaaaatacaaaaattangccaggcacagaggctcacagctgtaatcccagcactttgggaggccgaggcagttggatcacctgaggtcaagagttcgagactagcctagctaacatggtgatactncatctgtattaaaataacaaaaaaatntagcctggcatggtggcaggcacctataataccagctactcagggggctgaggcaggagaatcacttaaactcggtaggtggaggctgtggtgagccgagatcatgccattacactccatcctgngcaacaagagcaaactctgnctctaagaatatgtatatataagtgctagtaaccacaaagtatttgtctgaagtactcattcccctatgtatgatatctatcatt

SEQ ID NO: 534514 - DNA, 585 bp, Homo sapiens
  misc_feature (558)..(558): n is a, c, g, or t
  misc_feature (563)..(563): n is a, c, g, or t
  misc_feature (566)..(566): n is a, c, g, or t
ctgacaagaataacggatataattagttgttgatttgtgtttttgtgttattactctaggtgcccattctgcatttatttccaccaaccgccccgctgccatggagtgccacctcaagacccactacaagatggagtacaagtgccggatctgccagacggtgaaggccaaccagctggagctggagacgcacacccgggagcaccgcctgggcaaccactacaagtgcgaccagtgcggctacctgtccaaaccgccaacaagctcatcgagcacgtgcgcgtccacaccggggagcggcccttccactgtgaccagtgcagctacagctgcaagcgcaaggacaatctcaacctgcacaagaagctgaagcacgccccacgccagaccttcagctgcgaagagtgcctgttcaagaccacacaccctttcgtcttcagccgccacgtcaagaagcaccagagtggggactgcccgaggaggaccagaagggcctgtgtccagcccccaaaggaacccggcggccccgggggcccccgtcctggtggtcgggagctnccganatntcctgtctcccctgtcagt

SEQ ID NO: 534515 - DNA, 104 bp, Homo sapiens
tatgctcagccctagagtatcacacaaataagcaattatcatatttaatttctacattatctcctactaatcctttaactagacacactaagtacaaacaattg

SEQ ID NO: 534516 - DNA, 276 bp, Homo sapiens
actaaccctaatcgcccaaaaaaaaaaaggggcggtctcttgattctgtcaggacccccattgactggctcggtgtgtctggtgctttggcacaggttgagtgaagggagcactggtgtccacagtagaacttggtaagatttatatattgtatcatttatgagttttcccagccaggtagtggagagatttttaataacaggtgggtgcattacaggcggataagggtaaggggggtcaccggagctcggaattcggtaatctagggtctatagc

SEQ ID NO: 534517 - DNA, 437 bp, Homo sapiens
gctcagtgatgccggagacggaggaggtggtgtgcaataactgccctcccggggtacacggtgcccgctgagagctctgtgatgatggctaattagagaggacccacatatggtgaacatggcccagagaggccttgtaaacactgtcaatgcaacaacaatgtgagaccccagtgcctctgggaatagtgaccggctgacaggcaggtgtaagaagtgtatccacaacacagacggaatctactgagaacagtgcaaagcaggctacttcggggacccataaggctcccaaaccagcagaaaagtgtcgagcttgcaactgataacccatgggctcagagactgtaggatgtcgaagtgatgactcctgtgtttgaagccaagattgagggcccggaaagtccaaggatcctctagatcgactgaggaatcagctg

SEQ ID NO: 534518 - DNA, 128 bp, Homo sapiens
acttgtatttatgcaatcaattcttgactctcctggagacaatcactctttaaatcttcattctccgaatctgactttcgtgtttcatcctgagtatcactcaattcaacaagggaacagagtctggc

SEQ ID NO: 534519 - DNA, 244 bp, Homo sapiens
actgatcgcttagcatagctggcggtatgggccctgctcagaaacaaatggattgtccgaggggactcggtacgcttgccatctgagcgtggcctgttcacatcgatccttaaaacttttccagcaggaacttttgttctgagcatttccaaacaggccaaagggatctccagctgctgttgtttccgaatcttcttcttccggatctgttcttcagaaaggacgcactgctccctccttaagc

SEQ ID NO: 534520 - DNA, 844 bp, Homo sapiens
ccacatcccattccacattcattttctagacttttccccatacagttatctcagcactggtatctagcaggttcaactaacacatggctcactaaaaacattatactaataccttctctgaaaaacttattttctcctgcctactaaatatttatttcatcaacatgggctgcgttccactgtgtcaggattctgcatgtgggtggagcactgttccagcctgagaaagatggttctgaggccacttatcaagacattcttccaacatgagcaagtttctctcgcgcaaatagcgacacctgtccttggtgtgttgtctttcctcaggtaacttaaggggtccaaagcctctgaaaatgttctttatgctggttgaaacctcttatgtcgttgtacttataccctaccatgcaaattaaaataacgggacttcaaactctccaccaaattatgttggcgcccacccaggctgaaagctgcaccctttctccgcatatttctgtcttcaatatgtatcaccttttaaaccctgcatatattattgagcccccttctcctacaaaaatactaaaactagtataaccatcatttactaaatcattacactttctgtataaccaggcgactcacccatactgttttccatcagtttacccctctattcctgaatttcagcgtcacctgcgctgtcctgtctactactcataacaccgcgtaccccccccgtactattgtattactatcgccaaactatgatcaccatatctactgacacctatatatgaacccccccccgcccgctcaataatattcttatacaatatactatcctagttaatctcct

SEQ ID NO: 534521 - DNA, 283 bp, Homo sapiens
cagtggtgttgagtgggtcagcatgtgcttggataggtagctcacgtctcggcatgtgaagtcacacgagctcacacttgtaggggcttctcacccgtatgctagaagcgtgtgtcggatagagcaccctctttgtgggcagtggcaaatgttgcactctgagacattggtcggatcttttcatgcagcatgcatcttggcctacagtgatcctaggtaagccactgagttgaacggttgcaaaaggggctgaaccgtgcacgcgcaggttcttcactgccag

SEQ ID NO: 534522 - DNA, 218 bp, Homo sapiens
  misc_feature (117)..(117): n is a, c, g, or t
  misc_feature (135)..(135): n is a, c, g, or t
  misc_feature (147)..(147): n is a, c, g, or t
  misc_feature (168)..(168): n is a, c, g, or t
gagcggctgatatgctctgaactgctttgtaaaacttgctttttgaggaattgctcaaatgttacatggtattttatggtttaaaatacatgagagggaattccttttttggcacangtactgtgaaggacccangcattgtcactngtagaggctcaggtcactgcncgtggagtgggtttgctctctggcctggggaacttcagaccgctctaccg

SEQ ID NO: 534523 - DNA, 111 bp, Homo sapiens
tcaggaagagagaactgcaggtagagagaactgcagagtgcgggcagtggagactagcaagtgtgaggaggcgtgttataatcagtggtggtctctcgtttatgataaatc

SEQ ID NO: 534524 - DNA, 374 bp, Homo sapiens
  misc_feature (105)..(105): n is a, c, g, or t
cgtacaagtagcatcatattcaacagtgaaagactaaaagttatccacctaatatcaggaacaaaaaagtttccacctaagatcaggaacaagataacgatgttngttctagccacttttttttttttttgttcaaagacagggttctggctctgtcgcccaggcggatcttaacctcctgacctcaggtgatccacccgcctccacttcccaaagtcctagcattacgggcgtgagccaccgcgcccggccccctaagattattttaaaggcaaaccccagacatcgggttattccatcggtgaatacgggggaatatagtcttaccaggtgcccccgaaaataacgccgatttacgagtcgggggccaaaaa

SEQ ID NO: 534525 - DNA, 786 bp, Homo sapiens
  misc_feature (472)..(472): n is a, c, g, or t
  misc_feature (523)..(523): n is a, c, g, or t
  misc_feature (566)..(566): n is a, c, g, or t
  misc_feature (599)..(599): n is a, c, g, or t
  misc_feature (707)..(707): n is a, c, g, or t
  misc_feature (717)..(717): n is a, c, g, or t
  misc_feature (721)..(721): n is a, c, g, or t
  misc_feature (723)..(723): n is a, c, g, or t
  misc_feature (727)..(727): n is a, c, g, or t
  misc_feature (741)..(743): n is a, c, g, or t
  misc_feature (760)..(760): n is a, c, g, or t
  misc_feature (767)..(768): n is a, c, g, or t
  misc_feature (771)..(771): n is a, c, g, or t
  misc_feature (777)..(778): n is a, c, g, or t
agtagatcgaggcggcgggctgcacattcccgttgttgcgttgcgtttccttcctctttcactccgcgctcacggcggcggccaaagcggcggcgacggcggcgcgagaacgacccggcggccagttctcttcctcctgcgcacctgccctgctcggtcagtcagtcggcggccggcgcccggtttgtgctcagacctcgcgcttgcggcgcccaggcccagcggccgtaagctagcgtctggcctgagaacctcggcgctccggcggcgcgggcaccacgagcggagcctcgcagcggctccagaggaggcaggcgagtgagcgagtccgaggggtggccggggcaggtggtggcgccgcgaagatggtcgccaagcaaaggatccgtatggccaacgagaaagcacagcaagaaacatcacccagcgcggcaacgtcgccaaggacctcgagaaaatgcccccgaagaanaaggcgtctgtaggacccctggttatttggctctcttcattttggtggtcntgtggttctgcaattttcccagattattcaaagtatcaggatngggcattgtgaaggtgactgaccttaagatgtntccatttctcctgtgaattttaacttgaactcattcctgatgtttgataccctggttgaaaacaattcagtaaagcatcctgcctcagaatgacttcctatcatgctncatgtgtcantccnanggtntcttcatgagtcannnccaagtttctaggtccnataccannagntgcctnngcaaaaaa

SEQ ID NO: 534526 - DNA, 631 bp, Homo sapiens
  misc_feature (291)..(291): n is a, c, g, or t
  misc_feature (300)..(300): n is a, c, g, or t
  misc_feature (329)..(329): n is a, c, g, or t
  misc_feature (459)..(459): n is a, c, g, or t
gagaccttctggatgccttcaaggaggcgaacccggcagtaccagaggtggaaaatcagtcctcctgcaggcagtcaatccaggcccagagtctgagggcagtggtgtgcccccacgtcctgaggaagcagatgagacctgggactcaaaggaagacaaaattcacaatgctgagaacatccagcccggggaacagaagtatgaatagtaagtcatgatcagtggaagccgtctaaacctagatggagaaataatacgttagcgaccgggtgagattccgtggcgttgggnttgttcaangttcactctgttgcccagatatgcatganagcctagagggtattgccagcatatcagatgagcgtggtagctggacgaaggcgcagataaaacacacatcgtgtcggtccacgtgggatcgccactaagactacagaggcataacattcgtggcccagnacttcactcgcatcctttgccaaccgttggccggagcgaaccacttagcacccgtgggcccccgaaggggtgggccaggtggggagctagccccgtgggccggctaggactgggaccccggcgctctcagcagggaccccgtaaaagaaccacgcaagatcattgccacagc

SEQ ID NO: 534527 - DNA, 244 bp, Homo sapiens
atcccggctatacactatataggtgtgtgtgtactagtgtgtgtttctgtggtgtgtatagtgtgtaatgagtgtgtgttctattggtgtgtgaatgtgtatggatgagtgtgtgttactgatggggtgtgtatgattgtgtgtttctattggtgtgtatgtgtgtggatgactgatgtgttcctgtacgtgtgactgtgtgtaccttttactgggggttgactgtgtgtgacttctcttgacg

SEQ ID NO: 534528 - DNA, 667 bp, Homo sapiens
  misc_feature (353)..(353): n is a, c, g, or t
  misc_feature (404)..(404): n is a, c, g, or t
  misc_feature (447)..(447): n is a, c, g, or t
  misc_feature (480)..(480): n is a, c, g, or t
  misc_feature (588)..(588): n is a, c, g, or t
  misc_feature (598)..(598): n is a, c, g, or t
  misc_feature (602)..(602): n is a, c, g, or t
  misc_feature (604)..(604): n is a, c, g, or t
  misc_feature (608)..(608): n is a, c, g, or t
  misc_feature (622)..(624): n is a, c, g, or t
  misc_feature (641)..(641): n is a, c, g, or t
  misc_feature (648)..(649): n is a, c, g, or t
  misc_feature (652)..(652): n is a, c, g, or t
  misc_feature (658)..(659): n is a, c, g, or t
agtagatcgaggcggcgggctgcacattcccgttgttgcgttgcgtttccttcctctttcactccgcgctcacggcggcggccaaagcggcggcgacggcggcgcgagaacgacccggcggccagttctcttcctcctgcgcacctgccctgctcggtcagtcagtcggcggccggcgcccggtttgtgctcagacctcgcgcttgcggcgcccaggcccagcggctccagagtgaggcaggcgagtgagcgagtccgaggggtgtgccggtggccaacgagaaagcacagcaagaaacatcacccagcgcggcaacgtcgccaaggacctcgagaaaatgcccccgaagaanaaggcgtctgtaggacccctggttatttggctctcttcattttggtggtcntgtggttctgcaattttcccagattattcaaagtatcaggatngggcattgtgaaggtgactgaccttaagatgtntccatttctcctgtgaattttaacttgaactcattcctgatgtttgataccctggttgaaaacaattcagtaaagcatcctgcctcagaatgacttcctatcatgctncatgtgtcantccnanggtntcttcatgagtcannnccaagtttctaggtccnataccannagntgcctnngcaaaaaa

SEQ ID NO: 534529 - DNA, 430 bp, Homo sapiens
  misc_feature (19)..(19): n is a, c, g, or t
  misc_feature (43)..(43): n is a, c, g, or t
  misc_feature (377)..(377): n is a, c, g, or t
  misc_feature (385)..(385): n is a, c, g, or t
tggccgtgttttatacagntaatgccccccccccctgttttgntaacttttagcattttttaaaagtatatattgtatataacattcttggtagaaaagttacaaaatgctcattagtaaatagaaaagatgtcaattactcatactaccaccatccagaaatatcactcttaacatgttggcacacatccttcctaacatttttctctacacataacacgtgtgtaagacttttttttgaccaaaaaatagaatcaccaaccatccgatttattttttccccttattggcctttacctcccaaagccctcctcacaaaacccactgtgatgtgtttgatgggggtcctgaccacccatccttcttataaaaagtgngggtgtgncaattgtgccccgggccggggcttttgaaccccaacccagctgcc

SEQ ID NO: 534530 - DNA, 183 bp, Homo sapiens
cagtcaaaatctttggggttatagttattaatggaccgaagcttctccaacactgggtgggggttctgaaggagtagatccagaaccagtcctgatgactgtcctactcgcattaccgatccactcccagttactgacctgaatcccaactgtccacgagttccgaggctgctacccagcggg

SEQ ID NO: 534531 - DNA, 237 bp, Homo sapiens
  misc_feature (177)..(177): n is a, c, g, or t
tgaatgctctaccataaatactgatactcattctggtggcgaggaataatggcgatgggtaattattgcgataatataaaaataaaacttatattagctttggaaagtatctatactgcgtaggtctgaagaaaagctctatatgtctagtttgactagacagagagaaaccaaaanctcccttgttgctcacgcaagacaacagcacacccactgtccctctgctaggaacccacg

SEQ ID NO: 534532 - DNA, 654 bp, Homo sapiens
  misc_feature (461)..(461): n is a, c, g, or t
tatattttaactttacattttatttacagagcattaaaggcggtttacaaatcaatcacatcttcgcaaaaacacccggtgttgttttctcctcaaagcagttttcatacatggcatcattattctgttcataacagtcccaaggactggatagggtcggcttggctgtctccattttaatgacaggaacttagatgtggaggccttacgctgtccaggaaggggttttacagacgtaacttcgttgggtcttctcctcccacccgttgcacggcgcaaagagcccatcagttggcggaagtctgggggtgggaggacagtctgggagtgacaggctggcgtaccagaccagtcgatctgggtctcgggcttgttgacataagctaggggtcgaagtcaggggcacccgcaaaggcggacctgcctgggcacctagccaaggggaatccaccttcccgggncagccaccagggccttgaatgggcaaagtatcgaatcctgtcgtgtgtgaagcaagctcttcatggcgagcaccttcaggcgcgacctcgggtcaagaaatactccattgtgctgctgtggacgcgccggggccgagtcttcgggggatcggccaggccaggagtgaaaggcctgggagttcttcggccaaga

SEQ ID NO: 534533 - DNA, 1401 bp, Homo sapiens
gctctacaattgaatgagctcaccatggatgatgataccgctgtgctcgtcattgacaacggctctggcatgtgcaaggccggctttgcgggcgacgatgccccccaggctgtcttcccttctatcgtggggcgccccaggcaccagggcatgatggagggcatgcatcagaaggagtcctatgtgggcaaagaggcccagagcaagagaggcatgctgaccctgaagtaccccatggagcatggcatcatcaccaactgggacgacatggagaagatctggcaccacaccttctacaatgagctgcgtgtggctcctgaggagcaccccatcctgctgactgaggcccccctgaaccccaaggccaaccgtgagaagatgacccagatcatgtttgagaccttcaacaccccagccatgtacgtggccatccaggccgtgctgtccctatacacctctggccgtactactggcatcgtgatggactctggtgatgggttcacccacactgtgcccatctatgaggggaatgccctcccccatgccaccctgcgcctagacctggctgggcgggaactgactgactacctcatgaagatcctcaccgagcgtggctataggttcaccaccacggccgagcaggaaattgtgcgtgacatcaaagagaagctgtgctatgttgccctggactccgagcaggagatggccatggcagcctccagctcctccgtagagaagagctacgagctgcccgatggtcaggtcatcaccatcggcaacgagcggttccgctgccccgaggcgctcttccagccttgcttcctgggcatggaatcctgtggcatccacaaaactaccttcaactccatagtgaagtctgatgtggacatccgcaaagacctgtacaccaacacagtgctgtctggcggcaccaccatgtaccctggcatcgcccacaggatgcagaaggagatcactgccctggcgcctagcattatgaagatcaagatcattgctcctcccaagcgcaagtactccgtgtgggtcggtggctccatcctggcctcgctgtccaccttccagcagatgtggatcagcaagcaggagtatgatgagtcaggcccctccattgtccaccgcaaatgcttctaggtggactctgacttagttgcgttacaccctttcttgacaaaaccaaacttctcagaaaacaacatgagattggcgtggctttatttgttttcttgtttcattttttgttttgttttttattggcttgactcaggatttgaaaaccggaacggcgaaggtgatagtagtcggttggagcgagcttcccccaaagttctacaatgtggccaaggactttgattgtacattgttcttcttttcaatagtcat

SEQ ID NO: 534534 - DNA, 1584 bp, Homo sapiens
  misc_feature (171)..(171): n is a, c, g, or t
  misc_feature (251)..(251): n is a, c, g, or t
gacatggagttatgtgcgctactcttgtagactccgtgatctcaccctctagatatgatgcaccgtaggctgctattgagcagagaatgacttacatcttgcatgcgtcatcacttggcatctgaacacacttaaaaccaaagtgctaatcagattggggttagataacgnattgagtctcactagttcctcaccacaatggttagtacgtcacgccttatgttgtgcgtgctcatctcttacatgaggtntctaggtcgactttctaaatctcttaggtaacagcgaagaggaagctcttgcagaggctatcgacttctatgcaggtaaaggctatccactcaacttcccgttcaggcaacttattgccatagtttcccgggctaattggtggatgggtggctcatcatatgatacaccatgacaaatgactatgactggcatcttaaatgtatcgtggctggacactatcataaattgcgagagtgcgtaacctctcaaaaatcctaagcaaaccgaacgcaaagtcacaggactgccccgtgtggacggtgaaccaccagacatgattctgggcggacgcacacatggtacatcctaggtaggtttggttgccctaattattcctttggtggagcgggctacactaccgtggattttgcttgcgagattttataccctaggttccttagccttatgcactaatttcctataggtccgtaattacttcgcatcggcaatacggttaacattactgggttagctacctttcatttacccacttgcttgagacacttaattgattatcgcacagacgagtagggtactttcttaattacggataaggatgcaatcactcacatcatgtggatttgacttgatgtcactcacatgggtttaaatccaggcgttgggggagcactatgggggccacaccaaggtaacttacagccaagtctccttacacctaagaagcttggcctgaaacatagccgtttgcgcccaacatctagcacacgtacagcggcaccaatgcttaatttagctcaactaaaggttattagactcatgccccgttagttgcgacattttgtggggccgccaggatcacattcttctcatttgaagatattcgcggactaaaaaattgatactcatatacacttattagtacagatggacaatattacggagtttcccgtttgatcattacgacggctcacacttttatgactagtgcgggtaaaaatatcttgtccacgtacaatatttgacgcattgtaaatcggtagaggtcgtgataacgaattataacaaccgatgggatttcggccgtggacgcatccatacatgacaacacagagacgcaacgctcatttagtcccacaagtttacgcgcacaggtagggatatacacctttaagacgggtatggtccttggcattgatctcttatgcaaacgcacagtgcagcacagcgtcacgtaactaattagtagagtttcgccttagaaaccgggctatacagataacggtgagggccataatcaaccaaggacagaagaaagcgggcaactacattagt

SEQ ID NO: 534535 - DNA, 824 bp, Homo sapiens
tcccttttctctttaagggagtttggccgcgagcgcgttctcctttaacattccgcaggccggggcgcgttcgcagctcggtgtggcggcaaaggagggcgctctcgggacctcgggggcgcgcgtcttggggctctggcccttggtcccggcgggctggggagaagggcgtaaccgggggggaaaaggccgcggagaaaatgtgcgagagagacccagggtgccgccgggagatgctcacacggagacaggcgaagcccgggagaagaaatgccgcccagaaggggggaggcctccagggccgggttggaagcccgagagcccagggggggggggcccccttcgggccagaagggggggcgcaaagaaaacaaccgggggagaccccggacaattcgtggcctttgggaccccgggcacacaaagcgctcctatacagagaaagatgtgcgtcaggtgtggcccaaccaattacaggggcgggatacgctgtagagcaaaagagtagaggctcgaggcgcttcccaggggagggggtgtgaccctataatgtggggccaaggaaagggggacgccgcttgtgaaaaggcgccaaggaggagcgcccctttaaaaagagacgcccgggggggggggaaagacgcaagagaaacgttccttgggggtcccccaaagaggtgctgggcaccaggggaggaagggacctcctgggcaagcatgtgggggcgcaaaaagaagaagaccccgcggattaaaaagaaagatgggcgataccaaaaggtccaaggggggtgggtaccacaggactttccccgagtagtatc

SEQ ID NO: 534536 - DNA, 993 bp, Homo sapiens
  misc_feature (993)..(993): n is a, c, g, or t
ggcccagttctccgtgttccggatgtgggctcgacaatgtgcccccaagtgatattatggtacaaccttcattgaacttgcctctaccacgggcgaaagcatcagcatgctgagtggcacgggccgcacgtgagcagctcgcactccggctgtctgccagtcatcccgacaacatcagacaccatagaccatagcacagcttggattgacgcatcatggtgcccaaagcagggttgcaggctgcatccttggcgccaaagtttcaaacagcatgttagccacccaagaccaggcactccggcacaaggcagcccgtcttgcaaaggctacatgtgcgccacctctacccttgaccaattggctcgctggacattccaatcacaaatgttgcccacaagtcttctgtgcccatacacatctagacgcaacccagtggtgctcaactgcaaagtaagactgctgttcaccgatttggactattcacgtaccaatttcattcctttgtggctcaacaccaccacttggtccagatcaagatcgttctggcgccatgtgatttctcatgatcgtggaccacgtgcacgagtggctgcactcacctccgagagagcagtgtcgttcgtcgctatctcagcgggccgacgatcccgcagttcttttggcccatatgttcacttcctacttttctgtggccaaacagggaaagtttcctatcgttcctggaccccgtccccccccttgttgtcggttatcgcatcttcgtgtcttaccggcaacctacgtgggaacacccagtctgtatcacaccattgggaatacatctctgataacgacagttctgccgtgtggactcgatactttaaaatgatctccgctgtttgactcatcggtggtcattgagtccgatggggatagggtattacacgcttatacccagattatgtgaggttcatgcgtcagcttcggtattttatagcagcgcagatacatccn

SEQ ID NO: 534537 - DNA, 390 bp, Homo sapiens
tggtcgtctctagaggtatccccccaccgtgcggttgtactctctccttcagagaacatggccgattgatgttttacaggcgtttatcagaggataactgacacaaagaagattggagaatatgccagtttcccagtccttacgatcaaatacagtgaccccagccagggagaataagggctgtaggaattgtaggtcttgaaaggaaactggaagaaaacataaatgaagactgacataaacatttctgaggcctttgaagacctcagcaaactaatgatcaaggctcaggaaactggtgcgaattctcaaaatccattgctcctaaatttaccgacgaacgaggtgacatcacagaagatgagaccatcaggtttaaatcctacttgc

SEQ ID NO: 534538 - DNA, 367 bp, Homo sapiens
  misc_feature (169)..(170): n is a, c, g, or t
  misc_feature (260)..(260): n is a, c, g, or t
  misc_feature (310)..(310): n is a, c, g, or t
aaaagataagaaatagtacatctgtatagggcactaacttgcaagtggtgtgggtgagtcagtgagtcagcagggagggaatgtgaaggactaggctattactgtacactactgtagacttacaaacactgtatacttaggctattctgaatttatataaaatattttnnttttttcaataatgaattaaccttcgtttactataacctttttactttataaattaaaaaaaattttaacatttgactcttatgtaacanctgttagcttaaaacacaaacacactgtacggtactgtataaaatatttnctttccttatatccttattattaatgagggttttttatggttttaaatattgtaacc

SEQ ID NO: 534539 - DNA, 424 bp, Homo sapiens
  misc_feature (21)..(21): n is a, c, g, or t
  misc_feature (55)..(55): n is a, c, g, or t
  misc_feature (64)..(64): n is a, c, g, or t
  misc_feature (189)..(189): n is a, c, g, or t
  misc_feature (380)..(380): n is a, c, g, or t
  misc_feature (389)..(389): n is a, c, g, or t
ccatcagtttcggcgtttttnccagagaggcaggctcacagcgatatcgcgaganacgagtttnactctcgttgcccaggctggagtgcaatggcatgatcttggctcactgcaacatctgcctcctgggttccagtgattcccctgcctcagcctcctgagcaccaacagacagggaattgctctgtnacgcaagctggagtgcagtggtgccatctcggctcactgtgacctctgcctcctgggctcaagccatcctcccacctcagcccttcaagtagctgggattacaggtgcctgccaccacggactggctaatttttttaatttttaagtagagacggagttttcaccatccatgttggccagggaggtcttgnaactcctgnacctcaagtgatccgcctatggctggctttttaat

SEQ ID NO: 534540 - DNA, 914 bp, Homo sapiens
agcgggtgttcggctggcagtcgggcgttggacggtcgccggatggctctggacgtgaagtcgtcggggcaatagcgttatgacgaagctggactctccttgtgggagggacaagtgtagccaccgtctagaagggcagagataggaatagcgaatccaatatggctcggacgcatatagagcaagaatactaaagcttaggaccatagatgcagagagcgtaaagagggtatagatgtagaagcagactttaagagagataatacatttattacagggaggctaatgtcatcacgagatagtatagatggggtactaccctgtgatgactatatggtagctagtaaagtactatatgattgagggcattggtaccttggaatgttagaatgggagagactgagtcgtagaggttatagattaaaggataattagtgcattgtgctggacgaccatcacactatcaaagatcatacgatgttgatgacgtctttcgtaggattagaatattgtacatcatacgattggatccatactatagggatctgagaaccaaagaagttgttgctagatgaaacatggaggttctaaaattgggcagattgaggaactgggcaaatctttagggaggcacccaaatagaggcttatacacatcaggtagtaaccaggatggtatcgaggaccctcgcgaagattagctaatagagtgatggtaggactgtatggtgtaggtggggatcactgttgggctgtcggtgtaatattaaggaggagttagtgtacgtaaggggttcgctttgtgacaggaagatgcatgagcttgataaactagggaaagaatatttgaaggtttggggacaacgagtgaggaacaggtggacggaagatgtgtaagtctgtcagattagagtg

SEQ ID NO: 534541 - DNA, 113 bp, Homo sapiens
ttcgaaggtcgcgtcttttactagtgcatgcactcaattgtttctcacgttgagatgtgtatgtagttctaaatttgtttttaactgtcatgtattctctctttttctctttt

SEQ ID NO: 534542 - DNA, 469 bp, Homo sapiens
acgatgttctgagtgtgtaaactcatgcgtgccaagtttctgtcaggtttgtacctgccacagaaatatccttgaaagtttatctaacagctggagccatgaaaaaaaaaaaaaaaaaaaaacccatgggagctttgtaaaacagggtgggttttgccaacgggaagagcccaagaaaaattacgaggctgccaaggtggtgggctgccaaagggtcccaaggtgggaggcaggaaattggcaggttggggggaagctgggggttctttcaaccattggtccctttcttggccccagttgttgtgttctctctacactgtgcacacttcttttcatgaagatagaccaagcccatacataaccggggcatgaacaccccactgtgggttattcctggcactcaggaacaagctgggtcttatggcccagctctcggcggaaggggcaagtaaaaagggggagataataa

SEQ ID NO: 534543 - DNA, 107 bp, Homo sapiens
  misc_feature (85)..(85): n is a, c, g, or t
tatgagaacctgtttatagataaaatagtgaatagtggaggactgtatccagctattgggaggtgaggaggagaaatcgttgaanctggctggagaggttgagtgag

SEQ ID NO: 534544 - DNA, 374 bp, Homo sapiens
cataagaatactctcttgaaataacaaatcttcataaccagtaactaataaataatcatcatcacaatagcttcactaaaaaaaccaattcaatgaaaggtgcttacttatggttaccttgaagccaccgaacttgtgtagctagtccatatccctttacattctttgctgatatcctgaacacaatggcaggcctggatgtatcagtcaatatgtgcatttgcaagtagcccgagcagttactatacataatgtcttccagactaaaatacatcctcatgaacacaagttgacttggattatcttgtatctgtgctgtgcggatagccaagtaggctgaatattccaaaaatattacccagaaagtgaggttg

SEQ ID NO: 534545 - DNA, 154 bp, Homo sapiens
cgagccgaatgtcggccaggcgcaccaaggtagttatacaggggacaagaaaatgagtacatagtgcaaggcaaaggtctagaaatagcacagcaccttcgagtcacgttggacaaactcgacttataaactacacgtcttgcttagcccctag

SEQ ID NO: 534546 - DNA, 597 bp, Homo sapiens
gggcagagctgttccagagtatcccggtaaccgggaaggagctattcttaccattgtgtaggcgagagatcacagtagtagcagcattgcctgtgacattgtcgctagcagaaatcaaaaatattttcatattacataagtggtgccagcatctcaaaatactgtttatgcttatcaccatttgggaattatgagttactaagtaatatcactacaccttgtaacccaacaagttaataagtccttactgttctagcatactttagtttgataaccattattcagtataattggcttctatcgtaatcccatgtattatgttttatgcatttttttaaaaaaacattctaaaggagcctaataggcttttccagactgctgaaggggaccacagcagagttctgaagctttgtaccaggtagttcattgtgtgtacaccaagcttatcaatgcttaatctgtaaatctgaaactattttaaggaaagtgtctggaaaggttaccttatacttttaagaagtcatttgtataatattgtttcttggcatataattttccagatttcttgtccagtagtacatggagttaatgaagtat

SEQ ID NO: 534547 - DNA, 265 bp, Homo sapiens
tcggagaggatcccgtgtgacagagctcagtcctctcccaagtccacacaggtgaggtgatagcatggctttcgtgtaaataatgtaatggcaaaatttttttaatcttcgccttaatactttttttttttttttttttttttacggggaaattgtttttactcttaaattgttttttaggccaccttcggttaacccggaggggctttggggcggggggcaccggaccccaaatccgaactcgagggccatagagtcggtgcgg

SEQ ID NO: 534548 - DNA, 142 bp, Homo sapiens
cgctcttatcctctgtatatatgtgaactctggtactcttctactcgcacataacttattatccaatgcctgagatcttgaggtcagtgaggcccggccgtacacttctcccattctctccagctaaaaccctccgcaccgc

SEQ ID NO: 534549 - DNA, 216 bp, Homo sapiens
cgttgcagttagacggcatccagtgtgggctgttttcgggctatgttgtctttgagctgtacagactccacctgggtcgcgttgagctcagcaacggctctgatctgctgactccatcttttcataggtgacgaaggcacagtttctggtcagagcctcaggattgctcagccaccaaaagtaactaccttcgaggtactggtccctacccacctt

SEQ ID NO: 534550 - DNA, 461 bp, Homo sapiens
gtaagcgtcaaggcgttgtctgaaccaccggttgagcggaagagtacctgtattcagtcgaacctgacctggatccatgacacctcatggccattgaattcctactacccatcttgaacacgttgaacactaccatctatcattatatgacaacatccaacctaaacgaacatcacagactttactggcatccatatagaactgatgcagacgtagacaacaatgattttccttggtatggcttatatttccctgaagtcacagactgtctcagacgcatatgcttacttgaggagaactaaccacctgtagagaatcccggaacgatgcaatgttctatgaagtgatactttaatggttttctgggctgctgtgtagatagacatattcttcagcgttcaccctgccaactgaggccacacttcacttctctcatcgcttcactatgccggtgcttgcag

SEQ ID NO: 534551 - DNA, 583 bp, Homo sapiens
caatattgagaggaaatcacgaaagccgacaaattacccaagtatatggcttttatgatgaatgtctgcgaaagtatgggaatgccaacgtttggaaatattttacagatctctttgattatcttccacttacagctttagtagatggacagatattctgccttcatggtggcctctctccatccatagacacactggatcatataagagccctggatcgcttacaggaagttccacatgagggcccaatgtgtgatctgttatggtcagatccagatgatcgtggtggatggggtatttcaccacgtggtgctggctacacatttggacaagacatttctgcctttaaccatgccaatggtctcacactggtttctcgtgcccaccagcttgtaatggagggatacacattgggtcatgatcggaatgtggttaccattttcagtgcacccaattactggtatcgctgtgggaaccaggctgctatcatggaattagatgacacttttattccttccttaattttgccccgcctcctcgtggtgagcctcatgttacacggcgcaccccagactacttcctt

SEQ ID NO: 534552 - DNA, 307 bp, Homo sapiens
ttactcgcttatgtcctgggatcccctcctgagctaggagaatgaactttcttcagggagctctaaccaaagaaagaagaccactgtgtcttctcttaatttgaaatagcttattggtattttcaccagcccggagtactgtaggagagtacgcttccctgtcttctgaggaatgcatctaaatgcataaggtattcctatttccattaactctatgtgtggtgtcgctgtaggaacgtcaggaagcagagaaaatgttcaagggcgaacggggtgcacagcttgcacaggatgttgccagggagca

SEQ ID NO: 534553 - DNA, 278 bp, Homo sapiens
ggctcggtaccactagtccacggttggctgcgcggcgcctcgtcttggcgggcctataagacgacttagaactggtgcgtgaccagggatactccgactgtttacttataacaaatcatctcgaagtgccgcggcgtgtgttgaggcgatgtgatttctgcccagtgctctgaatgtctaaagtgaagaagtttaatgaagcgcgggtgaacggcgggagtcactatgactctcttaaggtagccgaccggtggactagtagccaaccgtggactagt

SEQ ID NO: 534554 - DNA, 684 bp, Homo sapiens
ggcgccaatgttttagcgcacatccccgcttgatctcactaaagtgggaaagtgaggctcagagagccgaagctggactgtactgctgccatctcggctcactgcaacctccctgcctgattctcctgcctcaacctgccgagtgcctgcgattgcaggcgcgcgccacacgcctgactggttttcgtatttttcttggtggagacggggtttcgctgtgttggccgggccggtctccagctcctaaacgcgagtgatccgccagcctcggctcccgaggtgccgggattgcagacggagtctcgttcactcagtgctcaatggtgcccaggctggagtgcagtggcgtgatctcggtcgctacaacctccacctcccagccgctgccttggcctcccaaagtgccgagattgcggcctctgcccggcaccaccccgtctgggaagtgaggagcgtctctgcctggcgcccatcgtctggatatgacggagcctctctgccaggctgcccagtctggaaagtgaggagcgtctctgcccggcgcatcacatctaggaagtgaggagcgtctctgcccggccggaccccgttctgggaggtgaggagcgtctctgcacggcgcctgtctgagaggtgaggagacctccgctgggagccgcccgtcctgggaagtgagacgtgtac

SEQ ID NO: 534555 - DNA, 328 bp, Homo sapiens
aagtgactgcaccggcaatttctgtttgttcaagtccaccaccaaggaccttctgttcagcgatgacaccaaatgtttcgttaaacttccagagggtaccacacctgaaaaatacttaggagcggagtacatgcaatctgtcggtaacatgaggaagtgctcaacctcacgactcctggaagcctgcactttccacaaacattaaaatccaagaggtgggttgtcactgtggtggagacagatgctccctcccgttgcccatgggcttctcttggtcttcatgtcctgaggggttggggctaactggtgtagtcttcgctgctgtgcc

SEQ ID NO: 534556 - DNA, 303 bp, Homo sapiens
  misc_feature (57)..(58): n is a, c, g, or t
  misc_feature (88)..(88): n is a, c, g, or t
  misc_feature (147)..(147): n is a, c, g, or t
  misc_feature (213)..(213): n is a, c, g, or t
  misc_feature (265)..(265): n is a, c, g, or t
  misc_feature (282)..(282): n is a, c, g, or t
ggcgtgtctagaggatcccagcgctgcagcaatacgtttagcaccaaaacgatgtanntatctcatagagggtaggcccacattaccnaatccctgaacaacaaaggttttatctccaaacccgggtgtcattcctaaaaggctcangtaagaagcttcatggatgaaattttcaatcccagggaagacaccagggccagtagcagagatgcntccagggattccccctgggctgaggggtttaccagtaacacaggcgtgtgcnttaatatcataggtatngctcagcgcggggtaccgagc

SEQ ID NO: 534557 - DNA, 979 bp, Homo sapiens
cgggaggaagtgtctgggcggtcgcacgcactccggggcgacgccgcgagtcgccgtggttcgggccatgcgaggcggagcctgccgtgtctactcgcgcactggcggggcgctgcggggccgcagggcgacgaggacctgtgtcgtgggtcccgagacggggcccgaggccccggtggacgagtctggtgggcgtcgtacgcccaggcatagcgaaacgaggtaggtacggtaggagcgccgcgtactacgcgctcgctaatgcagtcctgtggtcggtgctcaatgatactgatgcatggattgccagcgtccgggggcgatgctcacctacggtcgtctacctggtcctccgtgcgagatgcataagtgaatcgctgcacgtacgtacgagattactaccgtgcgagagtgaagtatattggacaactgtggggtctgtcccgatcatcgacagcagacaaatgctgatggagcatcaacgtgaactcccagtcgccagcctctgctcttacgagaaccatggtgctcgatcgaggagtttggcatggcaaacgaagttggatcgcattgttccatcggcttggtgcggcatcgtacagcccgtcatttgtcctcctacacaatatactgggagctgctactacaaccgcatttggtgccctcggatgtggacctgaggcatggccatcgtggcctccattttgcggactctcgcatggcgtcaaaactacaatcacctagtgagtggcgcaggaacgtaccatgagtatctcccacgtacaaaggagccaggatgggcatggggaatagcaatcatgcacggcttcacgttgggggctccagcgcgccctatcatcctggatcgatcccaaggcctagtcgttctatcaggtttcgtttccatcgtgaggcttcggctgcgccctaggtgcccatgattaatttcctgaagcaactactgtattaacctgaactc

SEQ ID NO: 534558 - DNA, 393 bp, Homo sapiens
  misc_feature (111)..(111): n is a, c, g, or t
ccaattaggattaaatatgggcttgtccaagaaccagctgggggaagtgaatgggggtatggaaggctaccatcaaaatagccaaagaccgggacaaccactgtggacttnccaccgcggccagctatcctgtcgtgaattgatgggtagcggtaatgaggacttatggacactatgtccaaaggaattcagcttaaaactgaccaaacccttattgagtcaaaccatggtacttgaatcattgaggatccaagtcatgatttgaattctgttgccatttttacatgggttaaatgttaccactacttaaaactcctgttataaacagctttataatattgaaaacttagtgcttaattctgagtctggaatatttgttttatataaaggttg

SEQ ID NO: 534559 - DNA, 118 bp, Homo sapiens
atgctgcggtcgactctagacggactcccctttttttgttgttttttacctcttatactttggactatttacaaacgacacaacagaccctggacgggactacggggacacgggggga

SEQ ID NO: 534560 - DNA, 624 bp, Homo sapiens
aaactttaggctaggtacgaggctggggttgaatcggccgaggctggcatcttgtccatggcaaatgctggacccaacacaaatggttcccagtttttcatctgcactgccaagactgagtggttggatggcaagcatgtggtgtttggcaaagtgaaagaaggcatgaatattgtggaggccatggagcgctttgggtccaggaatggcaagaccagcaagaagatcaccattgctgactgtggacaactcgaataagtttgacttgtgttttatcttaaccaccagatcattccttctgtagctcaggagagcacccctccaccccatttgctcgcagtatcctagaatctttgtgctctcgctgcagttccctttgggttccatgttttccttgttccctcccatgcctagctggattgcagagttaagtttatgattatgaaataaaaactaaataaccaagaaaaaaaaaaaaaaacttcggggacattccgtgggaggggttcggggctgtctgggaaacttcttctggtcttgacccgggggaaggaccctccttggaccccggccttcctccgggtttattggaaagggacggcctcagacatggcttggtttcct

SEQ ID NO: 534561 - DNA, 240 bp, Homo sapiens
  misc_feature (92)..(92): n is a, c, g, or t
cacacttattcgacgtgtcacagtcaggaatggcagaccagcaagaagatcagccatagctgacggtggacaactcggaataagtttgactngtgttttatcttaagccaccagatcattccttctgtagctcaggagagcacccctccacccacaagttgcgttgtaatccaagctacttgagaggctgaggtgggtgatcacctaagtcaggagttgaatgaccaatgctgagatctg

SEQ ID NO: 534562 - DNA, 678 bp, Homo sapiens
  misc_feature (91)..(91): n is a, c, g, or t
acccacagcgccaatgtttcggtttttccgggcccccagttagagcaatctttggccccccttgtgtttctcctagtttcccactgtgttnaaggaaaggccctctcccacgcttcggcccctggacgggtgtttcaggcacaaggatggcccagggattaagtttgcctgccactccccccgtgtggagtccggttccagggttaaggttttcccaaaagcacgcagagctgctttccccctttttgagaccaagatcacccaagtcctgcatttccccaaggatgtcaaggccgctgttaataaaatgggcaactttctggttggaccctcccccccccttcgcttggaacctgggaaaaaaaatttgatcatgggtttggatggggccccctatgcccttgagggacccccccagtccctgttggactcgaaaagttggattaaggaaatgcccttttaacgcctgtgccggagccccccccagggggcagcctgtgcccagctcaaagacttcctccaggggtatggccctcaggggtgccaggtgtgagggctcccccccccccccccttggggggaccctgaacctgggacccatgaagctggaagccctgctgggtccgcttttttgaacccagcctgggccccgggcatattaaaggcttttggccccca

SEQ ID NO: 534563 - DNA, 780 bp, Homo sapiens
  misc_feature (416)..(416): n is a, c, g, or t
taatcatgttcaggctgagaattaagttcctattggctaaaagtatccaattaagtgataagaactattcccaaaggttcaccatcatacacaactttagaactgaacatgaattacttccttggagtttttttcattcatatttttgttgtttccaggaatttatttgatattaatgggcgtaaaacagcatcattgtacttaagctatggatgtttttattttatattttctttatttataactgtgccaagtattattttgctacttaccgtgttattctgtggaaagaaaaacctgtaaagtgtttaataaattagccctccttacataaattaaatgtcaaaattttgtaaaatattaatcagaataaatactgactcttaactaaataacaattgaaaaaaaaaaaaaanaaaaaaaaaaaaaaagaggggggggggcgggaaaaaattactccccgggggggcggccaatttagggggaacccggttttttggaaaaggggggccccatataggggaggggtataataaacaagggggggggccgcgctttaacaaaaagctctgggagcgggggacaaactggccgtcccgggggaactccgggggcaacgaacccctcactcgcgggggggggaccatcgtggagaccactcccccaaaggagatttgacgaccctcaaggcaacattatcacatctgaggctgattacggtccaccaagcgcgctatgacagctgcctaaaaattgtcacgagatatattggaacatttc

SEQ ID NO: 534564 - DNA, 403 bp, Homo sapiens
atgtggctgggccattgtttctctctgctgccggagctccaggtctacccttcactgctctgtgtcctcagcgtgtgtggcttcgtgaccggaagatactgggaaatccatagctaagatgccaggaccccctggcctagacatggtgagagtgctgggtccgacatcacgagagaggggaaggagttgctcggaaccggtgggaagtggctgtggcgggactcaggcctccccgcagtcagctccacaatctgctccctgagttctccttgcccagctcggcctcagtctccttcagccgtaagttggcggctgcgcccagccggggccccgggcgtcctgtctcttccctgcactgtgactgtgccctgcctggagtcctctctggcagttctgcacccgc

SEQ ID NO: 534565 - DNA, 973 bp, Homo sapiens
  misc_feature (861)..(861): n is a, c, g, or t
agggccggggtaatcggcgaggcaccgccgaggaaaaccgtgtactattagccatggtcaaccccaccgtgttcttcgacattgccgtcgacggcgagcccttgggccgcgtctcctttgagctgtttgcagacaaggtcccaaagacagcagaaaattttcgtgctctgagcactggagagaaaggatttggttataagggttcctgctttcacagaattattccagggtttatgtgtcagggtggtgacttcacacgccataatggcactggtggcaagtccatctatggggagaaatttgaagatgagaacttcatcctaaagcatacgggtcctggcatcttgtccatggcaaatgctggacccaacacaaatggttcccagtttttcatctgcactgccaagactgagtggttggatggcaagcatgtggtgtttggcaaagtgaaagaaggcatgaatattgtggaggccatggagcgctttgggtccaggaatggcaagaccagcaagaagatcaccattgctgactgtggacaactcgaataagtttgacttgtgttttatcttaaccaccagatcattccttctgtagctcaggagagcacccctccaccccatttgctcgcagtatcctagaatctttgtgctctcgctgcagttccctttgggttccatgttttccttgttccctcccatgcctagctggattgcagagttaagtttatgattatgaaataaaaaactaaataacaaaaaaaaaacaaaaaaaaaaaaacctccggggcctttttgtcgggggggggaaaaagggttttgaaagggccatggtctatgttgttccggcccctttttgtcncaaggggaatcgcgggccccaaaggggcgataatcgaacccgtacttcttcttcttcacacgtccaacgacacagcagccccaaagagaggaaaaacaacgaaacacaccac

SEQ ID NO: 534566 - DNA, 975 bp, Homo sapiens
  misc_feature (863)..(863): n is a, c, g, or t
gctagtacgaggctgggttcgaatcggccgaggggaaaaccgtgtactattagccatggtcaaccccaccgtgttcttcgacattgccgtcgacggcgagcccttgggccgcgtctcctttgagctgtttgcagacaaggtcccaaagacagcagaaaattttcgtgctctgagcactggagagaaaggatttggttataagggttcctgctttcacagaattattccagggtttatgtgtcagggtggtgacttcacacgccataatggcactggtggcaagtccatctatggggagaaatttgaagatgagaacttcatcctaaagcatacgggtcctggcatcttgtccatggcaaatgctggacccaacacaaatggttcccagtttttcatctgcactgccaagactgagtggttggatggcaagcatgtggtgtttggcaaagtgaaagaaggcatgaatattgtggaggccatggagcgctttgggtccaggaatggcaagaccagcaagaagatcaccattgctgactgtggacaactcgaataagtttgacttgtgttttatcttaaccaccagatcattccttctgtagctcaggagagcacccctccaccccatttgctcgcagtatcctagaatctttgtgctctcgctgcagttccctttgggttccatgttttccttgttccctcccatgcctagctggattgcagagttaagtttatgattatgaaataaaaaactaaataacaaaaaaaaaacaaaaaaaaaaaaacctccggggcctttttgtcgggggggggaaaaagggttttgaaagggccatggtctatgttgttccggcccctttttgtcncaaggggaatcgcgggccccaaaggggcgataatcgaacccgtacttcttcttcttcacacgtccaacgacacagcagccccaaagagaggaaaaacaacgaaacacaccac

SEQ ID NO: 534567 - DNA, 1098 bp, Homo sapiens
cgccccccagcaaaagagaagagtagagaagagaaacatctcatagaagcgctagattttgcttctatgctacacgtctttctacgtccctcatgtgtttatcccctcaacgctatgttcattgtgtagttgtcctacccacctttctgtcgtatgagtcctgctttggtgaactcctggtccctcgcgttttcccctttgggagtttatctcatctattacggtaatttatacacacggggggcccatcttccagttctcggatttggcgctttaccgagtccccctgtgttcgtccaccgaagttttccccccgtgccctgccccacccgtgggcccgagtcggatggcgcgatgttagtccccggttttctgtgcctctgagatgagcccggatcccacctgggaccggatatcagcatcacgcactaccccagcgcttttagccatgaactgacagtcccagtgactgaaagcaccattttcaattgtgtggatgatttctcgaaaccactgcccgaacagtcttccacaggtcatcttgtagaactccagctttgttgaaaatcacggacctcagctacatcataccctgaccccgagccaagctttccctatggttcccaagaccactagtattccaccaacctctgtatagtgtatgttttgccacaatttaatattaataccacgaggaagactccctctttttcatcacccgtatgaattttttataaagtgttttttaaaaaatatttcaagtatacttattaactaattcacccccagtggtttgttcttagatgattaaggagagactatattctagagtcactagtctgattttttattgtgactttctccacgccctggtctgaatttcttaaggttttataaaccaatagctgctatttattagctgccagaatagccactttagaactatttgcacgcattcagactttccagaataaagatgtaaatgactggcccataattaccctttttaggaaggtgttttgaattctgtatgtatatattcactttttgacatttagatatgcccaaagaatttaaatccaaagccctaagaaatta

SEQ ID NO: 534568 - DNA, 979 bp, Homo sapiens
  misc_feature (867)..(867): n is a, c, g, or t
ccacgcgtcgcggacgcgtgggtcgacccacgcgccgggaaaaccgtgtactattagccatggtcaaccccaccgtgttcttcgacattgccgtcgacggcgagcccttgggccgcgtctcctttgagctgtttgcagacaaggtcccaaagacagcagaaaattttcgtgctctgagcactggagagaaaggatttggttataagggttcctgctttcacagaattattccagggtttatgtgtcagggtggtgacttcacacgccataatggcactggtggcaagtccatctatggggagaaatttgaagatgagaacttcatcctaaagcatacgggtcctggcatcttgtccatggcaaatgctggacccaacacaaatggttcccagtttttcatctgcactgccaagactgagtggttggatggcaagcatgtggtgtttggcaaagtgaaagaaggcatgaatattgtggaggccatggagcgctttgggtccaggaatggcaagaccagcaagaagatcaccattgctgactgtggacaactcgaataagtttgacttgtgttttatcttaaccaccagatcattccttctgtagctcaggagagcacccctccaccccatttgctcgcagtatcctagaatctttgtgctctcgctgcagttccctttgggttccatgttttccttgttccctcccatgcctagctggattgcagagttaagtttatgattatgaaataaaaaactaaataacaaaaaaaaaacaaaaaaaaaaaaacctccggggcctttttgtcgggggggggaaaaagggttttgaaagggccatggtctatgttgttccggcccctttttgtcncaaggggaatcgcgggccccaaaggggcgataatcgaacccgtacttcttcttcttcacacgtccaacgacacagcagccccaaagagaggaaaaacaacgaaacacaccac

SEQ ID NO: 534569 - DNA, 941 bp, Homo sapiens
gattgcgtatggagaggatcggtctgagtgctcaacgtgtgtcggtactggatggggtaaatctgtgcactttgtgattggtcctgtgcgtgagatatacccgcatgggccagtaccctccgttgggctgtgtcccctttagtaacgtccgaccgccctgggctgcttagaaattcctggtatcgctagtaacggggcggagtgtaaagcggagatccacgaatagtagataagggcctgaaggaacctgagcgcatatggtagggagacctcacataatgggataccggacgggtgttcataatgagtacaccacgaggttctagcagaaagtcgcttgagcaggggactggctgcctggcctttaagtgtatgtaccagcactctttggcagtaacagggatgcagtgctagagtatacactttagactggtggtgacactagtttggtgactagtctgattattctacgtcgagggtgagaataaggcgcgtatattgtgaattaacatttttgtttgataatgagggagggaatggatttttgagacgatgggcgatcgtgcaagagtgcctcttgaggctgggagttgacctggaaattgtgcattaagagaggaaggggcagaggagtgaaataggaagtactcgggggtacgaaggttgcacgccggttgtggacccaatcgtagtttccgattgtgtttcggctggtcctggggcgcacctcctttgcatgaagatagtcgcacagtgtaatacaacgggcatgccgtgtaccagtatccatgtctccgagttgtaaagccatccgtaggaaggaggcatcgcatttgggaacagtcaatggcctggcaggcgcaccggaacgaagcccgcgccaaaagaggtccacgccaaagctccccaaagcacccacctgcaccgaagtagccggacaa

SEQ ID NO: 534570 - DNA, 1202 bp, Homo sapiens
  misc_feature (92)..(92): n is a, c, g, or t
  misc_feature (1090)..(1090): n is a, c, g, or t
cacacttattcgacgtgtcacagtcaggaatggcagaccagcaagaagatcagccatagctgacggtggacaactcggaataagtttgactngtgttttatcttaagccaccagatcattccttctgtagctcaggagagcacccctccaccccatttgctcgcagtatcctagaatctttgtgctctcgctgcagttccctttgggttccatgttttttttgttatttagtttttatttcataatcataaacccgccgaggaaaaccgtgtactattagccatggtcaaccccaccgtgttcttcgacattgccgtcgacggcgagcccttgggccgcgtctcctttgagctgtttgcagacaaggtcccaaagacagcagaaaattttcgtgctctgagcactggagagaaaggatttggttataagggttcctgctttcacagaattattccagggtttatgtgtcagggtggtgacttcacacgccataatggcactggtggcaagtccatctatggggagaaatttgaagatgagaacttcatcctaaagcatacgggtcctggcatcttgtccatggcaaatgctggacccaacacaaatggttcccagtttttcatctgcactgccaagactgagtggttggatggcaagcatgtggtgtttggcaaagtgaaagaaggcatgaatattgtggaggccatggagcgctttgggtccaggaatggcaagaccagcaagaagatcaccattgctgactgtggacaactcgaataagtttgacttgtgttttatcttaaccaccagatcattccttctgtagctcaggagagcacccctccaccccatttgctcgcagtatcctagaatctttgtgctctcgctgcagttccctttgggttccatgttttccttgttccctcccatgcctagctggattgcagagttaagtttatgattatgaaataaaaaactaaataacaaaaaaaaaacaaaaaaaaaaaaacctccggggcctttttgtcgggggggggaaaaagggttttgaaagggccatggtctatgttgttccggcccctttttgtcncaaggggaatcgcgggccccaaaggggcgataatcgaacccgtacttcttcttcttcacacgtccaacgacacagcagccccaaagagaggaaaaacaacgaaacacaccac

SEQ ID NO: 534571 - DNA, 982 bp, Homo sapiens
  misc_feature (12)..(12): n is a, c, g, or t
  misc_feature (27)..(27): n is a, c, g, or t
  misc_feature (870)..(870): n is a, c, g, or t
acatggctagtngaggccgcgtgtaantcggacgaggcgaggaaaaccgtgtactattagccatggtcaaccccaccgtgttcttcgacattgccgtcgacggcgagcccttgggccgcgtctcctttgagctgtttgcagacaaggtcccaaagacagcagaaaattttcgtgctctgagcactggagagaaaggatttggttataagggttcctgctttcacagaattattccagggtttatgtgtcagggtggtgacttcacacgccataatggcactggtggcaagtccatctatggggagaaatttgaagatgagaacttcatcctaaagcatacgggtcctggcatcttgtccatggcaaatgctggacccaacacaaatggttcccagtttttcatctgcactgccaagactgagtggttggatggcaagcatgtggtgtttggcaaagtgaaagaaggcatgaatattgtggaggccatggagcgctttgggtccaggaatggcaagaccagcaagaagatcaccattgctgactgtggacaactcgaataagtttgacttgtgttttatcttaaccaccagatcattccttctgtagctcaggagagcacccctccaccccatttgctcgcagtatcctagaatctttgtgctctcgctgcagttccctttgggttccatgttttccttgttccctcccatgcctagctggattgcagagttaagtttatgattatgaaataaaaaactaaataacaaaaaaaaaacaaaaaaaaaaaaacctccggggcctttttgtcgggggggggaaaaagggttttgaaagggccatggtctatgttgttccggcccctttttgtcncaaggggaatcgcgggccccaaaggggcgataatcgaacccgtacttcttcttcttcacacgtccaacgacacagcagccccaaagagaggaaaaacaacgaaacacaccac

SEQ ID NO: 534572 - DNA, 764 bp, Homo sapiens
  misc_feature (8)..(8): n is a, c, g, or t
  misc_feature (48)..(48): n is a, c, g, or t
  misc_feature (139)..(139): n is a, c, g, or t
  misc_feature (187)..(187): n is a, c, g, or t
  misc_feature (686)..(686): n is a, c, g, or t
ccccttcngtcccggagtagctggactagggggcatcccaccacatcngacttattatggttttgggttgaaatacaccggtggtttctgaactaccatttagttaaaagaggtttgaaaagaagggccccaaaacggntttaagagtaacacccttaatcactaaataaatttatactgcccaaangattaagtttgaatttcattcaattacagtaacagcagaagtgcagtaaagcatttacacttatgggcattactactttattattaggaaagacaatccattttcctcaaaataaacataccaactgcaaaccaagagtttgccaacagtacacacccaacagctaaaaataccataattggcaataggcttccattttgacaaggctttcagtgtatgttgtaattccaatgcttcatatcaagctggttcaaacaagattctttcaacacactaatatttcaattaaaaaggcatgttcctttgataagatctatttttcaactgtccactaaatttcttaatggctatctctttagagactcttaattaaacaagttatgattagagtggctggcgttaatattgccaatgcaaacactgaccttttcaggaagagaaattgaagagggttataagaattctcaaaatagggccgggcatggtgctcacgcctgcnaccccagcactttgggaggccgaggagggcagatcaccggaggtcaggagttcgagaccagcctggccaacgtggtga

SEQ ID NO: 534573 - DNA, 285 bp, Homo sapiens
  misc_feature (2)..(2): n is a, c, g, or t
  misc_feature (11)..(11): n is a, c, g, or t
  misc_feature (15)..(15): n is a, c, g, or t
  misc_feature (49)..(49): n is a, c, g, or t
  misc_feature (52)..(52): n is a, c, g, or t
  misc_feature (64)..(64): n is a, c, g, or t
  misc_feature (67)..(67): n is a, c, g, or t
  misc_feature (79)..(79): n is a, c, g, or t
  misc_feature (97)..(97): n is a, c, g, or t
  misc_feature (100)..(100): n is a, c, g, or t
  misc_feature (104)..(104): n is a, c, g, or t
  misc_feature (107)..(107): n is a, c, g, or t
  misc_feature (132)..(133): n is a, c, g, or t
  misc_feature (156)..(156): n is a, c, g, or t
  misc_feature (167)..(168): n is a, c, g, or t
  misc_feature (178)..(178): n is a, c, g, or t
  misc_feature (212)..(212): n is a, c, g, or t
  misc_feature (214)..(214): n is a, c, g, or t
  misc_feature (230)..(230): n is a, c, g, or t
  misc_feature (236)..(236): n is a, c, g, or t
  misc_feature (249)..(249): n is a, c, g, or t
  misc_feature (264)..(264): n is a, c, g, or t
  misc_feature (275)..(275): n is a, c, g, or t
  misc_feature (281)..(281): n is a, c, g, or t
  misc_feature (283)..(283): n is a, c, g, or t
gntaaacaganaatngtaggaaagaggggtggtttggtaagcgaatttnccntggtttcctgcnccncggatgacgacnttagtagaggctgaatcnacnatcntcngaaaatgcagctgcatgtcctggcnncgagtgctgtattgtaaagggcnagaatatcacnngaaatagacnaagatgttaagatttacatttccgttgccttgananttccctgttactcccnacttcnccctatggtgacngtttatagaagaccntaaataaaccnctacancngg

SEQ ID NO: 534574 - DNA, 971 bp, Homo sapiens
  misc_feature (22)..(22): n is a, c, g, or t
  misc_feature (859)..(859): n is a, c, g, or t
tacgggctaaggtagcgaggcngggtgtgggaaaaccgtgtactattagccatggtcaaccccaccgtgttcttcgacattgccgtcgacggcgagcccttgggccgcgtctcctttgagctgtttgcagacaaggtcccaaagacagcagaaaattttcgtgctctgagcactggagagaaaggatttggttataagggttcctgctttcacagaattattccagggtttatgtgtcagggtggtgacttcacacgccataatggcactggtggcaagtccatctatggggagaaatttgaagatgagaacttcatcctaaagcatacgggtcctggcatcttgtccatggcaaatgctggacccaacacaaatggttcccagtttttcatctgcactgccaagactgagtggttggatggcaagcatgtggtgtttggcaaagtgaaagaaggcatgaatattgtggaggccatggagcgctttgggtccaggaatggcaagaccagcaagaagatcaccattgctgactgtggacaactcgaataagtttgacttgtgttttatcttaaccaccagatcattccttctgtagctcaggagagcacccctccaccccatttgctcgcagtatcctagaatctttgtgctctcgctgcagttccctttgggttccatgttttccttgttccctcccatgcctagctggattgcagagttaagtttatgattatgaaataaaaaactaaataacaaaaaaaaaacaaaaaaaaaaaaacctccggggcctttttgtcgggggggggaaaaagggttttgaaagggccatggtctatgttgttccggcccctttttgtcncaaggggaatcgcgggccccaaaggggcgataatcgaacccgtacttcttcttcttcacacgtccaacgacacagcagccccaaagagaggaaaaacaacgaaacacaccac

SEQ ID NO: 534575 - DNA, 985 bp, Homo sapiens
  misc_feature (873)..(873): n is a, c, g, or t
aaactttaggctaggtacgaggctggggttgaatcggccgaggggaaaaccgtgtactattagccatggtcaaccccaccgtgttcttcgacattgccgtcgacggcgagcccttgggccgcgtctcctttgagctgtttgcagacaaggtcccaaagacagcagaaaattttcgtgctctgagcactggagagaaaggatttggttataagggttcctgctttcacagaattattccagggtttatgtgtcagggtggtgacttcacacgccataatggcactggtggcaagtccatctatggggagaaatttgaagatgagaacttcatcctaaagcatacgggtcctggcatcttgtccatggcaaatgctggacccaacacaaatggttcccagtttttcatctgcactgccaagactgagtggttggatggcaagcatgtggtgtttggcaaagtgaaagaaggcatgaatattgtggaggccatggagcgctttgggtccaggaatggcaagaccagcaagaagatcaccattgctgactgtggacaactcgaataagtttgacttgtgttttatcttaaccaccagatcattccttctgtagctcaggagagcacccctccaccccatttgctcgcagtatcctagaatctttgtgctctcgctgcagttccctttgggttccatgttttccttgttccctcccatgcctagctggattgcagagttaagtttatgattatgaaataaaaaactaaataacaaaaaaaaaacaaaaaaaaaaaaacctccggggcctttttgtcgggggggggaaaaagggttttgaaagggccatggtctatgttgttccggcccctttttgtcncaaggggaatcgcgggccccaaaggggcgataatcgaacccgtacttcttcttcttcacacgtccaacgacacagcagccccaaagagaggaaaaacaacgaaacacaccac

SEQ ID NO: 534576 - DNA, 112 bp, Homo sapiens
  misc_feature (112)..(112): n is a, c, g, or t
ggtaatatacagaattataatggaaccatgtagttttaaaaactaaccctggtgcacgtgcatacataatcttttccttggtcaataacggcaattttcatttcttttaaan

SEQ ID NO: 534577 - DNA, 324 bp, Homo sapiens
cgacgtgccacacacctgtgcgcagtcaaactgacacatgcacacacattttgttttttaatttctaaaagggaagcaagttaatattgctggatgcatgtgccttctatgttcctaactcagactgactttggagacctttccagtcactaccagcacatgaacactggcacgtcagctaacatcacagagcttcagtttctgtaaaatggataaatgacaattactgtctatggacttggtatgtgccaaacactcagtgtatatgttaacagatttcatgaaatgaaagttcaaccttattagggccaaaaatgtcgacac

SEQ ID NO: 534578 - DNA, 833 bp, Homo sapiens
  misc_feature (4)..(4): n is a, c, g, or t
  misc_feature (14)..(14): n is a, c, g, or t
  misc_feature (99)..(99): n is a, c, g, or t
  misc_feature (807)..(807): n is a, c, g, or t
  misc_feature (833)..(833): n is a, c, g, or t
tttngttatggaanatatatctgtttttccctgcagctgtgtacggaagtcaccagactttggagaacccatggaaagatccaccccaaaagaaaaagnctattgataaaccattctgaaactgaataaatggaagccccctatgcatcctatcaactattatattcaagttgttctattcatctataatcacctatttaaatccaaaaaagcatttcaaaacaaaaacacgtccttcaaaagctctgcctcgcacaaaatctgtaatactttgctgtatatcctaccccaaacacatgccagagaggtcaatgaaagaatgatgcgaaagaaaggccacttgttggcccgccctgatgggaggccgccgaggatattttgtatttcgactgtcctgtgtttgtattctccccggctcacccccgctccccacccctctgcctattactccccccactatagctcctccatccagtgctctccatccctcttttgtagtcgcctactcgtccctccgtattccccccccctcgccagatcgtgttcgactccaacactgctcctcgtatttgcttacatcaacttactcccatttgtttatagacgcgcatgtgtcgtgattaatgaagagttgctatagaaaaataaattcaactccccaacgtccaacacccaacacaaacaattttatttattccttcattcgattcccgagtgagttcctatctaaccccacgtcgctccacagggagtcgacccctccaatttctccacacaacctctaagttccttaccttatactcgcgncatttttattttagcatttcctcctn

SEQ ID NO: 534579 - DNA, 111 bp, Homo sapiens
acttcctaagggaacttcgtgctggcgctaagggatattcccttagagcagcacgaatacccttagacagatgaataccttagcacacagaactagcaccagcacgaatgg

SEQ ID NO: 534580 - DNA, 214 bp, Homo sapiens
cgcagtgacagcacaaaagtgtatatttatactctttggggagatggtcatccagaaaatgcagaatgtgtttctattagatttccctttttattagtttatgaatgaaacaacaatacaatgttgaaaaatacttataaaggtttcacacatactcagaagtatgttctctgtgggcccaagtttgagaaacagtgatccgtaattggggttt

SEQ ID NO: 534581 - DNA, 127 bp, Homo sapiens
tgtcgacttctgctcttggtgtgagataaggtagaatcggtcggatttctggagtactggatcatgatagggacactcaagtggtagaggtcatcttcactgagacagggaaaatgggaggctataa

SEQ ID NO: 534582 - DNA, 214 bp, Homo sapiens
  misc_feature (57)..(57): n is a, c, g, or t
  misc_feature (112)..(112): n is a, c, g, or t
cgtggtgtgggtctagatgtggcttggatcctccactgctgtggctgtggcgtaggncagcagctgcagttcatattcgactcctagcctgggaacttccgtatgcctttgntgtgaccctaagaaaaaagttataaacaatttttatcttaaagtctattttatctggcattagtatgtatcacctttccaatttttggatgggagtactggt

SEQ ID NO: 534583 - DNA, 807 bp, Homo sapiens
agcgggctgcccgggcggcggcgatgctgaggccgcggctggctggcgtgccgagtgggcggctgctggcctgggagctgctgggcgcctcgtgcgctgctgatctgctgtgcgtgtggctggtgcggctggctgggccctgcggctgggaggtctgggccgcagcgggaccccagttcctccgccaatgcgcggcctgctgccccgcctcaggtgacatgacaatggatgctctgttggctcgatttgaaacttctgaatccagatgaccttagagaagaacatcgtcaaagccggagttgacacatgtggacccattacatcaactacaaggttcatttttgagaacacaattggctcaggctttactggacgcaaggaggaaggctgtcttctttctactaccatgaggcaggtgtcaccagctctcaagccaggaagcccaacaaaggattttgaagccagcttgaagggaacccaagtgaatcaggctggattatctgaagacagagatatgggttacaggtgtgggcctgaatcctccagaagggggaagcttgtgacatccaagaacttgctcggtgacccctaattgacagcggacacctacagagcttggagcgacttgcgtctaaggagccggcctgtacatatgggggtgtgtccaggtgttatgaaggaacgtccagcggagaacttgaaaggatctatagttactgaaagatacaaaggaagccattgcaaagctgtcgagatgatcaaagggttccgaatttaaggctattcaccagagaagcacgctgagaa

SEQ ID NO: 534584 - DNA, 996 bp, Homo sapiens
agcctcacccctggtcctgtgacccccccacccacacagcacacatacttcaggcttggattctaggctccaagtggcagcatagaagcagcagcctctctccaaaccctggctctgtgagccataggaaccagcactaggtcatcttctgacatagccctggtgaaggtgtgtgtgtgtcggtggccacactcgctaaggctttgtgtctaagaattgacgtatttgtacctaggtgtgagggaaccagggtcagccagcctttttcagatggcgccaggcacacacactacatcaatggcttgctggtggcttcaccactatccaggtgacttaaaagagtgtctggaaacatgtccctggtatacttcaattcctactacaccattgtaatgaccactggtgtcaggtaacggcacgagagagttaacaacctaccagtcgtggactagacatcagtcgcattgtcccaaagacaggcttcaccaatgattgtcgcatatgcagtggggctcacatcacgccgccatgaacagtctctccccaaatccatttagtgcttcactacccccgccaagcacagccctaacaacacattctcgtccactttcctgttcagccacccccagccgcaatatacttgccagcaccccagagcatatgatgtcacttgctcaccttatcttccttccacattcctatactaagccatctgaggtctccacgaatccactcttgcgaaacgccaatgagccaaccaatccggagccgagcgcaggccaacctggtgcatggaccaggaacagcatgcttatcacgccgatgtccagcactgtgcacacgccccagggccaccggcttacaccctctcaaacggtcgaccccagcgcacctcactccggccgccgccctcccacgggcgggcgcatgtccttcgaacagcgcctactcccgccgccacccccctggccccccagcgcccccacctcccctcac

SEQ ID NO: 534585 - DNA, 492 bp, Homo sapiens
ccgtgccctccttcagctcagcctagcttggtcgctctccccggcctctctgtttcctgtttctttaatgatgaatctggctgtgctgctggctgaggcaggtgggcctgtgtgccctggtcgctcggagtcgccgcccagctgtggggttggtcgtgtggctggtgcagtgtcctccaacagcgtcctcacccggaacattctgcgtgcacagggactgtggcatggggcgtgctggtaattggaagttaagggcagcagggtcacccccaccccacagtacccgctccgcgcagccctgcaaggcctggccgcagcccctcctcgctgtcctccaggacctgcagggcccatgtcaatcagactggacgctgcctggatgtactgtgctgttcttcccaagtcagtcccctacctggttttccaattttaatttaataactttatttacaaaggtgtgaaatgaagataagaaaatgaaaacagcaaaaa

SEQ ID NO: 534586 - DNA, 112 bp, Homo sapiens
gtcacgagttcagtgaatcgtatcctgtcctcgctgtttcctggtgtcaacgcggcacgtgcctcctgtaactccttgtcctcgctgtttccagtgtacaacgacggcccgt

SEQ ID NO: 534587 - DNA, 725 bp, Homo sapiens
  misc_feature (75)..(75): n is a, c, g, or t
  misc_feature (339)..(339): n is a, c, g, or t
aaggtggtcaccttctgtgactatgcctacaacaccttcaggtcaccacggtgcatgtcctcagctgaagaaggncccaaaaggagggggggggggggaaaagaaaaccgttcttcctgcaggccaccgacaagaactcactactgggcatggagggtgccaacagcatcttttccgggttcctgctctttccagatatggaggcctgacctgtgggctgcttcacatccaccccggctccccctgccagcaacgctcactctacccccaacaccaccccttgcccagccaatgcacacagtagggcttggtgaatgctgctgagtgaatgagtaaatnaactcttcaaggccaagggacagtggtctaattcaactctgtgtcccagcacctggcacaccagaagtgcgcctgggtgcggcaggagaatcgcttgaacctgggagatggaggttgtggtgagctgagattgcaactctgcactccaccctgggtgacagagtgagactttgtctcaaaaaaaagctgtgaggtgaaatctgttctgtgaaggtggaacttggaaaggcttgtaaggatggtggtcccatgaagaggatgaacaaaccaagggaactgtcctcttgctggtttgggtgatgtcccatcacctgtcactttgtttgtttgggctgcagtggaccaatggtttcccaggcacactgaagtgacatgtagatggattg

SEQ ID NO: 534588 - DNA, 443 bp, Homo sapiens
ctctgtggacccccaggtcttttcccctcaaattccttcagctgttggacacagtactcatcaaagatctcatacaccagaatgataggttaaaacaccttttctgtaaattaggaaagggcaattttagtcagggaagcctcctcgtcacatttgtggctcagagggaacactaggaaccagagtgaagagaagtgagattggagacaaggagcctagtgtggagcttactgcagaggctctggtgagagatggtgaaggtttggaccaaggcagtaacggtggttgcttttacttacacagggtacatcctgattgtcaatggatggactatgaatggaacatgactattcgaagtataaaaattgacgcttgaccatgttctctctgtgggagtttttaggtagcttacaaaacttttgaggggaaaaggcctgggggtc

SEQ ID NO: 534589 - DNA, 468 bp, Homo sapiens
atcaatacgatacaaaatgattcttgtagaatcctgaatccataaattacacttttttatttttcaaatttcacaaaattcacaggggtgctgacggtaataaccactatgggaaaacatcccgtaaacctgcctgtggctatgccaatggagtgactgacctggtgacatctgtttgacgcttgcttggtgtggctggtacaatgcccccgttgtgcatacacttggtccatcaggggtgccgggagggttttctagattatggggggcgggtaaaattgggacttttttggttgtcccttttttgatggggtgtgggggtatagtactcagcttatgccctaaaataccatgtttaaaaaccccctgaccgtattggtgtgggtgtgtccgtgtgagtgtgtgtttgtttccttctggcaattacagcttggtcttctggaccttagtgaattctttactcttttc

SEQ ID NO: 534590 - DNA, 400 bp, Homo sapiens
  misc_feature (4)..(4): n is a, c, g, or t
tttntctgttgttttctggcatccactgttgatagatattatttgtgatctacttgtcaattctttggatatctttcttacctccagtagtttttcactctcttggtcctggtcaggtatggcagctcatgcctgtaatcccagcaatttgggagaccacggtgggcaggttgcttgagcccaggagtttgaagaacaaactggtgcaacacgacaagaacctatctctacaaaaaataacaaaattaaacgggcgtggtgggcatgtatctgttgggcccagctattcacgaggctgaggcgggagggatcacctgagcctggcagggtcaaggcacagtggaccgggattacgcccctggcggccaaactggtcgacaggctgggggattcccttcac

SEQ ID NO: 534591 - DNA, 571 bp, Homo sapiens
aagttagtcgggacctgttgtgagctgcctatgcagctgtcaagaaacaaccacgtgagtaagcttggaactggattctccagctccagcgaccctttatttgactgcagccttgtgggagatcctgaactacaaccacttagttgagccgttctcagattcctgagtctcagaaactctatgatataataaacatttgttatgaactgcttcagttttcagcaacgtatacacaatagacaactgtacgactactaaaaaaaattgagtaaaaaaaaagagtcttgaaaaatgacaagatgaagagaccagaagtgaacgtcaattcaaaaatactaagatttctaagtcaagagaaactgttagggcctggaggactaagggtgagatgatgattatgtgatgcactaagtttgagctctagggaaagatctaatatagatctgaaagtcatctatatagttaacttcaatgtatgacattgtccaaagcaaatatggaacatgtgaaaaagcacaaggtcaaaaattagaacatggcacgaacacagtaaagagaagaaaatgagctg

SEQ ID NO: 534592 - DNA, 440 bp, Homo sapiens
agaagacggacattgcttgccttcgtgaaggagatcctgggagaagactcataggggctgggcctcggaccccactccggccctccagagccccacagccccatctgcgggggcagtgctcacccacaccataagctactgccatcctggcccaaggcatctgggaggaaccgagggggctgctcccacctggctctgtggcgagccatttgtccaagtgccaaagaagcagaccattggggcttccagccaggcccttgtcggccccaccagtgcctctccctgctgctcctagacccgtcttcaagctgctgaaaatcctggcctgaagggggccttgattgcccctgggattgcttgttgcccttgacaagaaggcttgcaagtgctgggtgggattgggccaccgctttgccaaccttgattgcattccaagttgg

SEQ ID NO: 534593 - DNA, 919 bp, Homo sapiens
gcctgcgcacagtcacatggtcacatctctgagagagaacatgttcactgttttcccacagggtactctttaccaggaaaacccggtgaacactatgcaaccaacacgtcccctttttataaaggtgtcggtacaacaacatgagcatggccatcaaggtaccacgtatttccgcttggcacaatcggtggttgcccccaacccaatgtcaatgtcggacaaaatctggaggcactctttaccagatctctggtgatcgctgcgcctccggacccctgtgtaaactgtcaggcagcacaagccagtgtgtgtggcgcgcccctcgccgtaaatccgacggggagcccccccgttctccctttcgcgcaaaggccgaagaaaccgtaggtcatcaaaggtcagggggcaaaacctccgacttttcggctccgggcgtggacgacgaccaaacctcttcatgcgttgtgaaacagggaaacacctctttctgtggaaagcaccaacaccatatcggcgcgccccgccggaaggtttgggcggcgcaatctccccaagtgaacgaaaaccctgtgggagtagttataccagaaaacgttccgccccctaaaatcttccccccttgcgagcaccgccgcggggcacttgttcccgcccccagacgaaacaggcggccacccacaatacaggagttggttgctgacaaagaatgcctcgggcaatgtctttagaggaaattgtacagcagtattgtatggagggcagatgatcataaggacgcgacgcatagtctccccatggtccggcattggcgtgcccgccgttagaaccgttgtggggaaataccggggtgtgacctgtctaactggccgtctccccccccaaaatgaaaaaccgccctttgataccccaaacaataaca

SEQ ID NO: 534594 - DNA, 315 bp, Homo sapiens
aaacggctagctaaagacaagtgcatctgtataggggtacaggtaataaacctactgcaacatctataagatccacaaatgaagggatataacaataatgtcataggtgagaaacacagcaaccatgacttaaccctatgaatgtggaggctatcaacaaagaatgggcttcaaacattactaagaaattgacaataatttagttaaatatattttctcattatgtaacgacttctccatctccagtgtaatccaggccagtgctaaaaatccagatgctgttagtaacctacctcagtcacagctatacctatt

SEQ ID NO: 534595 - DNA, 892 bp, Homo sapiens
  misc_feature (428)..(428): n is a, c, g, or t
taaagaaaaatttccaaaggggaaaatttttttaaaaaaaattaaagagccctttttaaaaaagggggaaaaaaaaaacttttaaagagaggagaagattgtttatgttgatttgagacaagaaacatttgggggggaggataacaatgttggtgggaagtcaatatagcgcttgtgggggtatttaaaaaaatttccccagaaaaagagggggcttcaatattttaagggtaaccaatgtgggacaaaatactttttgcacctcatatagtagagctgctcctaatatatgttttgatggtgggaaacaatcttcatgtgtggtgagacgcgaaataatggggttctaaccgaagtgtttgtgggatattacatgattatgtttggttataacttataaaagagctatgtgggggggagaaattatnattctccgaatgggatgggttcttttaaaaaaaaaacctcctttttatgtcgggttttctgataataaaggtggggacactatttgttggaaacaaacgtggtggttgaaagcggggcgtttattaaacttcgaccgtgggtggggtaattatcaagaaactccgggggtggtgtgtccgcaccacaaaattgatatattctctcatataaaggtatgtttggcggaagaaacataacgaggggaaggggaggatattagaacaggagggtcattaaaaacgtggtgtttttgggggacgaggaacaagccggattattatatcttttatcaactaggttctgtggtagtttgtgccacgtaatattattttcccctaagaggaggatggttctcttggtggcccaatttggggtgggcattaaaaacaatacagtttcaaacaacacattttttcacgcgctg

SEQ ID NO: 534596 - DNA, 403 bp, Homo sapiens
ttcctgctgctccctcttcaataggtctccttgctcattggtctccctctatctgaatctcatattcagaaacgctcccactgctcccgcggtctgagtgcccctcctcctgtaagcggctgcgcaaagctttggtgggggttcgttctcccatcccggaggtcaactgctttgcggtggggttgccgtcctgagagcaatatggaggagagatcttccactgggtttggcacaagaaagctgctgtcctttccactcccgtttcgactctccgggatttctcttcaagcaccgacggtaaacagagtcaacatctccaacgctgattttggaatggatgctctctaaggatctgcgtgcccttgtcaattgacacactggcatctgaagagagaggcagcag

SEQ ID NO: 534597 - DNA, 1011 bp, Homo sapiens
attgcacacttaaaagacatcagtggatgaaatcacaagtgggaaaggaaagctgactgataaagagagacacagacttttggagaaaattcgagtccttgaggctgagaaggagaagaatgcttatcaactcacagagaaggacaacgaaatacagcgactgagagaccaactgaaggccaggatatagtactaccgcatgcttgaacagctggaagagacaacgagagaaggcagaacatggcagggcagcaggtgttgactagccttcatctgcagagcaaagacgtattgaaacaacagtttgtctgctgcaacctcacggaattgctgcatacttgaaagcaaaaccaatcacactccgtttatcacagactgtggctccaaactgcttcaactcatccacataaatacatattcatgatcatggatacatacagctgaaagatgctctggagaacaatcagcagtggctcgtgtatgatcacgcagcgggacgtctatgtcaccaggacttttagcccacgatcttgcagtcggataacgaaacacggacaccagctgctccttcactcccacagccgaccaataaagcctgaactccgaaggttatcttcacatgacgcgacgcacgaactgtctacgaccgaatctccttggcgccaggtgccaaactcgccatcctgtcggtgtggaccgagcaacgcaataatctagccctgacgattctgaccttggaggtgggacgtatgaaacgcacacactgacgcaaccccttacgcatgttccctttaaatccagtgacgacttaccaaccgaagggcacatgtcgcaacctgtgacgagtgacacgatataacatgatagatcacacagctcgggttgactatccttgtcgcgtaccgcgtctgcgtcctaaggactgaacagcgccatctcacggtccgacttgcacatacgtatcgctgcacaagataacgctgtccaacgccctataactaatactagagt

SEQ ID NO: 534598 - DNA, 555 bp, Homo sapiens
  misc_feature (87)..(87): n is a, c, g, or t
tggttgggcctccctccttccccccggtgggttttgtgggggggggtaggtgggggtttccccaactcttcccgcccccttctaggnacttttcctaggcccagggggggccccagacccagggttgttcccttccccctttccggggggggttttcccaaaccggtgtcgccttccctcgcggtgtgaagggttttttttccccggccttccgtgtgggtggggggggcgtgggggggcgggggaaaaattccaaaacccccccccccgggtggggttccgggggctctttttttttttttaaaagccccccctgggccaaaaccgggggggcccggggggggttttttttttttcccttttgggttggggttttgccccccccccccccccaaagggccctttcctttttccggggtttttggttgggggggcgggccacccccccccccccgggttttttggttgggggggggggttttgggggggccccctttttttttttttccggggccccgggtggggtttttggccccccccccccccctgggggga

SEQ ID NO: 534599 - DNA, 919 bp, Homo sapiens
ctgcaactgtcagaacttggtattgtatatgctgcccgctgactagcagctggactgatttggaataaagaaaatgaatacgcattatagggttcccctacaaaacattctactattcacaatacttttgaaatgggtataagtcagttgactttacaccccttgcgaagagcatctactacatgtgtgaggttcacttgtagttgtatgatcccttcccctcgagctctccttccgtgctttctattaaagttgaatctgggtgcgtggcaggctatactctctaatacttcattatagtcatcagcgtcattgtcctttttactcgtagacccatgaaaaaggaaaacttagtgatgataatctataaaatagtgtaatttattcattaatagcatgtcacgcgcatgagagattataacgaatcatattgttctgggaagatagctagtcgggcagcctatagtggtgtaattgtcatggtcattgtggtgaaacattgagacctgtgtacatagttgtaaaattggactagcgtgttctggtcatgatttgtgtcaacgtgatatatatagtttctgtatgattgattacttattctggatatagaaaacctacttgagcaataagttaagtttccatggaattgatcgagcaatttctgccaattaaaggtgactatttatgtaccggtaagtactgacagtaagattatattacagctctgaacttgcttgggggtaggcaggcttcattagctttcttgtcctaatccaagcgttgatcgggtgagggagtggggttctggaggaaataaaacgcttgaatgttgtaggcacaaaatggggctaaaaagagtaattggggaaaagttgggcacaacaacggtttgttgggaaaattccggggattccttaga

SEQ ID NO: 534600 - DNA, 979 bp, Homo sapiens
  misc_feature (867)..(867): n is a, c, g, or t
gaacctaggctaggtacgaggctgggtgttcacgcgaggaaaaccgtgtactattagccatggtcaaccccaccgtgttcttcgacattgccgtcgacggcgagcccttgggccgcgtctcctttgagctgtttgcagacaaggtcccaaagacagcagaaaattttcgtgctctgagcactggagagaaaggatttggttataagggttcctgctttcacagaattattccagggtttatgtgtcagggtggtgacttcacacgccataatggcactggtggcaagtccatctatggggagaaatttgaagatgagaacttcatcctaaagcatacgggtcctggcatcttgtccatggcaaatgctggacccaacacaaatggttcccagtttttcatctgcactgccaagactgagtggttggatggcaagcatgtggtgtttggcaaagtgaaagaaggcatgaatattgtggaggccatggagcgctttgggtccaggaatggcaagaccagcaagaagatcaccattgctgactgtggacaactcgaataagtttgacttgtgttttatcttaaccaccagatcattccttctgtagctcaggagagcacccctccaccccatttgctcgcagtatcctagaatctttgtgctctcgctgcagttccctttgggttccatgttttccttgttccctcccatgcctagctggattgcagagttaagtttatgattatgaaataaaaaactaaataacaaaaaaaaaacaaaaaaaaaaaaacctccggggcctttttgtcgggggggggaaaaagggttttgaaagggccatggtctatgttgttccggcccctttttgtcncaaggggaatcgcgggccccaaaggggcgataatcgaacccgtacttcttcttcttcacacgtccaacgacacagcagccccaaagagaggaaaaacaacgaaacacaccac

SEQ ID NO: 534601 - DNA, 982 bp, Homo sapiens
  misc_feature (30)..(30): n is a, c, g, or t
  misc_feature (870)..(870): n is a, c, g, or t
aaggcaatgacttacggctaggtacgaggnctgggtggcgggaaaaccgtgtactattagccatggtcaaccccaccgtgttcttcgacattgccgtcgacggcgagcccttgggccgcgtctcctttgagctgtttgcagacaaggtcccaaagacagcagaaaattttcgtgctctgagcactggagagaaaggatttggttataagggttcctgctttcacagaattattccagggtttatgtgtcagggtggtgacttcacacgccataatggcactggtggcaagtccatctatggggagaaatttgaagatgagaacttcatcctaaagcatacgggtcctggcatcttgtccatggcaaatgctggacccaacacaaatggttcccagtttttcatctgcactgccaagactgagtggttggatggcaagcatgtggtgtttggcaaagtgaaagaaggcatgaatattgtggaggccatggagcgctttgggtccaggaatggcaagaccagcaagaagatcaccattgctgactgtggacaactcgaataagtttgacttgtgttttatcttaaccaccagatcattccttctgtagctcaggagagcacccctccaccccatttgctcgcagtatcctagaatctttgtgctctcgctgcagttccctttgggttccatgttttccttgttccctcccatgcctagctggattgcagagttaagtttatgattatgaaataaaaaactaaataacaaaaaaaaaacaaaaaaaaaaaaacctccggggcctttttgtcgggggggggaaaaagggttttgaaagggccatggtctatgttgttccggcccctttttgtcncaaggggaatcgcgggccccaaaggggcgataatcgaacccgtacttcttcttcttcacacgtccaacgacacagcagccccaaagagaggaaaaacaacgaaacacaccac

SEQ ID NO: 534602 - DNA, 522 bp, Homo sapiens
  misc_feature (472)..(473): n is a, c, g, or t
  misc_feature (477)..(478): n is a, c, g, or t
  misc_feature (508)..(508): n is a, c, g, or t
catcctagaccttctcaaactggcctttaattgaaactatctcagttgatgatatgctttcaccacttacttctctggattcagagtccagagtgctcaccattacacgatggcaccacttacttctcaaaaaaatccagcaaactataacagatcagtagttatcaaccaggggcaattttgtccccagggacagtatcagaagacatttttaattgtcacaactggcagagctgaggagtggctctggtgtccagtgggtaggggacttggatgctgctaaacatcctacaaagtacaggacagcctcccacaacaaagaatgatcccacccaaaaggttaatagtaccaacaatgagaatccctggcgtagatccaggtatagtaagtctgcaaaagccaggatctacgtgcagccaggcctccgtatctgcaagttccacgtcagcagattcaaccaactgtggatcnnaaanntttggagaaaaataaaaacaataaaaatancagtacaataataa

SEQ ID NO: 534603 - DNA, 1010 bp, Homo sapiens
  misc_feature (898)..(898): n is a, c, g, or t
ccaggagaaagaaagagggcgcacgagagaacacggcaggagcagggcgggggggatcctggacgaggggaaaaccgtgtactattagccatggtcaaccccaccgtgttcttcgacattgccgtcgacggcgagcccttgggccgcgtctcctttgagctgtttgcagacaaggtcccaaagacagcagaaaattttcgtgctctgagcactggagagaaaggatttggttataagggttcctgctttcacagaattattccagggtttatgtgtcagggtggtgacttcacacgccataatggcactggtggcaagtccatctatggggagaaatttgaagatgagaacttcatcctaaagcatacgggtcctggcatcttgtccatggcaaatgctggacccaacacaaatggttcccagtttttcatctgcactgccaagactgagtggttggatggcaagcatgtggtgtttggcaaagtgaaagaaggcatgaatattgtggaggccatggagcgctttgggtccaggaatggcaagaccagcaagaagatcaccattgctgactgtggacaactcgaataagtttgacttgtgttttatcttaaccaccagatcattccttctgtagctcaggagagcacccctccaccccatttgctcgcagtatcctagaatctttgtgctctcgctgcagttccctttgggttccatgttttccttgttccctcccatgcctagctggattgcagagttaagtttatgattatgaaataaaaaactaaataacaaaaaaaaaacaaaaaaaaaaaaacctccggggcctttttgtcgggggggggaaaaagggttttgaaagggccatggtctatgttgttccggcccctttttgtcncaaggggaatcgcgggccccaaaggggcgataatcgaacccgtacttcttcttcttcacacgtccaacgacacagcagccccaaagagaggaaaaacaacgaaacacaccac

SEQ ID NO: 534604 - DNA, 437 bp, Homo sapiens
tgcctgccttggcctcccaaagtgctgggattcaggcgtgcgccacctgaatgctcagcttttctttcttttcctcttactggttgctaaagagcaggcatcccatttgaggaatttctctcctaaattctctgggacttccttaatagaaaacatcttccaagtaatctcttttccttcactccctacataaaatcagagagattccctcctctctgcctggggggagttagatgattctccaaagagccagatccttcagccagcagtaacccacccgcttaggcttctctcacactcatcctcagcctctctttgttcaagtcttccccagagcccagagctgttaaggatcatcatttctttctttctttctttctttatttttttcttttggaaacgggcccttggctctgacccccaggttggattgcagt

SEQ ID NO: 534605 - DNA, 221 bp, Homo sapiens
cgtgctagcggcatagtgaacgcgtcatctgatgacgtggatgatgtcctgagggctcgtcgcgtcaaagtggtcgagtcccatccttctgccaccagggtagcctgagtacctgctcttccgcttggggataggtggcctcgtgctcctccgcttggggataggtggcctcgtgctcctccgcttggggataggtggccgttcacttaatgccgctagcg

SEQ ID NO: 534606 - DNA, 902 bp, Homo sapiens
  misc_feature (12)..(12): n is a, c, g, or t
  misc_feature (24)..(24): n is a, c, g, or t
  misc_feature (790)..(790): n is a, c, g, or t
  misc_feature (792)..(792): n is a, c, g, or t
  misc_feature (800)..(800): n is a, c, g, or t
  misc_feature (804)..(804): n is a, c, g, or t
  misc_feature (808)..(808): n is a, c, g, or t
tacggtaggtangaggctggggtngaatcggacgaggccgaggaaaaccgtgtactattagccatggtcaaccccaccgtgttcttcgacattgccgtcgacggcgagcccttgggccgcgtctcctttgagctgtttgcagacaaggtcccaaagacagcagaaaattttcgtgctctgagcactggagagaaaggatttggttataagggttcctgctttcacagaattattccagggtttatgtgtcagggtggtgacttcacacgccataatggcactggtggcaagtccatctatggggagaaatttgaagatgagaacttcatcctaaagcatacgggtcctggcatcttgtccatggcaaatgctggacccaacacaaatggttcccagtttttcatctgcactgccaagactgagtggttggatggcaagcatgtggtgtttggcaaagtgaaagaaggcatgaatattgtggaggccatggagcgctttgggtccaggaatggcaagaccagcaagaagatcaccattgctgactgtggacaactcgaataagtttgacttgtgttttatcttaaccaccagatcattccttctgtagctcaggagagcacccctccaccccatttgctcgcagtatcctagaatctttgtgctctcgctgcagttccctttgggttccatgttttccttgttccctcccatgcctagctggattgcagagttaagtttatgattatgaaataaaaactaaataacaattgtccaaaaaaaaaaatcgagngntcaattcngggngggnaaagggggttgaaatggcaagggcaaatgttcctggccccttctgtcaagggggaactccggcccaaagggggaataataaacggaggtccgca

SEQ ID NO: 534607 - DNA, 895 bp, Homo sapiens
  misc_feature (12)..(12): n is a, c, g, or t
  misc_feature (24)..(24): n is a, c, g, or t
  misc_feature (817)..(817): n is a, c, g, or t
  misc_feature (827)..(827): n is a, c, g, or t
tacggtaggtangaggctggggtngaatcggacgaggccgaggaaaaccgtgtactattagccatggtcaaccccaccgtgttcttcgacattgccgtcgacggcgagcccttgggccgcgtctcctttgagctgtttgcagacaaggtcccaaagacagcagaaaattttcgtgctctgagcactggagagaaaggatttggttataagggttcctgctttcacagaattattccagggtttatgtgtcagggtggtgacttcacacgccataatggcactggtggcaagtccatctatggggagaaatttgaagatgagaacttcatcctaaagcatacgggtcctggcatcttgtccatggcaaatgctggacccaacacaaatggttcccagtttttcatctgcactgccaagactgagtggttggatggcaagcatgtggtgtttggcaaagtgaaagaaggcatgaatattgtggaggccatggagcgctttgggtccaggaatggcaagaccagcaagaagatcaccattgctgactgtggacaactcgaataagtttgacttgtgttttatcttaaccaccagatcattccttctgtagctcaggagagcacccctccaccccatttgctcgcagtatcctagaatctttgtgctctcgctgcagttccctttgggttccatgttttccttgttccctcccatgcctagctggattgcagagttaagtttatgattatgaaataaaaactaataacaaaaaaaaaaaaaaaatcggggtctttattcgggggggaaagaggtttggaanggcatggctngtgttctgaccatttttgtcaaggggaactgcggcccaaggggcgaaaatcgagccgactataaaagg

SEQ ID NO: 534608 - DNA, 194 bp, Homo sapiens
aaggcaaggttcaggcttccagggtagcaaactgggaagaaacaaatggaagatcagagttgttttagtaaggttacttatgcagattcttctcagtcttcctggactgagtctagcagcttttcaccagtgattatcaatctaagatctgtttttaagccaaatgacaggcaaagcagtaggccatagtcctg

SEQ ID NO: 534609 - DNA, 541 bp, Homo sapiens
  misc_feature (11)..(11): n is a, c, g, or t
  misc_feature (21)..(21): n is a, c, g, or t
agacccatgtntgtcacaccnagtgatcaccattaatgctgtacacatgttagccagcagtcccaatagcatcaatttggatataccttaatgactgcatttgtttcatagttttagtttcttcatactaacttttttttttttgctttagtgttattaacgtttattttcttagtgtttcttagacataaatccagtatcgtttgccaaaggtaaaagtatgtgtaaaagtctcaaaaagagctaaacagagccaagcacgatggcaaacacctgtaagccagcacttgaaaggcagaaagaagtacagggatcaggagttcaaggccaacgtcagctacattgagacttctttttctcaaagtgcaccaacaaaacaaatgtaaaaccttgttcggaaagcccaggtgttcttctctcctaagccctgcccctgaggccagcaacactgatctcgttccctggtctgtgttgtgaaaacagatcacaagtgtcaggtttggaatgttcaagtggccctagacccaggcgcaggcttcct

SEQ ID NO: 534610 - DNA, 961 bp, Homo sapiens
  misc_feature (12)..(12): n is a, c, g, or t
  misc_feature (24)..(24): n is a, c, g, or t
tacggtaggtangaggctggggtngaatcggacgaggccgaggaaaaccgtgtactattagccatggtcaaccccaccgtgttcttcgacattgccgtcgacggcgagcccttgggccgcgtctcctttgagctgtttgcagacaaggtcccaaagacagcagaaaattttcgtgctctgagcactggagagaaaggatttggttataagggttcctgctttcacagaattattccagggtttatgtgtcagggtggtgacttcacacgccataatggcactggtggcaagtccatctatggggagaaatttgaagatgagaacttcatcctaaagcatacgggtcctggcatcttgtccatggcaaatgctggacccaacacaaatggttcccagtttttcatctgcactgccaagactgagtggttggatggcaagcatgtggtgtttggcaaagtgaaagaaggcatgaatattgtggaggccatggagcgctttgggtccaggaatggcaagaccagcaagaagatcaccattgctgactgtggacaactcgaataagtttgacttgtgttttatcttaaccaccagatcattccttctgtagctcaggagagcacccctccaccccatttgctcgcagtatcctagaatctttgtgctctcgctgcagttccctttgggttccatgttttccttgttccctcccatgcctagctggattgcagagttaagtttatgattatgaaataaaaactgaactaaaaactaaataacaaaaaaacacacaacaacaacagaagatacaccagaaaaaaaaaaggaaagagacacagaaaacaaaaccataaaaaatacaatgaaaaacgcgacaccacacagagaaaaaaggagagggagacaaaaaaaacagagagaacacaaagaaacacagaataaaaagagcagacaaaaagaaaaa

SEQ ID NO: 534611 - DNA, 413 bp, Homo sapiens
ggcacgagagtaactctctttcacaatgtgaccatacctgtgtatgggtctcttgggacttgggcttcatgctacaattcactgtgcattacctgaaggcaaagtaacagactggcattcattccaaccaaatggcactctctacaagaagtgattcattaatggtgactttgcattcaatatgtaccggagaggcactgtggagaaaccagatatgaacacatttcttttcccctgggagcaattctgcagatttgggtatagctttcctttggggcctggtgtaagacccaaactgagaatggggagaccttgggggtcaacctctcagacacttcaatggtagagatccaccatgggttccagaatctgagctgtgtactgagatttccgaaggaactggaattgcctgg

SEQ ID NO: 534612 - DNA, 817 bp, Homo sapiens
  misc_feature (12)..(12): n is a, c, g, or t
  misc_feature (24)..(24): n is a, c, g, or t
tacggtaggtangaggctggggtngaatcggacgaggccgaggaaaaccgtgtactattagccatggtcaaccccaccgtgttcttcgacattgccgtcgacggcgagcccttgggccgcgtctcctttgagctgtttgcagacaaggtcccaaagacagcagaaaattttcgtgctctgagcactggagagaaaggatttggttataagggttcctgctttcacagaattattccagggtttatgtgtcagggtggtgacttcacacgccataatggcactggtggcaagtccatctatggggagaaatttgaagatgagaacttcatcctaaagcatacgggtcctggcatcttgtccatggcaaatgctggacccaacacaaatggttcccagtttttcatctgcactgccaagactgagtggttggatggcaagcatgtggtgtttggcaaagtgaaagaaggcatgaatattgtggaggccatggagcgctttgggtccaggaatggcaagaccagcaagaagatcaccattgctgactgtggacaactcgaataagtttgacttgtgttttatcttaaccaccagatcattccttctgtagctcaggagagcacccctccaccccatttgctcgcagtatcctagaatctttgtgctctcgctgcagttccctttgggttccatgttttccttgttccctcccatgcctagctggattgcagagttaagtttatgattatgaaataaaaactaaataacaattgtcctcgtttgaaaaaaaagtcgagcggccgttcacttagtagtagta

SEQ ID NO: 534613 - DNA, 110 bp, Homo sapiens
cactcaaccagttcaaatttcaccacaggggcatttcagcagggttctagtgggccacatttcacacagttgcaactcaagcattctcatcatatggcacccacccagct

SEQ ID NO: 534614 - DNA, 128 bp, Homo sapiens
gactatacactacatgcagaagagccgcctggtcatggacccggattcggagactgacgtatacacacattcctcattgacactggagaacatagcactgcgcattatccgaagggccatctgcgcgc

SEQ ID NO: 534615 - DNA, 949 bp, Homo sapiens
  misc_feature (12)..(12): n is a, c, g, or t
  misc_feature (24)..(24): n is a, c, g, or t
tacggtaggtangaggctggggtngaatcggacgaggccgaggaaaaccgtgtactattagccatggtcaaccccaccgtgttcttcgacattgccgtcgacggcgagcccttgggccgcgtctcctttgagctgtttgcagacaaggtcccaaagacagcagaaaattttcgtgctctgagcactggagagaaaggatttggttataagggttcctgctttcacagaattattccagggtttatgtgtcagggtggtgacttcacacgccataatggcactggtggcaagtccatctatggggagaaatttgaagatgagaacttcatcctaaagcatacgggtcctggcatcttgtccatggcaaatgctggacccaacacaaatggttcccagtttttcatctgcactgccaagactgagtggttggatggcaagcatgtggtgtttggcaaagtgaaagaaggcatgaatattgtggaggccatggagcgctttgggtccaggaatggcaagaccagcaagaagatcaccattgctgactgtggacaactcgaataagtttgacttgtgttttatcttaaccaccagatcattccttctgtagctcaggagagcacccctccaccccatttgctcgcagtatcctagaatctttgtgctctcgctgcagttccctttgggttccatgttttccttgttccctcccatgcctagctggattgcagagttaagtttatgattatgaaataaaaactaaatacaattcacaccccccaacccaccacaccaaaacccagggaccaacacgggtccgcaaaaccagctaagcaggggccagggacaaaacgggcacggacccaaaatgcggactcaccgggacaaccgccgggcacccatagaggggcgccaaaaacacaaagcaggtacgtgacagaccaccaccagc

SEQ ID NO: 534616 - DNA, 1383 bp, Homo sapiens
  misc_feature (12)..(12): n is a, c, g, or t
  misc_feature (24)..(24): n is a, c, g, or t
  misc_feature (1383)..(1383): n is a, c, g, or t
tacggtaggtangaggctggggtngaatcggacgaggccgaggaaaaccgtgtactattagccatggtcaaccccaccgtgttcttcgacattgccgtcgacggcgagcccttgggccgcgtctcctttgagctgtttgcagacaaggtcccaaagacagcagaaaattttcgtgctctgagcactggagagaaaggatttggttataagggttcctgctttcacagaattattccagggtttatgtgtcagggtggtgacttcacacgccataatggcactggtggcaagtccatctatggggagaaatttgaagatgagaacttcatcctaaagcatacgggtcctggcatcttgtccatggcaaatgctggacccaacacaaatggttcccagtttttcatctgcactgccaagactgagtggttggatggcaagcatgtggtgtttggcaaagtgaaagaaggcatgaatattgtggaggccatggagcgctttgggtccaggaatggcaagaccagcaagaagatcaccattgctgactgtggacaactcgaataagtttgacttgtgttttatcttaaccaccagatcattccttctgtagctcaggagagcacccctccaccccatttgctcgcagtatcctagaatctttgtgctctcgctgcagttccctttgggttccatgttttccttgttccctcccatgcctagctggattgcagagttaagtttatgattatgaaataaaaactaaataacaaaaaaaaaaaaaaaaaaaaaaaaaaaaaaaaaaaaaaaaaaaaaaaaaaaaaaaaaaaaaaaaaaaaaaaaaaaaaaaaaaaaaaaagagaggggggggcgcgccgcacaaaaattctctcccccggggggcgcccccattggcgcgccgcgccccccctttttttgaacagaaggggcgcccccaaaagagaaggaggcaagcttattatgagcacagacgaagcgaagcgcggcgccccggcactattaaacaacagacgcacgaggagcggggaaataacagcctgcggcctcagcgggagcacaacattggggagggagaagcgaccccctaagacgggcggggggggcggagcagaacaacatgatggggccaaacacatcctcctctctgcgcgggtgttttttttgacgacccctccagaggagcggacataatattaaacacctttcaagcagggcttagtataaccgcggggggtacaacacaccacgcgggcaaatataaatgctgcgcggcgcggctcgggaaaaatttttcgctggccgcacggaggagcataatactttcaggaacaaaaattttttcccacgaggggacggcgtcgaagtagn

SEQ ID NO: 534617 - DNA, 429 bp, Homo sapiens
  misc_feature (300)..(300): n is a, c, g, or t
gttgcataaccctgccgggcgtgtttctccgggcctccctcctcgggctgtagcgaggggtaagggaggtcatacgccctgtggaacaccccaaagcctgggtccctgggatgcatccacagattgtaggcctgagtcttaacacactccatctggatttcaatgacttctgcctggttccagtgctgggctgtttccctgtctgagctttggtggcttttgattgacccctttcctgccccagcatgaaggtggagtagccagaaggaagggatgcgggtgtataaagatgtcatcggngctgtctgtggatggtgggtgagacagcacctgtcatggtggaagggccacaggaagcgtggaggctgtttctggggccaccttctgcctccaggagggcagggatcctcctgttggcatcttggtccc

SEQ ID NO: 534618 - DNA, 1030 bp, Homo sapiens
  misc_feature (12)..(12): n is a, c, g, or t
  misc_feature (24)..(24): n is a, c, g, or t
  misc_feature (785)..(785): n is a, c, g, or t
tacggtaggtangaggctggggtngaatcggacgaggccgaggaaaaccgtgtactattagccatggtcaaccccaccgtgttcttcgacattgccgtcgacggcgagcccttgggccgcgtctcctttgagctgtttgcagacaaggtcccaaagacagcagaaaattttcgtgctctgagcactggagagaaaggatttggttataagggttcctgctttcacagaattattccagggtttatgtgtcagggtggtgacttcacacgccataatggcactggtggcaagtccatctatggggagaaatttgaagatgagaacttcatcctaaagcatacgggtcctggcatcttgtccatggcaaatgctggacccaacacaaatggttcccagtttttcatctgcactgccaagactgagtggttggatggcaagcatgtggtgtttggcaaagtgaaagaaggcatgaatattgtggaggccatggagcgctttgggtccaggaatggcaagaccagcaagaagatcaccattgctgactgtggacaactcgaataagtttgacttgtgttttatcttaaccaccagatcattccttctgtagctcaggagagcacccctccaccccatttgctcgcagtatcctagaatctttgtgctctcgctgcagttccctttgggttccatgttttccttgttccctcccatgcctagctggattgcagagttaagtttatgattatgaaataaaaactaaataacaattgaaaaaaaaaaaaaanaaaaaaaaaaaaaaactttttgggccgcgccttgaggcccctgaaaagagcttcttcttagaccccatttcgttgtgggcgccggcggcccccagttggtgttatctgtgtgaccctgtgcgcccctaggccgtgttgccccgaggaaaactgcggcgcccggaacctgggtgcttggggttttctccgccgagtttaaaaacgcccgggggggaaccccgagcgtttctcgtgcaccaattgcg

SEQ ID NO: 534619 - DNA, 139 bp, Homo sapiens
ggacccacgctgtctggagagacaaggagaagaagaaggagaaggagaagaaggctgaggacctggacttctggctgtctaccacccaagttgccagcagaggtgaaacgatggaaaacaatatataactatgaaacag

SEQ ID NO: 534620 - DNA, 1007 bp, Homo sapiens
  misc_feature (10)..(10): n is a, c, g, or t
  misc_feature (110)..(110): n is a, c, g, or t
  misc_feature (121)..(121): n is a, c, g, or t
  misc_feature (126)..(126): n is a, c, g, or t
  misc_feature (129)..(129): n is a, c, g, or t
  misc_feature (179)..(179): n is a, c, g, or t
  misc_feature (192)..(192): n is a, c, g, or t
  misc_feature (222)..(222): n is a, c, g, or t
  misc_feature (250)..(250): n is a, c, g, or t
  misc_feature (269)..(269): n is a, c, g, or t
  misc_feature (278)..(278): n is a, c, g, or t
  misc_feature (295)..(295): n is a, c, g, or t
  misc_feature (326)..(326): n is a, c, g, or t
  misc_feature (339)..(339): n is a, c, g, or t
  misc_feature (345)..(345): n is a, c, g, or t
  misc_feature (349)..(349): n is a, c, g, or t
  misc_feature (356)..(356): n is a, c, g, or t
  misc_feature (369)..(369): n is a, c, g, or t
  misc_feature (380)..(380): n is a, c, g, or t
  misc_feature (382)..(382): n is a, c, g, or t
  misc_feature (408)..(408): n is a, c, g, or t
  misc_feature (410)..(410): n is a, c, g, or t
  misc_feature (421)..(421): n is a, c, g, or t
  misc_feature (425)..(425): n is a, c, g, or t
  misc_feature (433)..(433): n is a, c, g, or t
  misc_feature (439)..(439): n is a, c, g, or t
  misc_feature (441)..(442): n is a, c, g, or t
  misc_feature (446)..(446): n is a, c, g, or t
  misc_feature (448)..(448): n is a, c, g, or t
  misc_feature (451)..(451): n is a, c, g, or t
  misc_feature (455)..(455): n is a, c, g, or t
  misc_feature (457)..(458): n is a, c, g, or t
  misc_feature (758)..(758): n is a, c, g, or t
atacattacngtgctaaaaatgaaaatctaacccaagacatgacattcttagctgtaacttaactattaaggcctttcccacacgcattaaatatccccatttttctctngccatttgtanctttnccnattttcttattggcacatgggtggacacggatctgctggctctgccttanacacacattgcancttcaacttttctctttagtgttctgtttnaaactaatacttaccgagtcagactttntgttcatttcatttcaggntcttggctncctgtagcttccccagntggcctggaggtgagcaaagggaagtaacanacacacgatgttntcaagnatgnttttganactagaggctcantggtgggagananccctgcagaacccaccaaccagaacntngtttccctgangctntaactcanagaaanannctgngnctntctnannaaaatatagacactctcacataagcccagttcatcaccatttcctcctttacctttcagtgcagtttcttttcacattaggctgttggttcaaacttttgggagcacggactgtcagttctctgggaagtggtcagcgcatcctgcagggcttctcctcctctgtcttttggagaaccagggctcttctcaggggctctagggactgccaggctgtttcagccaggaaggccaaaatcaagagtgagatgtagaaagttgtaaaatagaaaaagtggagttggtgaatcggttgttcttncctcacatttggatgattgtcataaggtttttagcatgttcctccttttcttcaccctccccttttttcttctattaatcaagagaaacttcaaagttaatgggatggtcggatctcacaggctgagaactcgttcacctccaagcatttcatgaaaaagctgcttcttattaatcatacaaactctcaccatgatgtgaagagtttcacaaatctttcaaaataaaaagtaatgacttagaaactgcc

SEQ ID NO: 534621 - DNA, 407 bp, Homo sapiens
gatagtctgatgatttgcatcccattgaattcctggtctactctcaactgatcagagtctgtcaggatagctgtgacttacatagcaccaataatttacagcagggttccttcccttcttttatatgttaatgcatactactctattcaattaatgtaacaagtgtgtcactaagtttagatgtttcttaaaaggaaggtgtgtgacatgaacatatagaggggaacagcatacactggggcttatcagagggtgatgagtgggaggagagagagaattagaaaaaataactagtaggtactaggcttaatgcctaggtgatgaaataatctgtacaacaaatctccatgacacaaatttacctatgtaacagacctgcacaagtactcctgaacttaaaagttaaa

SEQ ID NO: 534622 - DNA, 748 bp, Homo sapiens
catgaaggtcgaacggttgcatgtattagcggcgtatcaagatctatgcccgggacacggagaaggcagcttcactgactcagagatcgatcggtgcaatggtgatctccgatggtgatctctgagagtcgcgatacactgcgagttcgtggtttctcttgtactcatagtacggatgtcgcgtccgggcaatgcaggtacaactggaactggtccgtctacatgaagggaaggagagactgcgggacatgtgcgcggaggacattctatcaagataataggacatcgcgcgtctgaggcagtatcaatagttccatgatgggcgatgtatactggggtgaatttctcatttggattgatataactggggtcgaagagtgaagtcgagaaaaccatgataagtaaatgaagaaggatcaatgggagagaccacaagcgttatcaggggacgtgcttaaagtgaaagcaaagatgagtgtataagggacgcttttaggactgacttgtggactggtctcgtgtagtctgaatggcaagctagcagaggggagacattcttagagggacatagaggatttgtcgacagccttgtgggaaaacgattctcgaaggcatgccactgtgaagctttgcgtgggaatataacagcataaagagttgtgtaggaattagactttatttagaactagaagggatttgtgcgactaactgtgatttcccaaattgaaggccaagccctaataaggca

SEQ ID NO: 534623 - DNA, 159 bp, Homo sapiens
ccgacagatgattacccagaaaaaaaaaaaagagataatctatacctcataaattcactaaaactgggactatctgaccggacttggcagccttggggcggaaggacgtagaaaatatttttaaactggcctaccttatattccatacatcatatattg

SEQ ID NO: 534624 - DNA, 976 bp, Homo sapiens
  misc_feature (38)..(38): n is a, c, g, or t
  misc_feature (88)..(88): n is a, c, g, or t
  misc_feature (90)..(90): n is a, c, g, or t
  misc_feature (110)..(110): n is a, c, g, or t
  misc_feature (116)..(116): n is a, c, g, or t
  misc_feature (119)..(119): n is a, c, g, or t
  misc_feature (122)..(123): n is a, c, g, or t
  misc_feature (126)..(126): n is a, c, g, or t
  misc_feature (146)..(146): n is a, c, g, or t
  misc_feature (250)..(250): n is a, c, g, or t
  misc_feature (628)..(628): n is a, c, g, or t
  misc_feature (683)..(683): n is a, c, g, or t
  misc_feature (729)..(729): n is a, c, g, or t
  misc_feature (823)..(823): n is a, c, g, or t
  misc_feature (863)..(863): n is a, c, g, or t
  misc_feature (896)..(898): n is a, c, g, or t
  misc_feature (913)..(913): n is a, c, g, or t
  misc_feature (917)..(917): n is a, c, g, or t
  misc_feature (926)..(926): n is a, c, g, or t
  misc_feature (944)..(944): n is a, c, g, or t
ttccccggcgccttcgccgccgccgcccgcgcccgggnagcgcgcccttctctgcccgcggatcggtgcgctcggccggagggccgcngnggaaggaacccagagaaggngacgcnggncgnnggngctcggggcttgcccgcggngagggaggctgcgcccaggtccccggccccgcgccgcgcgcccagccgcgccatgggggaggcgcccagccccgcgcccgcgctctgggactgggactacctgngaccgctgcttcgcccgccaccgcgtctgcatctccttcggcctgtggatctgcgcctcctcctgctggatcgccgcccacgcgctgcttctctatctgagatgtgcacagaaacccagacaggaccagtcggcactgtgtgctgcatgctgcctcctgaccagtctgtgtgacaccgtcggggctcttctggccagacagctcacaatccaggttttcactggtgcctacctagcagctattgacttagtgaactttatgttcattctcttcccagtctgtggatccaaattcaagtctaattcagatcgggaagcccgagagaggaagaggaggcggcagctcagggccagtgtgtttgcccttggccctgccgcntgagcctgggcccgtgctgggctctgtgggttgctgtcccgaaggcttcagccancatccgggggccacagcggaggctgctagcgagccttgctgcaggnaaatactgagatcctcggctacctgctggggtagcgttgctgccttggctcctgggcttctcggatccccctctctccagaatttgccgggggnaaacatttcctccatcacctgttgaccggctcctgtcggncctggtgcctctctatgctcggcattgtggccnnngacggaccctgagtnctgntgcggccancctggttctgactcctcnggcgtgcggactggactcgctatattttcttt

SEQ ID NO: 534625 - DNA, 912 bp, Homo sapiens
  misc_feature (38)..(38): n is a, c, g, or t
  misc_feature (88)..(88): n is a, c, g, or t
  misc_feature (90)..(90): n is a, c, g, or t
  misc_feature (110)..(110): n is a, c, g, or t
  misc_feature (116)..(116): n is a, c, g, or t
  misc_feature (119)..(119): n is a, c, g, or t
  misc_feature (122)..(123): n is a, c, g, or t
  misc_feature (126)..(126): n is a, c, g, or t
  misc_feature (146)..(146): n is a, c, g, or t
  misc_feature (250)..(250): n is a, c, g, or t
  misc_feature (564)..(564): n is a, c, g, or t
  misc_feature (619)..(619): n is a, c, g, or t
  misc_feature (665)..(665): n is a, c, g, or t
  misc_feature (759)..(759): n is a, c, g, or t
  misc_feature (799)..(799): n is a, c, g, or t
  misc_feature (832)..(834): n is a, c, g, or t
  misc_feature (849)..(849): n is a, c, g, or t
  misc_feature (853)..(853): n is a, c, g, or t
  misc_feature (862)..(862): n is a, c, g, or t
  misc_feature (880)..(880): n is a, c, g, or t
ttccccggcgccttcgccgccgccgcccgcgcccgggnagcgcgcccttctctgcccgcggatcggtgcgctcggccggagggccgcngnggaaggaacccagagaaggngacgcnggncgnnggngctcggggcttgcccgcggngagggaggctgcgcccaggtccccggccccgcgccgcgcgcccagccgcgccatgggggaggcgcccagccccgcgcccgcgctctgggactgggactacctgngaccgctgcttcgcccgccaccgcgtctgcatctccttcggcctgtggatctgcgcctcctcctgctggatcgccgcccacgcgctgcttctctatctgagatgtgcacagaaacccagacaggaccagtcggcactgtgtgctgcatgctgcctcctgaccagtctgtgtgacaccgtcggggctcttctggccagacagctcacaatccagtctgtggatccaaattcaagtctaattcagatcgggaagcccgagagaggaagaggaggcggcagctcagggccagtgtgtttgcccttggccctgccgcntgagcctgggcccgtgctgggctctgtgggttgctgtcccgaaggcttcagccancatccgggggccacagcggaggctgctagcgagccttgctgcaggnaaatactgagatcctcggctacctgctggggtagcgttgctgccttggctcctgggcttctcggatccccctctctccagaatttgccgggggnaaacatttcctccatcacctgttgaccggctcctgtcggncctggtgcctctctatgctcggcattgtggccnnngacggaccctgagtnctgntgcggccancctggttctgactcctcnggcgtgcggactggactcgctatattttcttt

SEQ ID NO: 534626 - DNA, 848 bp, Homo sapiens
taataaacttgatttctctaggagcactcctttggttagagggatgcaagaaggagaggtgaaggtggcgtgtggtggctcatgcctgtaatcccagcactttggggaggcgaggcaggcggatcacttgaggccagcagtttcgagaccagaccatggccaatcatgatgaaaccccagtctctacttaaatagatacaaaaaattagctgggcatggtggcaggcacctgtaatcccagttacttgggaggctgaggcaggagaattgcttgaagccaggaggtggaggttgcatgtgagctgagattgtgtccacatgcacttcagctctgggcgatcagagtgagctctgtcatacaggaaaggctaaaatccggaccctggtagctctgtgggcccgtgattgcatggccccatcgcctgtgtgatcgagggatgagtcagacttggggagccacttggtcgatgcctgcatggctggtacatcaggaggttgagaaagagcccttgaagagttgtgaagcactgagcagatactaagtgttggttaattttgtagaaattaactttcccatctggccgtttatctccaaagttggtcattgttgctccacgcagaactgcagtccggttttcttatggtgactttgacaatgcaaagtgcaagagataggaagagggccttcccgagtcccagatatcaccatgccttgggggaccatgttcaagcagtaaacatcgcgatgtagttcagttcatctggtgtcttcgggagtgactttttgaaggcagatgatctgcaggttgagtacaagtgttcgtaatttgtacatgatggtgtgtgtg

SEQ ID NO: 534627 - DNA, 954 bp, Homo sapiens
agcgggttgccatagcgacgtgcacgcagtagccaggcctgacccgcaggtcccttgctggcgggaggaaggaggcggcaccatgagccacgcagtaactatcgaggagccccaggcccagccgcaggtgtctcaaactcggtaccgggagaggtcgcgggctgggagccacatctcctccaatcgagcgtatgattttctgtacgatccattgtttattgtgtcaagtgagaaagaccatacacaggcaaatatccaagctaccctgattcgcagcagactgagaaaagttcccaggtttaaaaccatgttcagtaacctgatccattatccaagatattctctatattggagcaagtcagatcctgtcccaccatttatcagtcgggaatggaagggacataaggagaaacacagagaagccctccggcagctcaccacaactgacgcttcttttcagatgcctaaagaagtttatgaagatcctgaagttactggaaagaatcgctataaatactttgaaaggccttttctcccattttttcagcagatgccattcaatgttgtttatgccgtatccaaggcagaaccatacacttttcctcctacttctactaagcacctatccatcccttcaaagtctactgtgggcactcagactgattatcgggatgctgacgttcaaacagatccatactctccagaatatgtagtatgtcaggactcaatccctgagctcttgaccctggctacgcttacttggggtgagttggtaaatctcctgactattggcagatgacgatgctgataaccacgcatgctgttcaaatggcccatgtacaggcaattgtggtttacagtgttgctatataaagtgtcttagtacagcaacttcatagactcataatttttctgatacttctggtcaaataaagatactatctttttattgtg

SEQ ID NO: 534628 - DNA, 532 bp, Homo sapiens
atttgttaaaattaaggtaattttcaattttttaaaattataactcatgcttcactgaatactttggataaaaagctttctgaaggataaatgtgttatatccatgcaatgggacattattcagccattaaaaggaatgaagtactgatacataccacaacatggatcaaccttgaacatattatgctaagtgaaagaagccaattacaaaaggccacatatttcctacacggctgatggaaacgtaaaactatgcagccactttagaaaacagactagcagttctgcaaaatattaaacacagagttaccatacaacccagcaactctactcctaggtatatatacccaagataaattaaaacaaatccatgcaaaaacttgtacatgaatgtccatatttatagcagcattattcataactgaaatgtgcaaacaacccaacgtccattcactgataaatggacaaataaaatactgtataagcattcaacagaataatattcagacataaaagagaatgatgggcctgg

SEQ ID NO: 534629 - DNA, 120 bp, Homo sapiens
aagatccttagacagcggaccccgttctcagagaggttcagcacagaggagaagagcagctcacagccaagcagctgttgttctgaccccagcaagccggggggggggccggctgtctga

SEQ ID NO: 534630 - DNA, 623 bp, Homo sapiens
cacattgtctgctgagcattgggctaagctggcttcagaactctacgaatgatagagagcgccatgaccagcacagcagctaggggataggatagtaaggctgccacagttagtaagatccgcagagcgatagcgatacttgtcagcttcattaacagtctgatctgatgcagggaatatatgctctgcaatctgaatttccgcaatggcagtagctccagtgactgcaatcgcgattccaaatccgtcaattccttgctgactcactggggtattacagtctctatctttaccatatttgtctcgcaagccaacagtgcatctaaagactccaccaacagcaacatcttcaccaaatattactgcagtaggatcctgagttagcccgtactaccggggctgcggatctggctggaaagtagcatgagccacctgccgcctgtgggccgcatcctcgacagtctcggcggggtgcaaaaagcagcgcgccagctccgcgccaggaagccgacgccagtgcccctcagcccctgccgccctgagcctgagtagccagccggcagccgccgctacaaccgccatcgccgctcacctgcgggattctcaggctatgcagccgcacg

SEQ ID NO: 534631 - DNA, 94 bp, Homo sapiens
gttcaatgacggtgggtacactggtgttcttttattgttactctttacacacaaagaacagataggtcctgaagggcccttctgtcgtcttctc

SEQ ID NO: 534632 - DNA, 295 bp, Homo sapiens
  misc_feature (44)..(44): n is a, c, g, or t
  misc_feature (76)..(76): n is a, c, g, or t
  misc_feature (83)..(83): n is a, c, g, or t
  misc_feature (107)..(109): n is a, c, g, or t
  misc_feature (122)..(122): n is a, c, g, or t
  misc_feature (140)..(140): n is a, c, g, or t
  misc_feature (143)..(143): n is a, c, g, or t
  misc_feature (150)..(150): n is a, c, g, or t
  misc_feature (156)..(156): n is a, c, g, or t
  misc_feature (165)..(166): n is a, c, g, or t
  misc_feature (171)..(171): n is a, c, g, or t
  misc_feature (182)..(182): n is a, c, g, or t
  misc_feature (191)..(192): n is a, c, g, or t
  misc_feature (195)..(195): n is a, c, g, or t
  misc_feature (227)..(227): n is a, c, g, or t
  misc_feature (288)..(289): n is a, c, g, or t
ttttggtcaacaccctgcttactgcgcacggccaatcctatganaactcagcatcccagctcatctgagcagatcnggaagtnatttctgcagctcaggattttttnnntaagctacattgnaaaatataggtttatttnttnttcaggnttttcntttatattnnttttntgcacaaaggnggaggattnntcnacttactcatatcgaggccagatttttaaagncagctaaggcagcatcagctgtgcgggatttaaagcctatagctcagctgaaaaaaaaggnngggggc

SEQ ID NO: 534633 - DNA, 513 bp, Homo sapiens
cagctcttaccccttttggccgtctttgctgctgctttttcattaggaagttcaatgaaagcttttcctttcatacgaccttctttcatcaaacgtatatcaaacatgatccgctgtgtttctgatgaaaagtcaacatatcttccaaaaatatatttaaggtccttttcttgaacatgtttagctaaattctttacataaattctacagtttggttcacccggttcataacttctgaaaactgaaagtgtttccatttcttctctagaaattctgcccttttccaattcccttctagaaatacattctgaaggcatttcatcagagacttctttaatctcctctgtgatgtccaaattaggtttggggaagattcttccaaatcctatattggatgcatcaacttcagtagcaggtcaatcatgattcctttcctcacaattttggatccttttctaaatctttcttaaatgcaagctggcatgttcggttgatatatggaattcaaattct

SEQ ID NO: 534634 - DNA, 353 bp, Homo sapiens
atgtaaatgagagggtcttgttcaggtctcggagagcacatgaatgagggggtcagaagtgtcccggggctgagaatagagggagagcccacagaccactatttccttgtcagaagtcactgccaatcagcaccgaatggcggtgcctgggttgcaggcaaattgcacagctctttggaggtgaagtccatgggcaaggctagctggtgagtcaagcctcggagcagtggccccaggctggggagggctagttggccactggcaaagcccctctgccaggcttctctgctcaactgtaggtgcttccttgggcatttgatccccatggcaaaccacggaggcaggatatccat

SEQ ID NO: 534635 - DNA, 690 bp, Homo sapiens
gcaatatgtgcccatcagtgggtgaatgatcaacaaaatgtggtatattcatacagtggaatattattcagcctctaaaaggaagatacgctgacatgtgctgcaacatggatgaatcttgaggacatgatgctaagtgaagtaagccagtcactggaagacaaatactctatgcttccatttatgtgaagtatctagagcagtcaaatgcatagaaacaagtagaatggtagttgccaaggactgggggaggaggaaatgaggagttgtttaatgggtatagtgtttcacttgtacaagataaaaattcctataaattgattacacacttaacttatattaatactatataccaactcaactatacactctaaaataattaataatataaatcttatctttattttaccacactttgttttaaaacattataaacaccatttcccattatataaatcaatactaaaaaaaacatactccacagtaacatatatttattaaacacattcataactaaaattaaataaattatctttatttcattaattgtaatatcatttaacatattaatttacacttctgattttcattatataaagtcttactcataccatttcacaaacattataccttagattccaaagcctttaaataaaaatttaataatataaactgcttaaaaaaataaat

SEQ ID NO: 534636 - DNA, 112 bp, Homo sapiens
gggggttgggttgggttggggggggggggtttttaaccgggaacccccgcaaatttttggtttttttttgggttaaaaaaaaaaaaaaggggttttttttttttccccccca

SEQ ID NO: 534637 - DNA, 103 bp, Homo sapiens
acagggcgtacgaatcctcctcctcctggcgaatagtctactcctgtttgagccaaccaacttcatccacaacaatgggtccaccttacgacgcaggtgatca

SEQ ID NO: 534638 - DNA, 396 bp, Homo sapiens
acgtgttcattggggtagggtttactagacgccgggaagaggctcatcggtggcagagcgtggtatctccgggtgctagggttccaggcacagaccaggcttcctggcgtcacggagtgtcctgattgaagctcacggatagctggggtgagcaggaatgagtcagtgtggatggaatgagccttcctcaaaaacccccaccaccgctcttagtaacccggaaaatgctctgaaatagttgacatatacaaagtctagggcatatggggagaaaaacgttctttttttggccagatttccagcatgaagcccaagggaaatgtccacgggctcagcacagtggtctagcatctcaaagcagtgcttggcctgtgtggaggccatggctttcccatc

SEQ ID NO: 534639 - DNA, 254 bp, Homo sapiens
gaggaaagcagaccttgacctctacaagagggcgggagaactcactgagtgatgaggtggaactgtgtgatcaccatatatgcatgaatccactgccagtacaatgatcccagactggttcttgaacatgacagaagtgatgtaaatggatggaaaatacagccatggtcctatgccaattggtcttggacaacaatgctcctgtgaatgaccctggatgctgactgaatgaagattctgggcccaatagatgg

SEQ ID NO: 534640 - DNA, 155 bp, Homo sapiens
attacaatttctttggataaaagacttattagatctgcctgtattatctgttgtctttattacagaatcactatgtctagttggtctgtgtgccacatactgacaaaactttaaacagtacttgatgccagctctctactctgtatgggggatct

SEQ ID NO: 534641 - DNA, 704 bp, Homo sapiens
gggattaaaaagtgttactgagcatttttagaaaaaaaaaaaaaaaaaaaaaaaaaaaaaaaaaaaaaaaaaaaaaaaaaaaaaaaaaaaaaaaaaaaaaaaaaaaaaaaaaaaaaaaaaaaaaaaaaacccacaaaaccacacaaactaaaaactagaccaacctaacccaaccacacccaaattaaacctacattgcccaatccccccaatccagattcaaaccacaaaacagggtcctccaactcaacaactccccacactgaaaaaaccttgacatacccaaactaaacccccttgcaccaaaaccccatttcgccagtcgccaaaatcccaaaaagcccccaacccaccgcctttccaaaaatttggccaacctaaaggccaattgaaaacttaaccgcacaaaatttccaaaaaacaccctttaaattttggttaaacaacttatttcttaaaccaaaaagcccaaaaacccaaaaacccctaaaaccccaaagtataacccacgaaaaagctggaacattgatccatttggaaccaaaacccccttattaaaaaactgcacctcaccccaaaaggccaaaaaaccgctaaaggcgcaataaccaattactgaacaatcccctaaccaaactttttgggaccaagtcccctaaaagcccaaaatgaaaacctaaagggccacctataacaactgcgcg

SEQ ID NO: 534642 - DNA, 828 bp, Homo sapiens
  misc_feature (12)..(12): n is a, c, g, or t
  misc_feature (24)..(24): n is a, c, g, or t
tacggtaggtangaggctggggtngaatcggacgaggccgaggaaaaccgtgtactattagccatggtcaaccccaccgtgttcttcgacattgccgtcgacggcgagcccttgggccgcgtctcctttgagctgtttgcagacaaggtcccaaagacagcagaaaattttcgtgctctgagcactggagagaaaggatttggttataagggttcctgctttcacagaattattccagggtttatgtgtcagggtggtgacttcacacgccataatggcactggtggcaagtccatctatggggagaaatttgaagatgagaacttcatcctaaagcatacgggtcctggcatcttgtccatggcaaatgctggacccaacacaaatggttcccagtttttcatctgcactgccaagactgagtggttggatggcaagcatgtggtgtttggcaaagtgaaagaaggcatgaatattgtggaggccatggagcgctttgggtccaggaatggcaagaccagcaagaagatcaccattgctgactgtggacaactcgaataagtttgacttgtgttttatcttaaccaccagatcattccttctgtagctcaggagagcacccctccaccccatttgctcgcagtatcctagaatctttgtgctctcgctgcagttccctttgggttccatgttttccttgttccctcccatgcctagctggattgcagagttaagtttatgattatgaaataaaaactaaataacagaaaaaagacccccaaaactatttagtaatattggctgatctaggatataagttttttcaag

SEQ ID NO: 534643 - DNA, 1200 bp, Homo sapiens
  misc_feature (12)..(12): n is a, c, g, or t
  misc_feature (24)..(24): n is a, c, g, or t
  misc_feature (889)..(889): n is a, c, g, or t
  misc_feature (1200)..(1200): n is a, c, g, or t
tacggtaggtangaggctggggtngaatcggacgaggccgaggaaaaccgtgtactattagccatggtcaaccccaccgtgttcttcgacattgccgtcgacggcgagcccttgggccgcgtctcctttgagctgtttgcagacaaggtcccaaagacagcagaaaattttcgtgctctgagcactggagagaaaggatttggttataagggttcctgctttcacagaattattccagggtttatgtgtcagggtggtgacttcacacgccataatggcactggtggcaagtccatctatggggagaaatttgaagatgagaacttcatcctaaagcatacgggtcctggcatcttgtccatggcaaatgctggacccaacacaaatggttcccagtttttcatctgcactgccaagactgagtggttggatggcaagcatgtggtgtttggcaaagtgaaagaaggcatgaatattgtggaggccatggagcgctttgggtccaggaatggcaagaccagcaagaagatcaccattgctgactgtggacaactcgaataagtttgacttgtgttttatcttaaccaccagatcattccttctgtagctcaggagagcacccctccaccccatttgctcgcagtatcctagaatctttgtgctctcgctgcagttccctttgggttccatgttttccttgttccctcccatgcctagctggattgcagagttaagtttatgattatgaaataaaaactaaataccaaaaaaaaaacaaaaaacaagaaacaaaaaaacactctgtgtggggcgcgcgccctgaggccctccagagaaaggctctttcagagacaccctctgcgcggttggggccgcgcgggggcgccgncgagttggtgtcaggtgtacacaagtgggcccaacgagcggtgtgttcccataaggagagagactccgggcgccaacgagactcaagtgggcgcttgggtctttcctcccccctattataatagagaagcgccgcgcggcggggcaccaccgagagaggggggtctcttggtggacacaattctccgagagagtgggccgactcccgagggggggcccactcgacgggggccctttatctaccgcgggggggtccccgaggggaggaactctccgaagattcaaatttgtgccgcgctcccggggtggtan

SEQ ID NO: 534644 - DNA, 233 bp, Homo sapiens
actagttgctcctcttcagtagcgggactacaggtgccgcaccacgccaggcattttttgcactttagtagagacgggttcaccatgtttgcaggatggtctcgatctcttgacctcgtgatcatccatctcagcttcccaaagtgctgcgattacaggcatgagccacccacgccagccatgccatttcttaagatccaggtgctcccctccccgggcggagaaggacctcc

SEQ ID NO: 534645 - DNA, 1058 bp, Homo sapiens
  misc_feature (12)..(12): n is a, c, g, or t
  misc_feature (24)..(24): n is a, c, g, or t
tacggtaggtangaggctggggtngaatcggacgaggccgaggaaaaccgtgtactattagccatggtcaaccccaccgtgttcttcgacattgccgtcgacggcgagcccttgggccgcgtctcctttgagctgtttgcagacaaggtcccaaagacagcagaaaattttcgtgctctgagcactggagagaaaggatttggttataagggttcctgctttcacagaattattccagggtttatgtgtcagggtggtgacttcacacgccataatggcactggtggcaagtccatctatggggagaaatttgaagatgagaacttcatcctaaagcatacgggtcctggcatcttgtccatggcaaatgctggacccaacacaaatggttcccagtttttcatctgcactgccaagactgagtggttggatggcaagcatgtggtgtttggcaaagtgaaagaaggcatgaatattgtggaggccatggagcgctttgggtccaggaatggcaagaccagcaagaagatcaccattgctgactgtggacaactcgaataagtttgacttgtgttttatcttaaccaccagatcattccttctgtagctcaggagagcacccctccaccccatttgctcgcagtatcctagaatctttgtgctctcgctgcagttccctttgggttccatgttttccttgttccctcccatgcctagctggattgcagagttaagtttatgattatgaaataaaaactaaataacaaaaaaaaaaaaaaaaaaaaaagagttgaaaaagacaaacgcgacagtcaaactaaaaaaagactgttgtccggcgcgccagtggaccccaacaaaaaggtctttataaacccattggcggggggggccgggaccccaaatgatatgcgcacagaggccaagcggcaccagggaaacccggccacgaacaagggctgtgtttccaccccaaaaaaaacccccgggcaacccaccgtcgtaaccaccccaagagatcgaggccacggcaccacaacaggccaggagcgagtaat

SEQ ID NO: 534646 - DNA, 921 bp, Homo sapiens
taggctaggtacgaggcctgggtgttaattcggccgatggggacctcagtgcctgtgatgctccgggccccgcgggcggtggctggtgtgcgtggagccgttgggctgagtctgtgtgatcggggacgtcgcccgatgagcgtgggacgagtgaggtgtcgggcgctgggttcgagcccggtgtctgtgtgctggcgtgaacttgttcgccaacgacgtgcagcttcctgtgatgcttgttcaatgctggaatgatgtgatgtgatgtggatgcatgctggcagctgtgcatggatgtgatgcctgcccccgtggtccgcatgctgaccctgaccatgtctgtgcctgccgcctgcttggccccgtgtgtgatcctgaatgatggaatgtgtgctggtcctgtggctccacacttatgcttctgtgtgtgcaaactgcagatgtgctgggaacaaactagccctcaagacggtgaatagtatgccaatgaagcatgaagactggagtgatgagtgtattaacaagtaaatggttgactgcgttggggccaatgtacatatgcatgaatgtgaaaaatgtacaaatgctcaccagtgctgagtgacgattgataaaactcgtgcccctggtgaaatgacgcccctcccccacctgcccatggcctgggactctctgcgatgtacataactatttaatgcagctggcagcggcgacagccttccctgagaggacttaaaagcgaaggaaaccgagatgcttcccgcaggccgtgacgatcctccaggactctttatttaccttgagcactttgcctcgtgagacttcttgacagtgtttctgtcccccttctacctcctcatctctctggtcttctgtttctttttaacctctcctccctagctactttggcagtaggactgt

SEQ ID NO: 534647 - DNA, 150 bp, Homo sapiens
gtgtcaagtgaatagtgcaattttagcgttggcacagctgcagagtccaccccggatgtaagcctcttatgcaacattgaagacactcagggtattgttttagtctcagcgggatgtcaatgtaaaacctacgcctgaaatcttgttagg

SEQ ID NO: 534648 - DNA, 388 bp, Homo sapiens
agaaaatgaggccaatagcttgtgaggatttttccccagtttgctgcccgatgtgtaaaaaaaagttttttctgtttccattcccaaacatttttcaatactggtatgaaatgagaatggatcccagctggagaatgaatgagtaaaggagctgagttcggattcagagtcccagaggtaacaaaggaagtaaagcccctgcatatgggaagctgatatttgttttccaaaaggaggaaagattttgaaagggtaggggtttaaccaaatatggcctttaactgtagctctagggtttactgtttgtgtgaacttgagcagcttactcaacttctttgaaccccaatttcctcatgtaaaaataaaaattgctgttgttagggtttta

SEQ ID NO: 534649 - DNA, 1530 bp, Homo sapiens
  misc_feature (12)..(12): n is a, c, g, or t
  misc_feature (24)..(24): n is a, c, g, or t
tacggtaggtangaggctggggtngaatcggacgaggccgaggaaaaccgtgtactattagccatggtcaaccccaccgtgttcttcgacattgccgtcgacggcgagcccttgggccgcgtctcctttgagctgtttgcagacaaggtcccaaagacagcagaaaattttcgtgctctgagcactggagagaaaggatttggttataagggttcctgctttcacagaattattccagggtttatgtgtcagggtggtgacttcacacgccataatggcactggtggcaagtccatctatggggagaaatttgaagatgagaacttcatcctaaagcatacgggtcctggcatcttgtccatggcaaatgctggacccaacacaaatggttcccagtttttcatctgcactgccaagactgagtggttggatggcaagcatgtggtgtttggcaaagtgaaagaaggcatgaatattgtggaggccatggagcgctttgggtccaggaatggcaagaccagcaagaagatcaccattgctgactgtggacaactcgaataagtttgacttgtgttttatcttaaccaccagatcattccttctgtagctcaggagagcacccctccaccccatttgctcgcagtatcctagaatctttgtgctctcgctgcagttccctttgggttccatgttttccttgttccctcccatgcctagctggattgcagagttaagtttatgattatgaaataaaaactaaataaccaattgctcaaaaaaacaacaacacaaaaacacaaaaacaaacacacactgtgtcgggccggccctccggccccgcgcggacaagagctctttcagcagaccctcgtgcggttgggcgcccggggcccaatagggtgcaaagcgagaacaagagggccacaacaggcgtgatcacccaaggagagaaaccgcggggaacaggaaaagaagagcgccggcgagattcttccaccaacgccaaacaaaccgccccaggagggcacacacaccgacggcgtacacagagacacaaaatcccccaagaagtggagcgttcaaagggaggggaaaaacaacagccggcggcacactacgaccacaagagagggcacccaaagcgagagaacacccacaagcaaacaaagtcataaaaacgcccacgacgccaacgcgggcaaacagtcgggagcagcgggacagcgacgtgggaggatggaggagacaagcggggaggggggagggaggtggtagacgggagaggggggaggggggacgacagggaagacgggactaagcggagaagaggaaagtctagcagaacggaccggcagagggacggagcgagtcaagtgcgcgcgacggacgcgcaaggacgcagactggagacgataagcgagcgagggaggaggggcatcggggagggtcgcgggacgggaagcgaaagggggatgtcaggcctagatgacgagcgaaaacagagcgagcgtaaggggaaacgaagcggcg

SEQ ID NO: 534650 - DNA, 387 bp, Homo sapiens
  misc_feature (6)..(6): n is a, c, g, or t
  misc_feature (15)..(15): n is a, c, g, or t
  misc_feature (33)..(33): n is a, c, g, or t
  misc_feature (355)..(355): n is a, c, g, or t
cttttncccttaatnattaccccaaacaatacngtataacaacctatttatatagccccttatattgtatttggtattataaataatcctagaggtgatttaaagaatacaggaggaggcccaggcacggtggctatgccctgtaatccctgcactttgggaggccgaggtgggtagatcacgagatcaggagatcaaaaccatccctggctaacacagtgaaaccccatctctactaaaaattcaaaaatttagccagacatggtggcactcgcctgtagtcccagctacccaggaggctgaggcaggagaatcgcttgaaggaagcggaggttgcagtgagctgagattgtancgctgcactccagtctgggcaacagagcgaga

SEQ ID NO: 534651 - DNA, 347 bp, Homo sapiens
gcattttgtagatgtgggcattatcttgtggtcaataaaaagacactgaagaggccaggcatgatggctcatgcctgtaatctcagcactttgggaggctgaagtgggaggattgcttgagcccacaagtttgagagcagcctaagcaacatggtgagaccctgtgtctacaaaaaataccaaaaaagttggccaggggtgctggcacatgcctgtagtcccagagactctggaggccgaggcaggaggatcgcttgggcctgggaggccaaggctgcagtgagtcatgatggcaccaccacactccagcttggacagcagagtgagaccctgtttaaaaaaaaaaa

SEQ ID NO: 534652 - DNA, 1345 bp, Homo sapiens
  misc_feature (12)..(12): n is a, c, g, or t
  misc_feature (24)..(24): n is a, c, g, or t
  misc_feature (1345)..(1345): n is a, c, g, or t
tacggtaggtangaggctggggtngaatcggacgaggccgaggaaaaccgtgtactattagccatggtcaaccccaccgtgttcttcgacattgccgtcgacggcgagcccttgggccgcgtctcctttgagctgtttgcagacaaggtcccaaagacagcagaaaattttcgtgctctgagcactggagagaaaggatttggttataagggttcctgctttcacagaattattccagggtttatgtgtcagggtggtgacttcacacgccataatggcactggtggcaagtccatctatggggagaaatttgaagatgagaacttcatcctaaagcatacgggtcctggcatcttgtccatggcaaatgctggacccaacacaaatggttcccagtttttcatctgcactgccaagactgagtggttggatggcaagcatgtggtgtttggcaaagtgaaagaaggcatgaatattgtggaggccatggagcgctttgggtccaggaatggcaagaccagcaagaagatcaccattgctgactgtggacaactcgaataagtttgacttgtgttttatcttaaccaccagatcattccttctgtagctcaggagagcacccctccaccccatttgctcgcagtatcctagaatctttgtgctctcgctgcagttccctttgggttccatgttttccttgttccctcccatgcctagctggattgcagagttaagtttatgattatgaaataaaaaaaaaaaaaaaaaaaaaaaaaaaaaaaaaaaaaaaaaaaaaaaaaaaaaaaaaaaaaaaagagaggggggggcgcgccgcacaaaaattctctcccccggggggcgcccccattggcgcgccgcgccccccctttttttgaacagaaggggcgcccccaaaagagaaggaggcaagcttattatgagcacagacgaagcgaagcgcggcgccccggcactattaaacaacagacgcacgaggagcggggaaataacagcctgcggcctcagcgggagcacaacattggggagggagaagcgaccccctaagacgggcggggggggcggagcagaacaacatgatggggccaaacacatcctcctctctgcgcgggtgttttttttgacgacccctccagaggagcggacataatattaaacacctttcaagcagggcttagtataaccgcggggggtacaacacaccacgcgggcaaatataaatgctgcgcggcgcggctcgggaaaaatttttcgctggccgcacggaggagcataatactttcaggaacaaaaattttttcccacgaggggacggcgtcgaagtagn

SEQ ID NO: 534653 - DNA, 906 bp, Homo sapiens
  misc_feature (12)..(12): n is a, c, g, or t
  misc_feature (24)..(24): n is a, c, g, or t
  misc_feature (768)..(768): n is a, c, g, or t
  misc_feature (785)..(785): n is a, c, g, or t
  misc_feature (790)..(790): n is a, c, g, or t
  misc_feature (792)..(793): n is a, c, g, or t
tacggtaggtangaggctggggtngaatcggacgaggccgaggaaaaccgtgtactattagccatggtcaaccccaccgtgttcttcgacattgccgtcgacggcgagcccttgggccgcgtctcctttgagctgtttgcagacaaggtcccaaagacagcagaaaattttcgtgctctgagcactggagagaaaggatttggttataagggttcctgctttcacagaattattccagggtttatgtgtcagggtggtgacttcacacgccataatggcactggtggcaagtccatctatggggagaaatttgaagatgagaacttcatcctaaagcatacgggtcctggcatcttgtccatggcaaatgctggacccaacacaaatggttcccagtttttcatctgcactgccaagactgagtggttggatggcaagcatgtggtgtttggcaaagtgaaagaaggcatgaatattgtggaggccatggagcgctttgggtccaggaatggcaagaccagcaagaagatcaccattgctgactgtggacaactcgaataagtttgacttgtgttttatcttaaccaccagatcattccttctgtagctcaggagagcacccctccaccccatttgctcgcagtatcctagaatctttgtgctctcgctgcagttccctttgggttccatgttttccttgttccctcccatgcctagctggattgcagagttaagtttatgattatgaaataaaaactaaataacaanaaaaaaaaaacacaaanaaaanannaacaacaacacaaacaccacacaacacacaacacaacaaaagaaacacaccaaaaacccaccctacaacaaacccgcggcgcctccttctcgggggggcgaccacacagatgg

SEQ ID NO: 534654 - DNA, 249 bp, Homo sapiens
tctgctcaggtcaagagattttcctgctcagctcccgagtagccaggattacaggcaagtgccaccatgcccagctaatatttgtatttttagtagagatggggtttcgtcatgttgcccaggctggttttgaactcttgagctcaggcaatccaccaatctcaggctcccaaagtgttgggattacaggcgtgagccaatgcccctggccaaggctccttttaatccttgtaaccgagaggaccattg

SEQ ID NO: 534655 - DNA, 900 bp, Homo sapiens
  misc_feature (12)..(12): n is a, c, g, or t
  misc_feature (24)..(24): n is a, c, g, or t
tacggtaggtangaggctggggtngaatcggacgaggccgaggaaaaccgtgtactattagccatggtcaaccccaccgtgttcttcgacattgccgtcgacggcgagcccttgggccgcgtctcctttgagctgtttgcagacaaggtcccaaagacagcagaaaattttcgtgctctgagcactggagagaaaggatttggttataagggttcctgctttcacagaattattccagggtttatgtgtcagggtggtgacttcacacgccataatggcactggtggcaagtccatctatggggagaaatttgaagatgagaacttcatcctaaagcatacgggtcctggcatcttgtccatggcaaatgctggacccaacacaaatggttcccagtttttcatctgcactgccaagactgagtggttggatggcaagcatgtggtgtttggcaaagtgaaagaaggcatgaatattgtggaggccatggagcgctttgggtccaggaatggcaagaccagcaagaagatcaccattgctgactgtggacaactcgaataagtttgacttgtgttttatcttaaccaccagatcattccttctgtagctcaggagagcacccctccaccccatttgctcgcagtatcctagaatctttgtgctctcgctgcagttccctttgggttccatgttttccttgttccctcccatgcctagctggattgcagagttaagtttatgattatgaaataaaaactaaataacaaacaaacaaaaaacaaagaaaaaaaaaaccgggggtttattgggggggggagacagggtaagcaaggcctgggcaaggggtccggaccgtttggcaaggggaatatgggccaaagggggaaaaagaaacggtac

SEQ ID NO: 534656 - DNA, 820 bp, Homo sapiens
  misc_feature (12)..(12): n is a, c, g, or t
  misc_feature (24)..(24): n is a, c, g, or t
tacggtaggtangaggctggggtngaatcggacgaggccgaggaaaaccgtgtactattagccatggtcaaccccaccgtgttcttcgacattgccgtcgacggcgagcccttgggccgcgtctcctttgagctgtttgcagacaaggtcccaaagacagcagaaaattttcgtgctctgagcactggagagaaaggatttggttataagggttcctgctttcacagaattattccagggtttatgtgtcagggtggtgacttcacacgccataatggcactggtggcaagtccatctatggggagaaatttgaagatgagaacttcatcctaaagcatacgggtcctggcatcttgtccatggcaaatgctggacccaacacaaatggttcccagtttttcatctgcactgccaagactgagtggttggatggcaagcatgtggtgtttggcaaagtgaaagaaggcatgaatattgtggaggccatggagcgctttgggtccaggaatggcaagaccagcaagaagatcaccattgctgactgtggacaactcgaataagtttgacttgtgttttatcttaaccaccagatcattccttctgtagctcaggagagcacccctccaccccatttgctcgcagtatcctagaatctttgtgctctcgctgcagttccctttgggttccatgttttccttgttccctcccatgcctagctggattgcagagttaagtttatgattatgaaataaaaacggatgcgcgccgatttgccctgcccctctctccatcccgcagtcacaattcgaactccatctc

SEQ ID NO: 534657 - DNA, 898 bp, Homo sapiens
  misc_feature (13)..(13): n is a, c, g, or t
  misc_feature (16)..(16): n is a, c, g, or t
  misc_feature (786)..(786): n is a, c, g, or t
ggcagagatcgtncancagtgcttgctgttccttagaattttgccttctgtttgcagacaaggtcccaaagacagcagaaaattttcgtgctctgagcactggagagaaaggatttggttataagggttcctgctttcacagaattattccagggtttatgtgtcagggtggtgacttcacacgccataatggcactggtggcaagtccatctatggggagaaatttgaagatgagaacttcatcctaaagcatacgggtcctggcatcttgtccatggcaaatgctggacccaacacaaatggttcccagtttttcatctgcactgccaagactgagtggttggatggcaagcatgtggtgtttggcaaagtgaaagaaggcatgaatattgtggaggccatggagcgctttgggtccaggaatggcaagaccagcaagaagatcaccattgctgactgtggacaactcgaataagtttgacttgtgttttatcttaaccaccagatcattccttctgtagctcaggagagcacccctccaccccatttgctcgcagtatcctagaatctttgtgctctcgctgcagttccctttgggttccatgttttccttgttccctcccatgcctagctggattgcagagttaagtttatgattatgaaataaaaaactaaataacaaaaaaaaaacaaaaaaaaaaaaacctccggggcctttttgtcgggggggggaaaaagggttttgaaagggccatggtctatgttgttccggcccctttttgtcncaaggggaatcgcgggccccaaaggggcgataatcgaacccgtacttcttcttcttcacacgtccaacgacacagcagccccaaagagaggaaaaacaacgaaacacaccac

SEQ ID NO: 534658 - DNA, 1401 bp, Homo sapiens
  misc_feature (92)..(92): n is a, c, g, or t
  misc_feature (512)..(512): n is a, c, g, or t
  misc_feature (1289)..(1289): n is a, c, g, or t
cacacttattcgacgtgtcacagtcaggaatggcagaccagcaagaagatcagccatagctgacggtggacaactcggaataagtttgactngtgttttatcttaagccaccagatcattccttctgtagctcaggagagcacccctccaccccatttgctcgcagtatcctagaatctttgtgctctcgctgcagttccctttgggttccatgttttttttgttatttagtttttatttcataatcataaacccgccgaggaaaaccgtgtactattagccatggtcaaccccaccgtgttcttcgacattgccgtcgacggcgagcccttgggccgcgtctcctttgaggtaaggggcctggataccaagaagtgactgctcatctaatcccataaagctcatgttaaccagcatctgcgcacggtaggtaagcaatttttctcgatggtacacagtgactaaaagaacagctgtttacccctgatcgtgcagcacgtgctttgccgtgntttcccctttaagcacaattctcttctggcccttcatgctgtttgcagacaaggtcccaaagacagcagaaaattttcgtgctctgagcactggagagaaaggatttggttataagggttcctgctttcacagaattattccagggtttatgtgtcagggtggtgacttcacacgccataatggcactggtggcaagtccatctatggggagaaatttgaagatgagaacttcatcctaaagcatacgggtcctggcatcttgtccatggcaaatgctggacccaacacaaatggttcccagtttttcatctgcactgccaagactgagtggttggatggcaagcatgtggtgtttggcaaagtgaaagaaggcatgaatattgtggaggccatggagcgctttgggtccaggaatggcaagaccagcaagaagatcaccattgctgactgtggacaactcgaataagtttgacttgtgttttatcttaaccaccagatcattccttctgtagctcaggagagcacccctccaccccatttgctcgcagtatcctagaatctttgtgctctcgctgcagttccctttgggttccatgttttccttgttccctcccatgcctagctggattgcagagttaagtttatgattatgaaataaaaaactaaataacaaaaaaaaaacaaaaaaaaaaaaacctccggggcctttttgtcgggggggggaaaaagggttttgaaagggccatggtctatgttgttccggcccctttttgtcncaaggggaatcgcgggccccaaaggggcgataatcgaacccgtacttcttcttcttcacacgtccaacgacacagcagccccaaagagaggaaaaacaacgaaacacaccac

SEQ ID NO: 534659 - DNA, 182 bp, Homo sapiens
tcggatacaatgaaaaggatggcacagcttctggatcaagtcggttgatgagtccgaagccatttctctaaatctagtagttaacaagaccatctttgctaaaggtagacagaattagcaggaatttatcaacttccagagacccaaggaatccaaataattttattaaatgactggtctca

SEQ ID NO: 534660 - DNA, 119 bp, Homo sapiens
ggtgtgctctgatatagaagcgtagacatgcagctaaagccagtgcctggaaaactatctttgcagagcatctgtggacaggtgttctggaacatgctctgggagacatggttgtatcg

SEQ ID NO: 534661 - DNA, 151 bp, Homo sapiens
ctcaacgctttatacttctccatcaaatttatcccagtaggactatttgtcacctgatctcttatagaatagcttgatatataaaatcagatcctaacattgaactcgatttttcgacatatttacgtatttggctcaccagagtattaat

SEQ ID NO: 534662 - DNA, 454 bp, Homo sapiens
  misc_feature (16)..(16): n is a, c, g, or t
  misc_feature (79)..(79): n is a, c, g, or t
  misc_feature (94)..(94): n is a, c, g, or t
  misc_feature (419)..(419): n is a, c, g, or t
  misc_feature (439)..(439): n is a, c, g, or t
gggaccgcgggggacngggagcgagtatgtccgctctgactcggctggcgtctttcgctcgcgttggaggccgcttatnagaagcggctgccanggactgctggagatggtggagtccgtcatgccggtggtggtgtgcacattgaagcccggtatagacagttcccccagctgaccagattcccaggtgttccagagcgagttcttcagcggactcatgtggttctggattctctggcgcttttggcatgactcagaagaggtgctgggtcactttccgtatcctgatcttcccagtggacagatgaagaattaggtatccctcctgatgatgaagactgaaggtgtagactcagcctcactctgtacaagagccaggtgagaatttcaaggattatcgacttcatattgcacattanagttacaaattaaagtggcntggtcaagaatgaga

SEQ ID NO: 534663 - DNA, 377 bp, Homo sapiens
atagcaaatgttttatatccgggctggtgtggtaaaaacctgagtctgtccaccgctaggaataactatatctgtatgtataatactgctcctacaggttcttctgacttctataaaagatgaagtcatggaattaggacaggaacaggaaaaactaatgtcattatctcataaagcctgatggtttcaaatattcatataaatcaagcatcctgatacctacgttgagaaaaaatgatctctgaaatagagctgggcttttgaatctcctacaagacctgctgggtggaatgttcaacctaacagggcctctgcaggactttcctccagctttcctatttctgggcactctctggtttgggtactacgctttggca

SEQ ID NO: 534664 - DNA, 361 bp, Homo sapiens
cgagtctcctcttcaatagtgcgtagggggcaggacgcatggtagtgtggggggcagcctggtaacatctccgcttaataggcgtggttcagcagacgatactagggactcgctggcagaagccccagcctgatcgttcgaattgtactttccttgccaggcaaggctgttggccagggctcgcttgacatactcctcctgcgcagccttcaggttctccttcttcccgctcccaggccttcagggcagagggcctgcagggctcggccgtaggagaaggtcagcgcccagggtttcagcagtgggcacttgttaatggcattgaggttgatggacgcctcctcctcactctggcctccag

SEQ ID NO: 534665 - DNA, 429 bp, Homo sapiens
tacagcctagcatttgggtggactagatgtgtcagagcctgcacgagtcagtcctgatggtataaagagaaccattgaagccaggatactcattctatccagggtgacgagaaatgagacagggccctatcaacgtgaaatacgggaccgatatggtggcatccgaagtagcccagtcaccctgaatgtccgctatggtccaggagctccccagaatttagccttgattcacctattaccggacaggagagacccctcgatcttgtgctggtttgctggaatcttagcccaccgggagagtatgctgggacaactagtgggaagtttcggctatcaggacaaaagctcggtatcccccagattactacagatcatagcgggctctatgcttgctgctgtacgtaactcagccactggggaggctaggat

SEQ ID NO: 534666 - DNA, 302 bp, Homo sapiens
tagtggagttggatcttgtaactctcttttctcactttcttcccctttctctaacacgcctttcccatcctgctagtagacttcttgattgtcagtctgtgatcacatccagtgattagtttaggtttctagttccctttctagtgatccatgaaagggcatttatttgaccatgccacactagacagtagacagagaagctgatagattcaagaggcagattttatacgtagagtagtctaaatgatttcttttatcgctatgtattatactgtgattctcttttacttaatagtctatat

SEQ ID NO: 534667 - DNA, 584 bp, Homo sapiens
aatcccccaaattcacaaccggggcccagtattagctgagttctatgagtagctctatctaattattgaactccaaaaaggatatggtagtcctcacgttttaattagcatcatgagaaatgtatatgggcccatggagtttgagcctggcatctgccgtaaggacagtgtgggactgagtcagggcctgtgctgacactgggtggtgtcagaaataaaatgttagacaatgagttactgttatagaattgcattgcttacagtgcactgcaaatttggtgccttaaaaaagatactggggcctgacctggaataaaactctggatgtctgggaatgggacgctctgctctcctgtacacaggctgtcacactgcccattgtcctgtgatttcagttctcccagggtgagagaggactgaaaaattagagaataggagctctggccgggtgccgtggctcacgcctgtaatcctagcactttgggaggccgaggcgggtggattgcctggactcaggagttcaagaccagcctgggcaacgtgggaaaaccccgttctttgcaaaaattgtgttgtagaattaa

SEQ ID NO: 534668 - DNA, 1289 bp, Homo sapiens
tcactggacaaagacacttttatttctttttaatggacatttaaacacaagctgtgcatacaggggaaaaaacatgtgattaaagaggaggcaccaaatttgtgagacaaattagtcggatttagaaattaaagcattctcattttggagttagagagcaggggaaggtggttctataaagtgggtgactcgtgggatttaggccctcaaaaacccttttggggttttcgtgcccgtgcccacccttctgtggaaaagggtgggcacgtggatttagttataacagaacaacacgtttacttgagcgagtctcaactgtgtggactcctcgcggggcttgtggggttttaaacaagacaccaccacgtgtgttccccacatatgagcgtttatagagagaatcaagagagttgtggcccgtggtctcacacgtgtgagagccagtgtttcacgtgacacgagagagggggcgcgtatagtgggggggtagtatatttttctcgtggtgataggaaatatagcgcgatgtgtgtcacataaaagcgcgagggcccttttgtgaaatatttacaatttcttttataacaaaagccaaaaatttatttagaaaaggtttatacagatttttataatctcgacacattttgggatagcggggggtatcacaataggcgatacaatctttactaccagagaaatcttgtgcgtgtgatatagagcgctctacaaagcgtgggtttcactataacctttctgtgcctccttgtgagaaagagaaagattggggggagacccagggggggcgtggggaggttcccaaaaacactctgtggttcacattgtggctgaatcctgcgaacgtggtccttggcggtctaaagaacctgtggctgcggaaacgacatttcattttcttaagaaccttctacactaacctaaaggggcaattaaaaacccccaaacctttttattcccttaacatttgcatcctaacccaattttcgtgggcaaccacgagagataggagactgtgtgaacaagggccaagctgtgtgaggttcaccacttgtggcgccagtgcgaaaaacttctatattggcgccctgattcacactgtgtttcccacaggtcaattataatccctagtggtgtaaaacaagcggtggtgtatcgcggcccaaagagcgcttttataaaataagcgctacattataatagacacaataaacatagagaagaaaccacagcagataaccacataccattaacaccactatcactctatcagc

SEQ ID NO: 534669 - DNA, 116 bp, Homo sapiens
aaattaaaaaaatcttttcttttctttgttaatataaaacaatataatcacaataccagtaatatggaactctacagtttattgcctactggttactgcaggtatcaattttcctc

SEQ ID NO: 534670 - DNA, 380 bp, Homo sapiens
aatatgggggccctaatgggttccgccccccccaagtttctcgatagtgaggagaatgagaagtagcccacagctcccagaacctttttttcctttttggcctaacttttccagttaggatttagaactttgcctttttttttttttttttttttttttgagatgggttctccctatattgtccagggtagagtgcagtggctattcccagatgcgaacatagtacactgcagcctccaactcctagcctcaagtgatcctcctgtttcaacctcccaagtaggattacaagcatgcgccgacgatgcccagaatccagaactttgtttatccctctccccaacaacctaaatgtgaaaacagaataaacttcacccaga

SEQ ID NO: 534671 - DNA, 225 bp, Homo sapiens
  misc_feature (46)..(46): n is a, c, g, or t
  misc_feature (198)..(198): n is a, c, g, or t
agcatctcatggtgctgggctcttgtggtctgactcctgtcactcntgatttggtagttcctttagacttggtcctgatcctttttctcttctcgtgctaatttttttccatggctttgaatatatacttattgactccatatttagcaccaactcaatcctctcttctcaactcagtccaataccaaatgctttcanaggcattccttacttaaatgccaggta

SEQ ID NO: 534672 - DNA, 888 bp, Homo sapiens
acctggccagtgaccctctctcctcgttgggctggtcgtcctcccccccctcgcctctgttaattatacggcgtccccgcccctgtttctgtggtaaacaccgcccaccttatatacactgtggccgtgcccccctttggcaccagaacgttcccccgtggcccaaagtgggctgagcccccccccaatgggggggatggcccccctcctcgcccctcgatacccagctggtctgcctcacacaacgtgtgtcctccacacggacgcatcgtcctgacccaatatgctggtcatctccacatggggcactcttcaccacaaatggtgttacttcccccctacgtcatggtaagccttgtgtaggaccccccgccgtcaggagccacacacatacccgcgggcgcaacccaccactgccggggacccccccctatggccccacttgtatcgccgcgccctgacaatggtcagcgccagccccgttacgacccccaccgcccagcagactcagggcccgacagcgtcccagtgctgggcaccccaccaggcgcaaagtgtgcgcgggcggcacacagcagcaagaccccacatactgagcagtgaacaacaacacacaacagcgcctgctgacacaagacaccgcccccaacgagggacctcagacacatactatcacggatgccgcgagccgaacaatggggcaaccaccggggcccactcgcacctaggaggcacacctcctgaacaggcccccgcacccacggcacccaacgcaggcacctatgactgaaccgcgaacaccggagaccgcactcgtggcaccaagactccagagcccgcaaaaccatcttgaatatacaaaggccatccgacccccccacatgacaa

SEQ ID NO: 534673 - DNA, 358 bp, Homo sapiens
atgtgatcccacacacttaaccagtcccgaactgtgactgacttaagcaacccatatacaaacgtaaactcagcgccggtgatgtacactcctgctggtacaccactacctgcaccagaaacctgtgaaggtacgaaacagctagtgtaacctgtattaatagtaaagcgtagttcaataactaacctgctatattggatcgaatgtaacagatgagagctatagtatcacataactcaacagtaagtgatatgtcaagtgtgggaacactgacagacttctgtaccgtatccatggccactccagtgccaacagtcaattctactgctaaagccacagttcagccctccccttctac

SEQ ID NO: 534674 - DNA, 82 bp, Homo sapiens
ggatttgctggtgcagtacaactaggcttaatagggagctcgaattcgagcctcgaattcgagcaaaaacgttagaagcttg

SEQ ID NO: 534675 - DNA, 969 bp, Homo sapiens
ggacgtgaagatcctggtgatccccatggtgccgttcgaccatcccgctagtaaccggtatgttagtaacaagccgatactcgaaagtctcgtcattctgccgaggttgtcccctgatgtcgcgcaggattcggaactattgatgacgctggggcggaataaggcgaaagctgtgatgagtatccagagttatgtaggacagctagtggttgtcagactgaatagtgaccacgctagtcactctcaaagccctggagaggctgggccggaacttggtgctcggctgaagagtagcaatagggagaaagacgttgtgggaaaaggaatcgcgtttacatagtccgggggtagcgcgtgccagactccatatccatcggtcgattccgcaatcaacagatcgatttggttagtctcctgatgcctgagggcctgtacagggactccaagttcaggggtccatgacgatgtgctgttctgtgtgtgcagaaggccgcgcagcgcccagcgtgttggagcgaggggtgttcaccaagttgcgcgcatacgtgttaatcaaatgatcgcaagtgccgtcatccagagtgcatggcgggaacccataaggcacccacagtgttgtacctttgaccgcaccatgtcgtcatgggcacatatgcatgtccaacgtattctcactgtgcgccgggcaaggaaagaaggtcctactacctcttcagaaggagaagtggtgggttatcagggcaaaggttacagaatgccttgatttgacattgggacaagatgagtagggtggactggacaaaaggcagggtacaatcaacgcgaagttgagcttgttgccgtgtcaaatgtacgttccccgcaggtgtgtggatccgtcttgggaccacgtggtagtggtcctggaatttcatgaggcgttttcaatgttgctgccccccctcttaataattcaccaataaaattttg

SEQ ID NO: 534676 - DNA, 1265 bp, Homo sapiens
  misc_feature (1258)..(1258): n is a, c, g, or t
cccggcgcgtccaggcccccgtaggaagcgcgaggcgaggagagtgctggggttgcgacgagcaggcagtgggtcctggcacgaggaagagtatatcgaggtgcctccagacggtcatccaaagggatttctttcctgatgtggagaagctccaggcacagaaggagtacctggaagccgaggagactggagacttggaacggatgcgccagattgccatcaagtttggctctgcctttgggcaaagatgtcccggggagcccccgcaaccctatgtgactccagccacattggaaacccctgaggtgcatgcaggcactggagtggtgggcaaaaaagccgcaggcccctgaggccgaggcctgggaggatggcagaggctggagaggcaggagggagaaggaagccgttgcccaggctagattgtcttcctgaagccggtacacgagtgaggacaattgcctcctttccagcgaggatccatggagggttggccaaggcagagaagcccgggcacgccaacgctttgggttctaccaaggctgagggaacagttggacgacgagggcagaacagataatctcggaaattcccggtcagcaaaagcaaccaaggcccttcgagaagcagccaaggcccaatgttgtggagaaccttggacagttccaaggggccaagaaattcccgtcattgtctaattccaagagggttgtcccttgaagaggagccactagttaaagaaaggcccccggtgcaggttggctacattagcaagcagggcgctatccattaaagggaaccactttatgtcaaagccctgatgcacggtgttgacaagctcactagaagtgaatacgtgccctaaatgtcccacgcacaaactcggggccaaggtgggccccccgattggcaagagacgtgattccccaggagctcccctgaagggggggggaattggacttgtatgaccagacttttaccctgcccttgtgtgtaaagataccccgagataacacgggcgagggttgaaaaaacctggagtggagaggggggggaacccacttggggaggaacggccggattaataagagatgaccggcggacgggggtaaagaaacgggtgtaacggaggacatagtggtggataatataaacgcagagcgctagtgctcggagtcgagagggagtatatacctaggacaacgccccgcgcgttcattccctcctttgcgtctggttgctgctacacaaaaaaaanaaaggcc

SEQ ID NO: 534677 - DNA, 774 bp, Homo sapiens
  misc_feature (12)..(12): n is a, c, g, or t
  misc_feature (24)..(24): n is a, c, g, or t
tacggtaggtangaggctggggtngaatcggacgaggccgaggaaaaccgtgtactattagccatggtcaaccccaccgtgttcttcgacattgccgtcgacggcgagcccttgggccgcgtctcctttgagctgtttgcagacaaggtcccaaagacagcagaaaattttcgtgctctgagcactggagagaaaggatttggttataagggttcctgctttcacagaattattccagggtttatgtgtcagggtggtgacttcacacgccataatggcactggtggcaagtccatctatggggagaaatttgaagatgagaacttcatcctaaagcatacgggtcctggcatcttgtccatggcaaatgctggacccaacacaaatggttcccagtttttcatctgcactgccaagactgagtggttggatggcaagcatgtggtgtttggcaaagtgaaagaaggcatgaatattgtggaggccatggagcgctttgggtccaggaatggcaagaccagcaagaagatcaccattgctgactgtggacaactcgaataagtttgacttgtgttttatcttaaccaccagatcattccttctgtagctcaggagagcacccctccaccccatttgctcgcagtatcctagaatctttgtgctctcgctgcagttccctttgggttccatgttttccttgttccctcccatgcctagctggatgcagagtaagttatgattatgtatttactatcttatggtttttcttttccc

SEQ ID NO: 534678 - DNA, 230 bp, Homo sapiens
taaattacttagtccttattatcaaaaaggatgaggtcaacctaggtctttcttggcattacctatactataaatttctcaaatgagactttttacactgggggcaatgaactataagcctaataacacactagagtagattattaaagtggtgcttctgaagtgctataatcatcatcttcaccagggctttgtaaattatttctttccacaggatttaaaacttcaat

SEQ ID NO: 534679 - DNA, 948 bp, Homo sapiens
  misc_feature (12)..(12): n is a, c, g, or t
  misc_feature (24)..(24): n is a, c, g, or t
tacggtaggtangaggctggggtngaatcggacgaggccgaggaaaaccgtgtactattagccatggtcaaccccaccgtgttcttcgacattgccgtcgacggcgagcccttgggccgcgtctcctttgagctgtttgcagacaaggtcccaaagacagcagaaaattttcgtgctctgagcactggagagaaaggatttggttataagggttcctgctttcacagaattattccagggtttatgtgtcagggtggtgacttcacacgccataatggcactggtggcaagtccatctatggggagaaatttgaagatgagaacttcatcctaaagcatacgggtcctggcatcttgtccatggcaaatgctggacccaacacaaatggttcccagtttttcatctgcactgccaagactgagtggttggatggcaagcatgtggtgtttggcaaagtgaaagaaggcatgaatattgtggaggccatggagcgctttgggtccaggaatggcaagaccagcaagaagatcaccattgctgactgtggacaactcgaataagtttgacttgtgttttatcttaaccaccagatcattccttctgtagctcaggagagcacccctccaccccatttgctcgcagtatcctagaatctttgtgctctcgctgcagttccctttgggttccatgttttccttgttccctcccatgcctagctggattgcagagtaagtttatgattttgaatataaattatatacaacaaaaaaaccacactcaacaacaaaaaggcgggcgctctctacatttacccgggggcacactccgcccacttttttcacaaggcgccaaagaacattacacgaacggcgcacaaacgagcggaaccgctcgtctgcgaagcacactggggcacggaccacagacagcggaaaatgtctgaccac

SEQ ID NO: 534680 - DNA, 287 bp, Homo sapiens
ggggccccaaaaccccccccccgggggggggggggccccccttttttaaaattttttgggggcccccccggccccccctgggggttgggcctggggggcccccccccaggaacccccaggtggggggggaaaagtttttttttgtttttggcctttttccccccggggggggggggggcccccaaaattttttaaaccccgggttttttttgggggggggccttccccccccccccttttattttttttaaaaaaaaaaaaattggggtataaatatggttttccca

SEQ ID NO: 534681 - DNA, 85 bp, Homo sapiens
  misc_feature (34)..(35): n is a, c, g, or t
ccctacgctgcgggcccgtatcccgtgggaaccnngaggagggggagggtggagacgaaaaagtgatgatatacctcccctccca

SEQ ID NO: 534682 - DNA, 765 bp, Homo sapiens
  misc_feature (12)..(12): n is a, c, g, or t
  misc_feature (24)..(24): n is a, c, g, or t
tacggtaggtangaggctggggtngaatcggacgaggccgaggaaaaccgtgtactattagccatggtcaaccccaccgtgttcttcgacattgccgtcgacggcgagcccttgggccgcgtctcctttgagctgtttgcagacaaggtcccaaagacagcagaaaattttcgtgctctgagcactggagagaaaggatttggttataagggttcctgctttcacagaattattccagggtttatgtgtcagggtggtgacttcacacgccataatggcactggtggcaagtccatctatggggagaaatttgaagatgagaacttcatcctaaagcatacgggtcctggcatcttgtccatggcaaatgctggacccaacacaaatggttcccagtttttcatctgcactgccaagactgagtggttggatggcaagcatgtggtgtttggcaaagtgaaagaaggcatgaatattgtggaggccatggagcgctttgggtccaggaatggcaagaccagcaagaagatcaccattgctgactgtggacaactcgaataagtttgacttgtgttttatcttaaccaccagatcattccttctgtagctcaggagagcacccctccaccccatttgctcgcagtatcctagaatctttgtgctctcgctgcagttccctttgggttccatgttttccttgttccctcccatgcctagctggatgcgagtagtttgattgataaagtatatcacaaaaaataataa

SEQ ID NO: 534683 - DNA, 400 bp, Homo sapiens
  misc_feature (9)..(11): n is a, c, g, or t
  misc_feature (279)..(279): n is a, c, g, or t
tacgttgannncgctgatgacaccccggatcagtctggcatagaggatcgtggggatgacgtgcatcacgaatgctgccgcgatgaccaggaacatcgataccatgatgaaccagtcgttgatgttctgacccttcatcgggccacctctccatgtctcgccatcgcttgggtgtcgatgtgcagtccaacagataactgcgcggagattgagagaggggtgggagtcccgctccgctcgcctgagaatagtgtagcgccgacaccacggaattgggancaggtgtcggcgctacgcagagatcactcgatgataccggcggccaccagctccgatcggatccgacgggtcagggtgtcggagttggcctgcaacagcaggcgtgcctgacgggcacggt

SEQ ID NO: 534684 - DNA, 785 bp, Homo sapiens
  misc_feature (12)..(12): n is a, c, g, or t
  misc_feature (24)..(24): n is a, c, g, or t
  misc_feature (759)..(759): n is a, c, g, or t
tacggtaggtangaggctggggtngaatcggacgaggccgaggaaaaccgtgtactattagccatggtcaaccccaccgtgttcttcgacattgccgtcgacggcgagcccttgggccgcgtctcctttgagctgtttgcagacaaggtcccaaagacagcagaaaattttcgtgctctgagcactggagagaaaggatttggttataagggttcctgctttcacagaattattccagggtttatgtgtcagggtggtgacttcacacgccataatggcactggtggcaagtccatctatggggagaaatttgaagatgagaacttcatcctaaagcatacgggtcctggcatcttgtccatggcaaatgctggacccaacacaaatggttcccagtttttcatctgcactgccaagactgagtggttggatggcaagcatgtggtgtttggcaaagtgaaagaaggcatgaatattgtggaggccatggagcgctttgggtccaggaatggcaagaccagcaagaagatcaccattgctgactgtggacaactcgaataagtttgacttgtgttttatcttaaccaccagatcattccttctgtagctcaggagagcacccctccaccccatttgctcgcagtatcctagaatctttgtgctctcgctgcagttccctttgggttccatgttttccttgttccctcccatgcctagctggatggagagttaattttttgattatggaataaaaacttntttcccaaaaaaaaaaacttccgccg

SEQ ID NO: 534685 - DNA, 374 bp, Homo sapiens
tcgagctcggacctgtgcagatggtgtctcattatggtttgactgggtctctgatgattagtgatgttgatcatttttcatatgttaggtgcttgtgtttcttctttgagaagtgtctgttcatgtctttgctcattttttaatggggttatttttctcttgtacaactgttaaattcctatggattctagatattagacctttgtcagatacatagttggcgaatatttttccccttctgtatgtagtctgtatactctgttgatagtttattttgctgttcagaagctctttagtttaactaggtcccacttgtcaatgtttgctttttgaggacttagtcataaattctttcctgagaccccgtctccaca

SEQ ID NO: 534686 - DNA, 174 bp, Homo sapiens
cctggtgtatatcaatgcttgatctattgataaatttgcctgatctcgatactgaattggaacattattaattttgcattttccgttttcggaattctgtaataaaatttactaatgttatacggcgaacattaacattcccatatccttgataacttttctctgggtcatatg

SEQ ID NO: 534687 - DNA, 1500 bp, Homo sapiens
  misc_feature (12)..(12): n is a, c, g, or t
  misc_feature (24)..(24): n is a, c, g, or t
tacggtaggtangaggctggggtngaatcggacgaggccgaggaaaaccgtgtactattagccatggtcaaccccaccgtgttcttcgacattgccgtcgacggcgagcccttgggccgcgtctcctttgagctgtttgcagacaaggtcccaaagacagcagaaaattttcgtgctctgagcactggagagaaaggatttggttataagggttcctgctttcacagaattattccagggtttatgtgtcagggtggtgacttcacacgccataatggcactggtggcaagtccatctatggggagaaatttgaagatgagaacttcatcctaaagcatacgggtcctggcatcttgtccatggcaaatgctggacccaacacaaatggttcccagtttttcatctgcactgccaagactgagtggttggatggcaagcatgtggtgtttggcaaagtgaaagaaggcatgaatattgtggaggccatggagcgctttgggtccaggaatggcaagaccagcaagaagatcaccattgctgactgtggacaactcgaataagtttgacttgtgttttatcttaaccaccagatcattccttctgtagctcaggagagcacccctccaccccatttgctcgcagtatcctagaatctttgtgctctcgctgcagttccctttgggttccatgttttccttgttccctcccatgcctagctggattggagagttaaagtttaatgaatatgaggaattaaaactctaatatagcaaaaaaaaaaaacaaaaaaaaaaaaaaaaatggtgtgcgggacgagcccgcggcccctgcgaagaagagttctacgaagaacaattcgcgtggggcgccgcggggccccaaggagggtacacgtggaacagcgggtcacaaacgcggtgatccccagagggagaaccgggggccagtgacacaataggcgcgcggggagatatctctctcaacaccaatatacacacaaaccgcgccgcgggcgggagacaaccgcgagaagcggtgttccaagagacacacaaaactccccaagagtggcggcgctccctagggggggccaccaattacccgcggggggaccctctaactacacacccgagggggaggttcccccacacgcgcagaaggccactcgccgagagatactcacgaaaaattttacagcgccccccgagctgaggggggcgggcaccccacccgcgacgcacacggcgacagaagacgcaaactagaaagaccacacgcacgagccacacaaacaaccgcaaaaccgagagcaagtagcaagcgaggaccacagacgacgcaagcgaggcacgagcggcagggcgagcacggcagaggggagagcgccgcaagcgggacggaggcgcggcaggcgaacgcggaccaaaaagacagcagagagccgacggagagacaggagacgaagagaccagacgcgaggaagcgcgcggccggaccgc

SEQ ID NO: 534688 - DNA, 214 bp, Homo sapiens
  misc_feature (9)..(11): n is a, c, g, or t
  misc_feature (171)..(171): n is a, c, g, or t
  misc_feature (175)..(175): n is a, c, g, or t
tacgttgannncgctgatgacaccccggatcagtctggcatagaggatcgtggggatgacgtgcatcacgaatgctgccgcgatgaccaggaacatcgataccatgatgaaccagtcgttgatgttctgacccttcatcgggccacctctccatgtctcgcctcagggtancganctcgattcgtttatattccattgggtccattaggcttgt

SEQ ID NO: 534689 - DNA, 778 bp, Homo sapiens
  misc_feature (12)..(12): n is a, c, g, or t
  misc_feature (24)..(24): n is a, c, g, or t
  misc_feature (733)..(733): n is a, c, g, or t
tacggtaggtangaggctggggtngaatcggacgaggccgaggaaaaccgtgtactattagccatggtcaaccccaccgtgttcttcgacattgccgtcgacggcgagcccttgggccgcgtctcctttgagctgtttgcagacaaggtcccaaagacagcagaaaattttcgtgctctgagcactggagagaaaggatttggttataagggttcctgctttcacagaattattccagggtttatgtgtcagggtggtgacttcacacgccataatggcactggtggcaagtccatctatggggagaaatttgaagatgagaacttcatcctaaagcatacgggtcctggcatcttgtccatggcaaatgctggacccaacacaaatggttcccagtttttcatctgcactgccaagactgagtggttggatggcaagcatgtggtgtttggcaaagtgaaagaaggcatgaatattgtggaggccatggagcgctttgggtccaggaatggcaagaccagcaagaagatcaccattgctgactgtggacaactcgaataagtttgacttgtgttttatcttaaccaccagatcattccttctgtagctcaggagagcacccctccaccccatttgctcgcagtatcctagaatctttgtgctctcgctgcagttccctttgggttccatgttttccttgttccctcccatgcctagctggataagagccacncgaagtgccacacaacgagccacgcgacgagccacccacgtgccg

SEQ ID NO: 534690 - DNA, 746 bp, Homo sapiens
  misc_feature (12)..(12): n is a, c, g, or t
  misc_feature (24)..(24): n is a, c, g, or t
tacggtaggtangaggctggggtngaatcggacgaggccgaggaaaaccgtgtactattagccatggtcaaccccaccgtgttcttcgacattgccgtcgacggcgagcccttgggccgcgtctcctttgagctgtttgcagacaaggtcccaaagacagcagaaaattttcgtgctctgagcactggagagaaaggatttggttataagggttcctgctttcacagaattattccagggtttatgtgtcagggtggtgacttcacacgccataatggcactggtggcaagtccatctatggggagaaatttgaagatgagaacttcatcctaaagcatacgggtcctggcatcttgtccatggcaaatgctggacccaacacaaatggttcccagtttttcatctgcactgccaagactgagtggttggatggcaagcatgtggtgtttggcaaagtgaaagaaggcatgaatattgtggaggccatggagcgctttgggtccaggaatggcaagaccagcaagaagatcaccattgctgactgtggacaactcgaataagtttgacttgtgttttatcttaaccaccagatcattccttctgtagctcaggagagcacccctccaccccatttgctcgcagtatcctagaatctttgtgctctcgctgcagttccctttgggttccatgttttccttctgtagctcaggagagcacccctccaccccattgctcgcttaactga

SEQ ID NO: 534691 - DNA, 370 bp, Homo sapiens
atagctcgctctagaggatccacccgcggcgagttcatgcacgcttccactcacggggagtgcggcaagttccaaagactagtcttaccaagtcaagccaagtcaaaaccagaacaaagatgtcaatacaggcacaccgtgggtgatcaggccatgcttccactcacatggagtggggcaagttccaaagactagtcttgacaagcttcagatgtctggacttcaagtgccatttccttcccggtgttcagccagtgttaatccttctcgggagcctgctatgcgctgctctggcaaggcgttccaccggggccatttcctacccgggagcgctctttggattgcgtcactcaggcttggccgagtcctc

SEQ ID NO: 534692 - DNA, 212 bp, Homo sapiens
cctgtgaagatcaaaatgaagctgttagaaaaatatacctcaggagctcaacatggaacagagaaatccaaagaaataaaagaggttgtggggtgtttttgaaaaccttgcaccttatgtaatagcagataaaatttctaattgtaaaatgttaaattgtaaaatctaatttgcaaaatgttctcaataaaggcctggcctcgttggcctca

SEQ ID NO: 534693 - DNA, 145 bp, Homo sapiens
gtctggagtctatgctttctccattatctcaaagccatacaagagaacaggtagatcacagaggccatatagtatagtggctagactttttaccttcagatcccagttttcttaccttctgattggttaactaatgtttagtgcc

SEQ ID NO: 534694 - DNA, 914 bp, Homo sapiens
  misc_feature (9)..(10): n is a, c, g, or t
  misc_feature (802)..(802): n is a, c, g, or t
ggttttttnntttggcagacgccaccgcggaaaaccgtgtactattagccatggtcaaccccaccgtgttcttcgacattgccgtcgacggcgagcccttgggccgcgtctcctttgagctgtttgcagacaaggtcccaaagacagcagtttcacagaattattccagggtttatgtgtcagggtggtgacttcacacgccataatggcactggtggcaagtccatctatggggagaaatttgaagatgagaacttcatcctaaagcatacgggtcctggcatcttgtccatggcaaatgctggacccaacacaaatggttcccagtttttcatctgcactgccaagactgagtggttggatggcaagcatgtggtgtttggcaaagtgaaagaaggcatgaatattgtggaggccatggagcgctttgggtccaggaatggcaagaccagcaagaagatcaccattgctgactgtggacaactcgaataagtttgacttgtgttttatcttaaccaccagatcattccttctgtagctcaggagagcacccctccaccccatttgctcgcagtatcctagaatctttgtgctctcgctgcagttccctttgggttccatgttttccttgttccctcccatgcctagctggattgcagagttaagtttatgattatgaaataaaaaactaaataacaaaaaaaaaacaaaaaaaaaaaaacctccggggcctttttgtcgggggggggaaaaagggttttgaaagggccatggtctatgttgttccggcccctttttgtcncaaggggaatcgcgggccccaaaggggcgataatcgaacccgtacttcttcttcttcacacgtccaacgacacagcagccccaaagagaggaaaaacaacgaaacacaccac

SEQ ID NO: 534695 - DNA, 497 bp, Homo sapiens
tgactctacaggagtcttttgctttgggacggcgacagtgcacattggacacgctggctccagctcggactcgcctctgtctactctttgcccgtgtctgccggaagccggctcgggttgccggagccctcgggctttggagatgaaggcaggcccctgctcctgccgggaaggaggggggcagtgggctcatgggtcggtgcctttgcagacgacagcacgccttgcgggccctggggatcttcctgtgccccggggagaccctttccgcctcactgcattggaaccccattcccgatcacccgctgggatccatcatcggaccccaagaggagtccgcgcagcccagccggcaccccgaagctcctccttcagtgggaaccgaagcagaagagcgatcaaggaggtcctcaccacaggactcctatgggtccgaccctgggtctcccgcaggcccctctggcagtcctctcccaacccgccgtcccaaagcacag

SEQ ID NO: 534696 - DNA, 605 bp, Homo sapiens
cttttcccctcaaacaataaatggtgatcaacaaaccaaatcacatagttacatagtgacccaaaaactgcttaaagaggagtacggtttaataacgcttgaagaaaaataatgcaaactaactttagtcattataaatcttacagtcattcttcattctaagtttaatataaataaattgatatatttggtaaatatgtatgaagtaaaggctcagaacttggggaattttcaggctggaattcattgtaccatataaaggttcctggccgggcgcggcggctcatgcctgtaatcccagcactttggaagcacgaggcaggaggattacctgaggcaggagttcgagactagcccggccaacatggtgaaacttccgtctctactaaaaacacaaaattagccaggcatggtggcgggcgcctgtaatcccagttattcaggaggctgaagcaggtaaaaaaaaaaggaaatctttaaacagtgtaaaccaaaactatctgagacagatctcaatcaatttagaagtttatttggccaaagttaaggacctgcctgtaggaaaaaaacagaatcacagagacagtctgtggtctgtgcctttc

SEQ ID NO: 534697 - DNA, 1024 bp, Homo sapiens
  misc_feature (912)..(912): n is a, c, g, or t
gcttgctattacgattagtccggcgcgcgggaccacctgtgtacatattaacatggtgtcactaacctgctatcggtatgcatactccctgttgccactgactacgtgctatggcacttcgtcgaccaagttatcacatatcggcacgtgggtgaccgagaggttctgaaagaaatgccagatgattgttcgtgacgcttcgattactggatcatatcaggattggaggtccatagacggagtctcctagtcatcacaactatgaacatccactcgccacgtttatgtgtcagggtggtgacttcacacgccataatggcactggtggcaagtccatctatggggagaaatttgaagatgagaacttcatcctaaagcatacgggtcctggcatcttgtccatggcaaatgctggacccaacacaaatggttcccagtttttcatctgcactgccaagactgagtggttggatggcaagcatgtggtgtttggcaaagtgaaagaaggcatgaatattgtggaggccatggagcgctttgggtccaggaatggcaagaccagcaagaagatcaccattgctgactgtggacaactcgaataagtttgacttgtgttttatcttaaccaccagatcattccttctgtagctcaggagagcacccctccaccccatttgctcgcagtatcctagaatctttgtgctctcgctgcagttccctttgggttccatgttttccttgttccctcccatgcctagctggattgcagagttaagtttatgattatgaaataaaaaactaaataacaaaaaaaaaacaaaaaaaaaaaaacctccggggcctttttgtcgggggggggaaaaagggttttgaaagggccatggtctatgttgttccggcccctttttgtcncaaggggaatcgcgggccccaaaggggcgataatcgaacccgtacttcttcttcttcacacgtccaacgacacagcagccccaaagagaggaaaaacaacgaaacacaccac

SEQ ID NO: 534698 - DNA, 1185 bp, Homo sapiens
  misc_feature (277)..(277): n is a, c, g, or t
ttcataccaatctagagtaatgagacgagaaggagcaacgaaacagtacctgaagcctaggacatcagcctgtacaactagcgccgatctagatggataatgatactcgcctgagcgagaagtcaatcacctaataacaaatagataacggatgcgacctcagaagtagataatgaacaacaatcaagcctggtcgattcatgaaggatactatgcctggaatataattctaaacggacgattccagaagaggaataactcataataattaacaaangaaaatggacaaaacaaaaaacataacaataaagagcaaccaaagaaaatacacaaataaaatccacaccaaataaataaatcaataaaaaacatagatcaaaggacctactcgacgcaaaacaaaatcagcgcactccagcaacccataaacacatgacatgaagatccccagccagtcagacaaaaaggacaaaacactaatagctacatccagggacacgcatctatatatcaaaatagaaaaaccaaactaagcgaacaactactaaaaatcccctaataaaaaacatactaattacaaataaacatcccaaagataaagacctaatatcaatacaaaaattaataaaatcatataataccatacattaaaaaacgaaacgtaagcaagctggaatatacaaaccaaaacaagaagagaaattcacaacaaaccccatctaagaaaatccaaaactataaattaaaccaaaaatatgagacccgaagactagaatgagaaaaagctatactaaagccgatctaaaaaaaaacctctccccaataagcaaccatttaactaaacaatctctctcaaaataatcaaaagatcctaattaccctaaaaataaccctaaaatgacaaccttatagactatgacataataccatgaaccattctaaacaaattaccaaagacagaacgaacaccccccataaaattcaagttaaatacctacgagagcccgatagaccagaacaggaatccccacaatagcagttataacaaccaaaatttaaactccccaaatgaagtcagaagctacctatctaaaaaattaggcaaacgcaatgaccaacagagaattgtaccacgcgacactcatataggccaacacaaaactggtgcaggaaaaataatcagag

SEQ ID NO: 534699 - DNA, 146 bp, Homo sapiens
caagggtccgcaagagagggcatcaaggctgtagtctagcagtgacttaatctgcaagtcacaccagacgggtatttagtattcattcatatgtcacatccagaccaacgagacagtacactcaagcaaggctcctggatgctcca

SEQ ID NO: 534700 - DNA, 705 bp, Homo sapiens
  misc_feature (12)..(12): n is a, c, g, or t
  misc_feature (24)..(24): n is a, c, g, or t
  misc_feature (644)..(644): n is a, c, g, or t
  misc_feature (652)..(652): n is a, c, g, or t
tacggtaggtangaggctggggtngaatcggacgaggccgaggaaaaccgtgtactattagccatggtcaaccccaccgtgttcttcgacattgccgtcgacggcgagcccttgggccgcgtctcctttgagctgtttgcagacaaggtcccaaagacagcagaaaattttcgtgctctgagcactggagagaaaggatttggttataagggttcctgctttcacagaattattccagggtttatgtgtcagggtggtgacttcacacgccataatggcactggtggcaagtccatctatggggagaaatttgaagatgagaacttcatcctaaagcatacgggtcctggcatcttgtccatggcaaatgctggacccaacacaaatggttcccagtttttcatctgcactgccaagactgagtggttggatggcaagcatgtggtgtttggcaaagtgaaagaaggcatgaatattgtggaggccatggagcgctttgggtccaggaatggcaagaccagcaagaagatcaccattgctgactgtggacaactcgaataagtttgacttgtgttttatcttaaccaccagatcattccttctgtagctcaggagagcacccctccaccccatttgctcgcaangagccacncaagacccaccatgagccacgcgatgagccccgcaacgagggtaccgagctcg

SEQ ID NO: 534701 - DNA, 618 bp, Homo sapiens
ccgttgacgatgcctgaccgagtgcgcgggcaaacgcggcaacatcgtggtcagggtgttttccgcaatggccacgcagatcagctcgacagcagcctgaggtgcgcgggcgccatggccaatgcctggggatgaacggctgagctcgatttccgctggcaaggtgatgggttcgatgcccgtcaactcgatggtctgttgcatgtagtccatcgccactagcgcgtgatagtcctcatcgacgaccacggtcatcgcgtcgtaacggcacgcaaacggaaagcggatagcgaagttatctttcgcaatgctcctggcggtcttgtcgacaatttcggtttcgaaaatcaccacatcattaatgaacttatacaagctctgaacgagaacaaaatgctgtaagtgactacactcctgcataaaggttgcgctcatgaccaatggttgacgactggccggagatagtaaacttttcgtcatcttccaagcgtcgtctcgggcgcgtccgaatggtcgccctttcctcccacgactcggaaaacgatagatatgcttcagctctcatgactacttcctttattcatgatactcagtagtagtgcacttcaaacacaggca

SEQ ID NO: 534702 - DNA, 271 bp, Homo sapiens
gatcttatcagcagcccgacagcaggacgcagcaggtacagcagcaggctgcagatttccagcccggagggccgggctcggacccggtggcagggggatttgggggaccgactctcgtggacacgttggcagtggagaacgcagttgggagggaggtgaaggctgcccagggtctgggtgtcgtcgcctagcagttgccctttggaagatgagtcgcaccttgctgttccccggccgggaaactgtgccctattcaaggagccaatggtgt

SEQ ID NO: 534703 - DNA, 110 bp, Homo sapiens
ctggtcccttgcttgagctagtattgtgcctattgccatactagtctttgcgcctgcgaagcacggtgggctagccctactagtctcaatctccaacacatatgcctagt

SEQ ID NO: 534704 - DNA, 816 bp, Homo sapiens
tggtgcctagtgtacaagattgttaaagaataaagttattttagcacaaagtgtaacccatttttagtcactgatcatacgcactgacagcttagctgctgatctcagttatgggtctaacaataaagcacaatattccaaaggtcagagatatctaggccacgaaatctggagtgggtagagctggaattctcaagagttttgtatacagagattcagtactcgtaggaatcacagcaggggacccaggcctcaagttagggtggaggtgctggggggtacgggagagcaggtacttgcatataagattgattggaatcatctgctacttttaaagaccatgctggttctatgtcagaggtatagcgttgtcaaggtgattcgatgggtcagatggggaaatgtacgccccttattttgccagtgtgaagcagataccctgcttttctttacagtagcggagtcagcttaagagctttaaaggtcctaaacttcaaaaacattacagtgccccatcctccgccttaatgtattcaaaatacaaacaatactaaactgtaacaaataacatgtaaccaaagaggtcccaatttaaaggttttgtatttcgtcttttctccatggtcaaaataacatagcaaactgcagcgtcagaaccacagctttggtcgcggcgcttcgggcccctcaagaaagccttcctggggccattctttttgtcgcccggccccattaggacggttccctgggcatcacgtgttcctagagacccggcacgacagggttggtttccccaggtaaacggggaacgggtcg

SEQ ID NO: 534705 - DNA, 3470 bp, Homo sapiens
gggtattcgaatcggcggcggcttctagtttgcggttcaggtttggccgctgccggccagcgtcctctggccatggacaccccggaaaatgtccttcagatgcttgaagcccacatgcagagctacaagggcaatgaccctcttggtgaatgggaaagatacatacagtgggtagaagagaattttcctgagaataaagaatacttgataactttactagaacatttaatgaaggaatttttagataagaagaaataccacaatgacccaagattcatcagttattgtttaaaatttgctgagtacaacagtgacctccatcaattttttgagtttctgtacaaccatgggattggaaccctgtcatcccctctgtacattgcctgggcggggcatctggaagcccaaggagagctgcagcatgccagtgctgtccttcagagaggaattcaaaaccaggctgaacccagagagttcctgcaacaacaatacaggttatttcagacacgcctcactgaaacccatttgccagctcaagctagaacctcagaacctctgcataatgttcaggttttaaatcaaatgataacatcaaaatcaaatccaggaaataacatggcctgcatttctaagaatcagggttcagagctttctggagtgatatcttcagcttgtgataaagagtcaaatatggaacgaagagtgatcacgatttctaaatcagaatattctgtgcactcatctttggcatccaaagttgatgttgagcaggttgttatgtattgcaaggagaagcttattcgtggggaatcagaattttcctttgaagaattgagagcccagaaatacaatcaacggagaaagcatgagcaatgggtaaatgaagacagacattatatgaaaaggaaagaagcaaatgcttttgaagaacagctattaaaacagaaaatggatgaacttcataagaagttgcatcaggtggtggagacatcccatgaggatctgcccgcttcccaggaaaggtccgaggttaatccagcacgtatggggccaagtgtaggctcccagcaggaactgagagcgccatgtcttccagtaacctatcagcagacaccagtgaacatggaaaagaacccaagagaggcacctcctgttgttcctcctttggcaaatgctatttctgcagctttggtgtccccagccaccagccagagcattgctcctcctgttcctttgaaagcccagacagtaacagactccatgtttgcagtggccagcaaagatgctggatgtgtgaataagagtactcatgaattcaagccacagagtggagcagagatcaaagaagggtgtgaaacacataaggttgccaacacaagttcttttcacacaactccaaacacatcactgggaatggttcaggcaacgccatccaaagtgcagccatcacccaccgtgcacacaaaagaagcattaggtttcatcatgaatatgtttcaggctcctacacttcctgatatttctgatgacaaagatgaatggcaatctctagatcaaaatgaagatgcatttgaagcccagtttcaaaaaaatgtaaggtcatctggggcttggggagtcaataagatcatctcttctttgtcatctgcttttcatgtgtttgaagatggaaacaaagaaaattatggattaccacagcctaaaaataaacccacaggagccaggacctttggagaacgctctgtcagcagacttccttcaaaaccaaaggaggaagtgcctcatgctgaagagtttttggatgactcaactgtatggggtattcgctgcaacaaaaccctggcacccagtcctaagagcccaggagacttcacatctgctgcacaacttgcgtctacaccattccacaagcttccagtggagtcagtgcacattttagaagataaagaaaatgtggtagcaaaacagtgtacccaggcgactttggattcttgtgaggaaaacatggtggtgccttcaagggatggaaaattcagtccaattcaagagaaaagcccaaaacaggccttgtcgtctcacatgtattcagcatccttacttcgtctgagccagcctgctgcaggtggggtacttacctgtgaggcagagttgggcgttgaggcttgcagactcacagacactgacgctgccattgcagaagatccaccagatgctattgctgggctccaagcagaatggatgcagatgagttcacttgggactgttgatgctccaaacttcattgttgggaacccatgggatgataagctgattttcaaacttttatctgggctttctaaaccagtgagttcctatccaaatacttttgaatggcaatgtaaacttccagccatcaagcccaagactgaatttcaattgggttctaagctggtctatgtccatcaccttcttggagaaggagcctttgcccaggtgtacgaagctacccagggagatctgaatgatgctaaaaataaacagaaatttgttttaaaggtccaaaagcctgccaacccctgggaattctacattgggacccagttgatggaaagactaaagccatctatgcagcacatgtttatgaagttctattctgcccacttattccagaatggcagtgtattagtaggagagctctacagctatggaacattattaaatgccattaacctctataaaaatacccctgaaaaagtgatgcctcaaggtcttgtcatctcttttgctatgagaatgctttacatgattgagcaagtgcatgactgtgaaatcattcatggagacattaaaccagacaatttcatacttggaaacggatttttggaacaggatgatgaagatgatttatctgctggcttggcactgattgacctgggtcagagtatagatatgaaactttttccaaaaggaactatattcacagcaaagtgtgaaacatctggttttcagtgtgttgagatgctcagcaacaaaccatggaactaccagatcgattactttggggttgctgcaacagtatattgcatgctctttggcacttacatgaaagtgaaaaatgaaggaggagagtgtaagcctgaaggtctttttagaaggcttcctcatttggatatgtggaatgaattttttcatgttatgttgaatattccagattgtcatcatcttccatctttggatttgttaaggcaaaagctgaagaaagtatttcaacaacactatactaacaagattagggccctacgtaataggctaattgtactgctcttagaatgtaagcgttcacgaaaataaaatttggatatagacagtccttaaaaatcacactgtaaatatgaatctgctcactttaaacctgtttttttttcatttattgtttatgtaaatgtttgttaaaaataaatcccatggaatatttccatgtaaaaaaaaaa

SEQ ID NO: 534706 - DNA, 3359 bp, Homo sapiens
gggtattcgaatcggcggcggcttctagtttgcggttcaggtttggccgctgccggccagcgtcctctggccatggacaccccggaaaatgtccttcagatgcttgaagcccacatgcagagctacaagggcaatgaccctcttggtgaatgggaaagatacatacagtgggtagaagagaattttcctgagaataaagaatacttgataactttactagaacatttaatgaaggaatttttagataagaagaaataccacaatgacccaagattcatcagttattgtttaaaatttgctgagtacaacagtgacctccatcaattttttgagtttctgtacaaccatgggattggaaccctgtcatcccctctgtacattgcctgggcggggcatctggaagcccaaggagagctgcagcatgccagtgctgtccttcagagaggaattcaaaaccaggctgaacccagagagttcctgcaacaacaatacaggttatttcagacacgcctcactgaaacccatttgccagctcaagctagaacctcagaacctctgcataatgttcaggttttaaatcaaatgataacatcaaaatcaaatccaggaaataacatggcctgcatttctaagaatcagggttcagagctttctggagtgatatcttcagcttgtgataaagagtcaaatatggaacgaagagtgatcacgatttctaaatcagaatattctgtgcactcatctttggcatccaaagttgatgttgagcaggttgttatgtattgcaaggagaagcttattcgtggggaatcagaattttcctttgaagaattgagagcccagaaatacaatcaacggagaaagcatgagcaatgggtaaatgaagacagacattatatgaaaaggaaagaagcaaatgcttttgaagaacagctattaaaacagaaaatggatgaacttcataagaagttgcatcaggtggtggagacatcccatgaggatctgcccgcttcccaggaaaggtccgaggttaatccagcacgtatggggccaagtgtaggctcccagcaggaactgagagcgccatgtcttccagtaacctatcagcagacaccagtgaacatggaaaagaacccaagagaggcacctcctgttgttcctcctttggcaaatgctatttctgcagctttggtgtccccagccaccagccagagcattgctcctcctgttcctttgaaagcccagacagtaacagactccatgtttgcagtggccagcaaagatgctggatgtgtgaataagagtactcatgaattcaagccacagagtggagcagagatcaaagaagggtgtgaaacacataaggttgccaacacaagttcttttcacacaactccaaacacatcactgggaatggttcaggcaacgccatccaaagtgcagccatcacccaccgtgcacacaaaagaagcattaggtttcatcatgaatatgtttcaggctcctacacttcctgatatttctgatgacaaagatgaatggcaatctctagatcaaaatgaagatgcatttgaagcccagtttcaaaaaaatgtaaggtcatctggggcttggggagtcaataagatcatctcttctttgtcatctgcttttcatgtgtttgaagatggaaacaaagaaaattatggattaccacagcctaaaaataaacccacaggagccaggacctttggagaacgctctgtcagcagacttccttcaaaaccaaaggaggaagtgcctcatgctgaagagtttttggatgactcaactgtatggggtattcgctgcaacaaaaccctggcacccagtcctaagagcccaggagacttcacatctgctgcacaacttgcgtctacaccattccacaagcttccagtggagtcagtgcacattttagaagataaagaaaatgtggtagcaaaacagtgtacccaggcgactttggattcttgtgaggaaaacatggtggtgccttcaagggatggaaaattcagtccaattcaagagaaaagcccaaaacaggccttgtcgtctcacatgtattcagcatccttacttcgtctgagccagcctgctgcaggtggggtacttacctgtgaggcagagttgggcgttgaggcttgcagactcacagacactgacgctgccattgcagaagatccaccagatgctattgctgggctccaagcagaatggatgcagatgagttcacttgggactgttgatgctccaaacttcattgttgggaacccatgggatgataagctgattttcaaacttttatctgggctttctaaaccagtgagttcctatccaaatacttttgaatggcaatgtaaacttccagccatcaagcccaagactgaatttcaattgggttctaagctggtctatgtccatcaccttcttggagaaggagcctttgcccaggtgtacgaagctacccagggagatctgaatgatgctaaaaataaacagaaatttgttttaaaggtccaaaagcctgccaacccctgggaattctacattgggacccagttgatggaaagactaaagccatctatgcagcacatgtttatgaagttctattctgcccacttattccagaatggcagtgtattagtaggagagctctacagctatggaacattattaaatgccattaacctctataaaaatacccctgaaaaagtgatgcctcaaggtcttgtcatctcttttgctatgagaatgctttacatgattgagcaagtgcatgactgtgaaatcattcatggagacattaaaccagacaatttcatacttggaaacggatttttggaacaggatgatgaagatgatttatctgctggcttggcactgattgacctgggtcagagtatagatatgaaactttttccaaaaggaactatattcacagcaaagtgtgaaacatctggttttcagtgtgttgagatgctcagcaacaaaccatggaactaccagatcgattactttggggttgctgcaacagtatattgcatgctctttggcacttacatgaaagtgaaaaatgaaggaggagagtgtaagcctgaaggtctttttagaaggcttcctcatttggatatgtggaatgaattttttcatgttatgttgaatattccagattgtcatcatcttccatctttggatttgttaaggcaaaagctgaagaaagtatttcaacaacactatactaacaagattagggccctacgtaataggctaattgtactgctcttagaatgtaagcgttcacgaaaataaaatttggatatagacagtccttaaaaatc

SEQ ID NO: 534707 - DNA, 3126 bp, Homo sapiens
gagatggagtctcactgtctcccaggctggagggcagtggcatggtctcaactcactgcaagctccgcctcccgggttcacgccattctcctgcctcagcctcctgagtagctgggactacaggcgcctgccaccatgcctggctaattttttttgtatttttagtagagacagggtttcgccgtgttaccaggatggtcttgatcccctgacctcgtgatccgcccaccttggccccccaaagtgttgggattacaggcttgagccacagtgcccggccagcatctgcttttaaacagaattttacaatgttcctatcttcacctccaccttcacttccattctgaggtgtagctagcattgtagatttctgaacttgtctagcaattagggacacaccgctcctagcctccttcaacagctatgtgaagtgttagaattccttcactgtcatgttggtgagatttttggagtatatcaagccactgtctttaactagaagcctccctttttcaaacttctctgtatgaatagcatcaggatatattttccaagtagattgcctgttgtctgtaaatcatttattgatctgctcagcctttccccattgatttaaaatatctttaccatgtactaaattttcatatatacaagatccaattctaaaatatctatacctttgctttagtcagtagatctcttcttgatcatttcataggtgtatttactacaactttctttttttttgaggcaggagaattgcttgagcccgggaggcagaggttgcagtgagctgaaatcatgccacttcattccagcccgggcgacagagtgagactccgtctccacaaaaaaaaaaaaaaaaaaaaaaaaaaaaacccatccaatttttaatgaaaaccaaattgcactctcaggtaacagagaaagcgttctgatcatcataatgcccactaaatagccccaaagagcagaggctttgtcttagcattttaaaagctcaaacctgcaaaaaaaaaattgataatttcactgtatttgtaggatttttttttaattcaaaattgaccaaaatacttaatctggactccatctattttgaatggaatcaaatgtgtttaatgcaacttttaaagaaatacagccatttctttttcttagaactaagtatcacatttcagcaataagcattgcctatcctatctggttgtttaaaattattagttaggttttacatttcttttgggtacttcctggcatgttgagttgatcagaaaattgtataatacttattttaaaaacgttttagttgaaatttctgagacagtgtgaatgagttgatttacttctcatgattcctactggaaggatcaggggaatttattatgtgataattttacttacggttttacccttaatttctccgtattttatcctcttttccctcaagctagaacctcagaacctctgcataatgttcaggttttaaatcaaatgataacatcaaaatcaaatccaggaaataacatggcctgcatttctaagaatcaggtaataatgacatttgtagcttgtgtggaaactgggaatggtattgaatggccagcctggctgccttctacatccactttgacatctcatttctttgatctttctcttcatggctctgagctccatgtcagccacctgctcctgtggcaacttcctgggcctgttattctcccacacagctcacctcaaatacaatttgttgtctaacccagaggccctcaccacacggcctcctgtctttactctccccaccagcttttcccttaccaatgtcctttcctctgttctgctggcctctgcataggctctggaaatccctactgggaatggatccacctgggggcttctgagcctggctttcaaaactcagagcctcaaagattgctgcctgttacctcaagtaacagggaggtctcatactcccaggcaatgggtcatactcccaggcaatgggacatgcttccagtgtctgattcactctttatgttttgtgtatctcttatgtttccaggttcactctagcgccaaactatagtgattttagacttcttttcagtctcttcaaacttgggacctcgctacctctagcctctctctcaggaacttcaaaaatactatttcaacagatagcagatgccatcaagtgacatctatcagttttctgccaccaaccaataaatgtaactgcatccttccctgtgagaaaaggtggccttctatctgtgcttgtccttatcctcatcaaggtttttgccctgtggagatctcttctgcctccatggtgtatcaacatgggaaaatgctcaagtctctcttcttccctcagcctcccaaagtgttgtgattacaggtgtgagccaccacgtctggtctgaatgttctcctttattgctaactgctatagtttgtatttttccagacttattgtgtatgaaaacacataaatatgaatacaatagaacgttctacataaataagacttattttctgctttttctacctaacacctctgatagatctttcactgctattgcatagatatctaactaattctacttgcagcatagtcttctgtcataccttataaaagggagtgtatcatgtagaaactgttagaaatcatgctacctttcaagtgtatgtacctaaaatgctgtcagtctgccctctataaacttcggacagtgcactcacattaacagtgtgtaaaaggacttgtttcttgtacacatttggctaacattaactatactaaatcttttcaagcacctgatgtagtttctttaattataggtagatttggacattttttggatacatttcgtggctgtttaacttctttcctttaaattgactgaatggctttgtccatttttctattgagtcatttcattttttttctgatttgtttggatttctttttgtataatttatattttccctggatagttgcaagaaattgttaataaattgttctccctggctcctttcctgtggtatatccctggttcccatgtcgttatctctccttactgtcctcatttcgaaggcacactttctccagtagcttattta

SEQ ID NO: 534708 - DNA, 760 bp, Homo sapiens
ctcttgagctctctcctgggcagtccaacctgtctacttggtcctggtgcatatgcagttaggcttgacagaagcatttgtccagattatccaattctagcagtattgtatgtatggctagccagaagcagatagtttgggtttttatttaaagggagagagagaaaattttttgacttgcagtattgctaaaagattacttatcttattttttggaacaagatgtataagacagttaattgggtctttaatctctctcatgtataatagatatagtgtttccatacttgctgcattgtattgtgtttaggtgagagttgttatactaaactgtccaagcctgtggaagtcagatgcaggggtggggttatcctgcatattgaaggctacattttagccattatttatgctttgtctttttcaggcttcctcatttggatatgtggaatgaattttttcatgttatgttgaatattccagattgtcatcatcttccatctttggatttgttaaggcaaaagctgaagaaagtatttcaacaacactatactaacaagattagggccctacgtaataggctaattgtactgctcttagaatgtaagcgttcacgaaaataaaatttggatatagacagtccttaaaaatcacactgtaaatatgaatctgctcactttaaacctgtttttttttcatttattgtttatgtaaatgtttgttaaaaataaatcccatggaatatttccatgtaaaaaaaaaa

SEQ ID NO: 534709 - DNA, 649 bp, Homo sapiens
ctcttgagctctctcctgggcagtccaacctgtctacttggtcctggtgcatatgcagttaggcttgacagaagcatttgtccagattatccaattctagcagtattgtatgtatggctagccagaagcagatagtttgggtttttatttaaagggagagagagaaaattttttgacttgcagtattgctaaaagattacttatcttattttttggaacaagatgtataagacagttaattgggtctttaatctctctcatgtataatagatatagtgtttccatacttgctgcattgtattgtgtttaggtgagagttgttatactaaactgtccaagcctgtggaagtcagatgcaggggtggggttatcctgcatattgaaggctacattttagccattatttatgctttgtctttttcaggcttcctcatttggatatgtggaatgaattttttcatgttatgttgaatattccagattgtcatcatcttccatctttggatttgttaaggcaaaagctgaagaaagtatttcaacaacactatactaacaagattagggccctacgtaataggctaattgtactgctcttagaatgtaagcgttcacgaaaataaaatttggatatagacagtccttaaaaatc

SEQ ID NO: 534710 - DNA, 552 bp, Homo sapiens
tcgtgagctcttctgatgggatgcggtcaggaagaggcgctcctcacttcctagatgggatggcggcgggcagagatgctcctcactttccagactgggcagccaggcagaggggctcctcacatcccagatgatgggcggccaggcagagacgctcctcacttcccagatggggtggcagccgggcagaggctgcactctcggcactttgggaggccaaggcaggctgctgggaggtggaggttgtagcgagctgagatcacgccactgcactccagcctgggcaccattgagcactgagtgaacgaggctccgtctgcaatcccggcacctcgggaggccgaggctggcggatcactcacggttaggagctggagaccagcctggccaacacagcgaaaccccgtctccaccaaaaaaatatgaaaaccagtcaggcgtggcggcgcgcgcctgcaatcacaggcactcggcaggctgaggcaggagaatcaggcagggaggttgcagtgagccgagatagcagcagtacagtccagcttcggctcggca

SEQ ID NO: 534711 - DNA, 235 bp, Homo sapiens
  misc_feature (97)..(97): n is a, c, g, or t
aaatttgggggggtttttttttttgccccaaaaaaagccccgggggcctgttaccccccccccggtccttaaaatttgggccccagggggggggggncctttattggtacccttttgggggccagggcccctgtcccccccccctaaaaggggcggggggtttgggggaaagggggggcccttttaagggggggggccccccggcccaaggggggttaaaaaaggttttttttta

SEQ ID NO: 534712 - DNA, 615 bp, Homo sapiens
gctaattgtacattctaagagcagtacaattagcctattacgtagggccctaatcttgttagtatagtgttgttgaaatgtaagcgttcacgaaaataaaatttggatatagacagtccttaaaaatcacactgtaaatatgaatctgctcactttaaacctgtttttttttcatttattgtttatgtaaatgtttgttaaaaataaatcccatggaatatttccatgtaaaaaaaaaaaaaaaaaaaaaaaaaaaaaaaaaaaaaaaaaaaaaggggggggggcggaaaaattttccggggggggcaattagggccacgtttttgtgaaaaaggggggccaagtggggggtgatttattattaaagtacactagggacggggggcgggtatttatataaaaaaatcgtgaagtaggagaggaaaacaagtgggtttacgggagagagattattgtgaggagaaagagagaacaaccattaatgctgtgggggggggggagacaaataattgggggaaaacacatcttccaaaagaaattataaagcgctgaggggaaaagtaatagaattgactgacggtgctatcatgtgggttaaaaaaagggatgtatgtg

SEQ ID NO: 534713 - DNA, 529 bp, Homo sapiens
ggagaaaaaaaatgtaggggtggacgtggtggctcatgcctgtaatcccagcacttggggaagcggaggtgggtggatcatgaggtcaggagttcaagaccagccgggccaacatagtgaaaccccatctctactaaaaatacaaaaattagccggcggtggtggcatgtgcagtccaacataataggttagggtaataactagaatagtaagttagggccaggcgcggtggctcacgcctgtaaccccagcacttggggaggctgaggtgggcagatcacctaaggtcaggagtttgagaccagcctggccaacatggtgaaaccctgtctctactaaaaaaaaaatacaaaaatggaccgggcacaggggctcatgcctgtaatcccagcacttggagaggctaagactgggtgggatcacctgaggtcgtgagttggagaccagccggcccaacatggataaaccgggtctctactaaaaatacaaaattagccaagggtgggggcgcatgcgtgtaatcccagct

SEQ ID NO: 534714 - DNA, 645 bp, Homo sapiens
gcgtcgccaggccgagccacatcgctgagacaccatggggaaggtgaaggtcggagtcaactggatttgcgtcggtattgtggcgtcctgtgtcaccagggctgcttattaactctggtaaagtggatattagttgccatcaatgacccctttcattgagcctcaactacatggttgacatgttccagatatgagttccacccgatggcaaatttccattggcaccagtcgaggctgagcaacgggaacgcttgtcatcgaatggaagatccgcatcacctatcttccacggagcagagactccactcgcgagaatcatagtggcggccgatgcctggtcgctgtgagtaccgtcgatggaggtccgactgggcgcgtcttcagccacgcatggaggaacggctgggcgctcattttgcaagggcgggaagccataaagggtcagtcactcgtctggcgcccctcgtgctgatgtcgccccatgtgcgctcatgggtagtagaaccatgagacagtattgacaactagcctcgagatcatcagcgatgcgctcctgcacacactcaactggttagcacgccctggccaaggtcatccatgactgagctttggtgatcggggacggactcagtgaccacatgtcca

SEQ ID NO: 534715 - DNA, 4271 bp, Homo sapiens
gagatggagtctcactgtctcccaggctggagggcagtggcatggtctcaactcactgcaagctccgcctcccgggttcacgccattctcctgcctcagcctcctgagtagctgggactacaggcgcctgccaccatgcctggctaattttttttgtatttttagtagagacagggtttcgccgtgttaccaggatggtcttgatcccctgacctcgtgatccgcccaccttggccccccaaagtgttgggattacaggcttgagccacagtgcccggccagcatctgcttttaaacagaattttacaatgttcctatcttcacctccaccttcacttccattctgaggtgtagctagcattgtagatttctgaacttgtctagcaattagggacacaccgctcctagcctccttcaacagctatgtgaagtgttagaattccttcactgtcatgttggtgagatttttggagtatatcaagccactgtctttaactagaagcctccctttttcaaacttctctgtatgaatagcatcaggatatattttccaagtagattgcctgttgtctgtaaatcatttattgatctgctcagcctttccccattgatttaaaatatctttaccatgtactaaattttcatatatacaagatccaattctaaaatatctatacctttgctttagtcagtagatctcttcttgatcatttcataggtgtatttactacaactttctttttttttgaggcaggagaattgcttgagcccgggaggcagaggttgcagtgagctgaaatcatgccacttcattccagcccgggcgacagagtgagactccgtctccacaaaaaaaaaaaaaaaaaaaaaaaaaaaaacccatccaatttttaatgaaaaccaaattgcactctcaggtaacagagaaagcgttctgatcatcataatgcccactaaatagccccaaagagcagaggctttgtcttagcattttaaaagctcaaacctgcaaaaaaaaaattgataatttcactgtatttgtaggatttttttttaattcaaaattgaccaaaatacttaatctggactccatctattttgaatggaatcaaatgtgtttaatgcaacttttaaagaaatacagccatttctttttcttagaactaagtatcacatttcagcaataagcattgcctatcctatctggttgtttaaaattattagttaggttttacatttcttttgggtacttcctggcatgttgagttgatcagaaaattgtataatacttattttaaaaacgttttagttgaaatttctgagacagtgtgaatgagttgatttacttctcatgattcctactggaaggatcaggggaatttattatgtgataattttacttacggttttacccttaatttctccgtattttatcctcttttccctcaagctagaacctcagaacctctgcataatgttcaggttttaaatcaaatgataacatcaaaatcaaatccaggaaataacatggcctgcatttctaagaatcagggttcagagctttctggagtgatatcttcagcttgtgataaagagtcaaatatggaacgaagagtgatcacgatttctaaatcagaatattctgtgcactcatctttggcatccaaagttgatgttgagcaggttgttatgtattgcaaggagaagcttattcgtggggaatcagaattttcctttgaagaattgagagcccagaaatacaatcaacggagaaagcatgagcaatgggtaaatgaagacagacattatatgaaaaggaaagaagcaaatgcttttgaagaacagctattaaaacagaaaatggatgaacttcataagaagttgcatcaggtggtggagacatcccatgaggatctgcccgcttcccaggaaaggtccgaggttaatccagcacgtatggggccaagtgtaggctcccagcaggaactgagagcgccatgtcttccagtaacctatcagcagacaccagtgaacatggaaaagaacccaagagaggcacctcctgttgttcctcctttggcaaatgctatttctgcagctttggtgtccccagccaccagccagagcattgctcctcctgttcctttgaaagcccagacagtaacagactccatgtttgcagtggccagcaaagatgctggatgtgtgaataagagtactcatgaattcaagccacagagtggagcagagatcaaagaagggtgtgaaacacataaggttgccaacacaagttcttttcacacaactccaaacacatcactgggaatggttcaggcaacgccatccaaagtgcagccatcacccaccgtgcacacaaaagaagcattaggtttcatcatgaatatgtttcaggctcctacacttcctgatatttctgatgacaaagatgaatggcaatctctagatcaaaatgaagatgcatttgaagcccagtttcaaaaaaatgtaaggtcatctggggcttggggagtcaataagatcatctcttctttgtcatctgcttttcatgtgtttgaagatggaaacaaagaaaattatggattaccacagcctaaaaataaacccacaggagccaggacctttggagaacgctctgtcagcagacttccttcaaaaccaaaggaggaagtgcctcatgctgaagagtttttggatgactcaactgtatggggtattcgctgcaacaaaaccctggcacccagtcctaagagcccaggagacttcacatctgctgcacaacttgcgtctacaccattccacaagcttccagtggagtcagtgcacattttagaagataaagaaaatgtggtagcaaaacagtgtacccaggcgactttggattcttgtgaggaaaacatggtggtgccttcaagggatggaaaattcagtccaattcaagagaaaagcccaaaacaggccttgtcgtctcacatgtattcagcatccttacttcgtctgagccagcctgctgcaggtggggtacttacctgtgaggcagagttgggcgttgaggcttgcagactcacagacactgacgctgccattgcagaagatccaccagatgctattgctgggctccaagcagaatggatgcagatgagttcacttgggactgttgatgctccaaacttcattgttgggaacccatgggatgataagctgattttcaaacttttatctgggctttctaaaccagtgagttcctatccaaatacttttgaatggcaatgtaaacttccagccatcaagcccaagactgaatttcaattgggttctaagctggtctatgtccatcaccttcttggagaaggagcctttgcccaggtgtacgaagctacccagggagatctgaatgatgctaaaaataaacagaaatttgttttaaaggtccaaaagcctgccaacccctgggaattctacattgggacccagttgatggaaagactaaagccatctatgcagcacatgtttatgaagttctattctgcccacttattccagaatggcagtgtattagtaggagagctctacagctatggaacattattaaatgccattaacctctataaaaatacccctgaaaaagtgatgcctcaaggtcttgtcatctcttttgctatgagaatgctttacatgattgagcaagtgcatgactgtgaaatcattcatggagacattaaaccagacaatttcatacttggaaacggatttttggaacaggatgatgaagatgatttatctgctggcttggcactgattgacctgggtcagagtatagatatgaaactttttccaaaaggaactatattcacagcaaagtgtgaaacatctggttttcagtgtgttgagatgctcagcaacaaaccatggaactaccagatcgattactttggggttgctgcaacagtatattgcatgctctttggcacttacatgaaagtgaaaaatgaaggaggagagtgtaagcctgaaggtctttttagaaggcttcctcatttggatatgtggaatgaattttttcatgttatgttgaatattccagattgtcatcatcttccatctttggatttgttaaggcaaaagctgaagaaagtatttcaacaacactatactaacaagattagggccctacgtaataggctaattgtactgctcttagaatgtaagcgttcacgaaaataaaatttggatatagacagtccttaaaaatc

SEQ ID NO: 534716 - DNA, 469 bp, Homo sapiens
caaaccgtgctgttttaagaacagacctaagtggtttaattcacccactttagatgggtgaatgttatggtgtgtgaaatatctcagtaaagcagttaaaaggaaaaagagctggaatgcactgattcaggaacttaatttcaggaaggaaaggtctgtatgtacacatttcactttaagcagaaaatctttcttcaagaaatgactttactttctctttgcactgccagcacgtgagatactaactttttaactagttgttcttctctagtctctacgttattagaattttttgctttcataatgtgaaacctttaagcaggagaagaaaatgttttcagatagtttcaaatacaccaaaaatgtttgaaacacaaaaatactggaatcaaaccataatgcacttattgaatatatagttgtatagatttgttctgaaaataaattatctgaaatttaactattaaaa

SEQ ID NO: 534717 - DNA, 2782 bp, Homo sapiens
  misc_feature (225)..(225): n is a, c, g, or t
ataacgacgtgtactttgtcgaccttttcccaaaattaagtaatgaaatagatatacttaaatgctgatacaactatgagacttgttatttcagtggttagaaattattagctgctgatggtgtctgtggttcagaagctacaaagcatccattttgtagagtggtctttttgttgttgactgtacatttcagaatgcttgaagaaggagtatggggaaacttcnaggaaaaaggaatccattgaagacagatgccatgctttgagaagatgtaatgcctgattagtagtattctggacttcatggttttgtttttgttgtttgtttgtttaatatgaaaggttaatccagcacgtatggggccaagtgtaggctcccagcaggaactgagagcgccatgtcttccagtaacctatcagcagacaccagtgaacatggaaaagaacccaagagaggcacctcctgttgttcctcctttggcaaatgctatttctgcagctttggtgtccccagccaccagccagagcattgctcctcctgttcctttgaaagcccagacagtaacagactccatgtttgcagtggccagcaaagatgctggatgtgtgaataagagtactcatgaattcaagccacagagtggagcagagatcaaagaagggtgtgaaacacataaggttgccaacacaagttcttttcacacaactccaaacacatcactgggaatggttcaggcaacgccatccaaagtgcagccatcacccaccgtgcacacaaaagaagcattaggtttcatcatgaatatgtttcaggctcctacacttcctgatatttctgatgacaaagatgaatggcaatctctagatcaaaatgaagatgcatttgaagcccagtttcaaaaaaatgtaaggtcatctggggcttggggagtcaataagatcatctcttctttgtcatctgcttttcatgtgtttgaagatggaaacaaagaaaattatggattaccacagcctaaaaataaacccacaggagccaggacctttggagaacgctctgtcagcagacttccttcaaaaccaaaggaggaagtgcctcatgctgaagagtttttggatgactcaactgtatggggtattcgctgcaacaaaaccctggcacccagtcctaagagcccaggagacttcacatctgctgcacaacttgcgtctacaccattccacaagcttccagtggagtcagtgcacattttagaagataaagaaaatgtggtagcaaaacagtgtacccaggcgactttggattcttgtgaggaaaacatggtggtgccttcaagggatggaaaattcagtccaattcaagagaaaagcccaaaacaggccttgtcgtctcacatgtattcagcatccttacttcgtctgagccagcctgctgcaggtggggtacttacctgtgaggcagagttgggcgttgaggcttgcagactcacagacactgacgctgccattgcagaagatccaccagatgctattgctgggctccaagcagaatggatgcagatgagttcacttgggactgttgatgctccaaacttcattgttgggaacccatgggatgataagctgattttcaaacttttatctgggctttctaaaccagtgagttcctatccaaatacttttgaatggcaatgtaaacttccagccatcaagcccaagactgaatttcaattgggttctaagctggtctatgtccatcaccttcttggagaaggagcctttgcccaggtgtacgaagctacccagggagatctgaatgatgctaaaaataaacagaaatttgttttaaaggtccaaaagcctgccaacccctgggaattctacattgggacccagttgatggaaagactaaagccatctatgcagcacatgtttatgaagttctattctgcccacttattccagaatggcagtgtattagtaggagagctctacagctatggaacattattaaatgccattaacctctataaaaatacccctgaaaaagtgatgcctcaaggtcttgtcatctcttttgctatgagaatgctttacatgattgagcaagtgcatgactgtgaaatcattcatggagacattaaaccagacaatttcatacttggaaacggatttttggaacaggatgatgaagatgatttatctgctggcttggcactgattgacctgggtcagagtatagatatgaaactttttccaaaaggaactatattcacagcaaagtgtgaaacatctggttttcagtgtgttgagatgctcagcaacaaaccatggaactaccagatcgattactttggggttgctgcaacagtatattgcatgctctttggcacttacatgaaagtgaaaaatgaaggaggagagtgtaagcctgaaggtctttttagaaggcttcctcatttggatatgtggaatgaattttttcatgttatgttgaatattccagattgtcatcatcttccatctttggatttgttaaggcaaaagctgaagaaagtatttcaacaacactatactaacaagattagggccctacgtaataggctaattgtactgctcttagaatgtaagcgttcacgaaaataaaatttggatatagacagtccttaaaaatcacactgtaaatatgaatctgctcactttaaacctgtttttttttcatttattgtttatgtaaatgtttgttaaaaataaatcccatggaatatttccatgtaaaaaaaaaa

SEQ ID NO: 534718 - DNA, 852 bp, Homo sapiens
gctgtggcgtgggacagagtgaccccgtgatgtgaagtgtgtgagcaacattggggatgtggttgacgatgagtgaatgcaacatgaagctccggccgaatgacatttgagaactgcgacatgtgtgaccctgtgccaagagctggttcctcacctgagtggagcgaaagtgtgctcagacggagtgtgggtgccggatttgcggacacgctcggttggtgtgcatgaccaaccatgtcagcagcctgcccctggagtggctgtgtggaacaactgtgcggcagaggccacccatgtgacaacgtgaccctgcactgtgtgcaatggtggagtgtgttttgcctgtggcatactggagtcacgtgttccatacgagattgtgggacgcgggacgcaagcagagggaggtgcttagtgtaaagacaagaatgcaggacacctattgaagttgtacggacgcccctcgtgaatgtacgttgtcactgggaggaaaagcgccgccaggcaggcgaagtcctgtcgagcgtcaaaggcctttgccgggggccaaagtggttacaggcgaccggacatgggaggcatgtgttcccagcgacgcttgcgcaggggtggtctatacgtgggtcacggtggaccgtgtatggcgtgtggatcctggtacctgacgttggcacagatggaacgacgtaacagtgaaacgacatcgtgtatgaaggccctcaggctttgaaaactcagaacagaagcagacgggaactccgattggtacaacccctataagggaacgtggagtgtcccttgagaggacagacatgaacaacgtgcgaggggaggacgtactagcacgctgaa

SEQ ID NO: 534719 - DNA, 3558 bp, Homo sapiens
gggtattcgaatcggcggcggcttctagtttgcggttcaggtttggccgctgccggccagcgtcctctggccatggacaccccggaaaatgtccttcagatgcttgaagcccacatgcagagctacaagggcaatgaccctcttggtgaatgggaaagatacatacagtgggtagaagagaattttcctgagaataaagaatacttgataactttactagaacatttaatgaaggaatttttagataagaagaaataccacaatgacccaagattcatcagttattgtttaaaatttgctgagtacaacagtgacctccatcaattttttgagtttctgtacaaccatgggattggaaccctgtcatcccctctgtacattgcctgggcggggcatctggaagcccaaggagagctgcagcatgccagtgctgtccttcagagaggaattcaaaaccaggctgaacccagagagttcctgcaacaacaatacaggttatttcagacacgcctcactgaaacccatttgccagctcaagctagaacctcagaacctctgcataatgttcaggttttaaatcaaatgataacatcaaaatcaaatccaggaaataacatggcctgcatttctaagaatcagggttcagagctttctggagtgatatcttcagcttgtgataaagagtcaaatatggaacgaagagtgatcacgatttctaaatcagaatattctgtgcactcatctttggcatccaaagttgatgttgagcaggttgttatgtattgcaaggagaagcttattcgtggggaatcagaattttcctttgaagaattgagagcccagaaatacaatcaacggagaaagcatgagcaatgggtaaatgaagacagacattatatgaaaaggaaagaagcaaatgcttttgaagaacagctattaaaacagaaaatggatgaacttcataagaagttgcatcaggtggtggagacatcccatgaggatctgcccgcttcccaggaaaggtccgaggttaatccagcacgtatggggccaagtgtaggctcccagcaggaactgagagcgccatgtcttccagtaacctatcagcagacaccagtgaacatggaaaagaacccaagagaggcacctcctgttgttcctcctttggcaaatgctatttctgcagctttggtgtccccagccaccagccagagcattgctcctcctgttcctttgaaagcccagacagtaacagactccatgtttgcagtggccagcaaagatgctggatgtgtgaataagagtactcatgaattcaagccacagagtggagcagagatcaaagaagggtgtgaaacacataaggttgccaacacaagttcttttcacacaactccaaacacatcactgggaatggttcaggcaacgccatccaaagtgcagccatcacccaccgtgcacacaaaagaagcattaggtttcatcatgaatatgtttcaggctcctacacttcctgatatttctgatgacaaagatgaatggcaatctctagatcaaaatgaagatgcatttgaagcccagtttcaaaaaaatgtaaggtcatctggggcttggggagtcaataagatcatctcttctttgtcatctgcttttcatgtgtttgaagatggaaacaaagaaaattatggattaccacagcctaaaaataaacccacaggagccaggacctttggagaacgctctgtcagcagacttccttcaaaaccaaaggaggaagtgcctcatgctgaagagtttttggatgactcaactgtatggggtattcgctgcaacaaaaccctggcacccagtcctaagagcccaggagacttcacatctgctgcacaacttgcgtctacaccattccacaagcttccagtggagtcagtgcacattttagaagataaagaaaatgtggtagcaaaacagtgtacccaggcgactttggattcttgtgaggaaaacatggtggtgccttcaagggatggaaaattcagtccaattcaagagaaaagcccaaaacaggccttgtcgtctcacatgtattcagcatccttacttcgtctgagccagcctgctgcaggtggggtacttacctgtgaggcagagttgggcgttgaggcttgcagactcacagacactgacgctgccattgcagaagatccaccagatgctattgctgggctccaagcagaatggatgcagatgagttcacttgggactgttgatgctccaaacttcattgttgggaacccatgggatgataagctgattttcaaacttttatctgggctttctaaaccagtgagttcctatccaaatacttttgaatggcaatgtaaacttccagccatcaagcccaagactgaatttcaattgggttctaagctggtctatgtccatcaccttcttggagaaggagcctttgcccaggtgtacgaagctacccagggagatctgaatgatgctaaaaataaacagaaatttgttttaaaggtccaaaagcctgccaacccctgggaattctacattgggacccagttgatggaaagactaaagccatctatgcagcacatgtttatgaagttctattctgcccacttattccagaatggcagtgtattagtaggagagctctacagctatggaacattattaaatgccattaacctctataaaaatacccctgaaaaagtgatgcctcaaggtcttgtcatctcttttgctatgagaatgctttacatgattgagcaagtgcatgactgtgaaatcattcatggagacattaaaccagacaatttcatacttggaaacggatttttggaacaggatgatgaagatgatttatctgctggcttggcactgattgacctgggtcagagtatagatatgaaactttttccaaaaggaactatattcacagcaaagtgtgaaacatctggttttcagtgtgttgagatgctcagcaacaaaccatggaactaccagatcgattactttggggttgctgcaacagtatattgcatgctctttggcacttacatgaaagtgaaaaatgaaggaggagagtgtaagcctgaaggtctttttagaaggcttcctcatttggatatgtggaatgaattttttcatgttatgttgaatattccagattgtcatcatcttccatctttggatttgttaaggcaaaagctgaagaaagtatttcaacaacactatactaacaagattagggccctacgtaataggctaattgtactgctcttagaatgtaagcgttcacgaaaataaaatttggatatagacagtccttaaaaatcacactgtaaatatgaatctgctcactttaaacctgtttttttttcatttattgtttatgtaaatgtttgttaaaaataaatcccatggaatatttccatgtaaaaaaaaaattataaatatttcaacggatgcaagcatttgggagaataattcagacatgagcattctctagaatcactttttaaacactgacctggt

SEQ ID NO: 534720 - DNA, 368 bp, Homo sapiens
  misc_feature (218)..(218): n is a, c, g, or t
  misc_feature (241)..(241): n is a, c, g, or t
  misc_feature (266)..(266): n is a, c, g, or t
  misc_feature (317)..(317): n is a, c, g, or t
  misc_feature (326)..(326): n is a, c, g, or t
  misc_feature (350)..(350): n is a, c, g, or t
tttttacaacagtacactgatctacaaaaattttaaaatgagccgggcgcggtgactcacgcctgtaatcccagcactttgggaggccaaagcaggcggatcatgaggtcaggagatcaagaccatcctggctaacacggtgaaaccccgtctctactaaaaatacaaaaaattagccgggtgtggtggcgggcacctgtagtcccagctactcgggnggctgaggcaggagaatggcgtnaagccgggaggtggagcttgcagtnagccgagatcacaccactgcactccagcctgggcaacaaagcaagactctnaaaaaaganaaaaatttttttttaaatgagctngggtgtacttgcatgcat

SEQ ID NO: 534721 - DNA, 163 bp, Homo sapiens
tgaatgtacactggctcacattcatgccatggagcctgagaatccggtaccatacggagccactcacccagagtggtgaatggctttctggcagaaattccaaactgaccagctctgagatcattatctgggctatctggagctaataaggagggatgagcat

SEQ ID NO: 534722 - DNA, 1393 bp, Homo sapiens
gggcccaggaggtcaaagctggagtgagctattaccttgccacagcaacccagactgggcaacagcaagaccctgtctctaaagaacaaacaaaaaactactacaacttcacctctgtggtcttccccccaaaatccaataactccaaagtaaccacaagaaatgtatcaaacaaacccaatttgagggccattctacaacatacctgactagtactctttggaactgtcaaggtcatcaaaaacaaggaacatctgagaaactgtcacagtccagaagtggctaagtggacatgatgactaaacataaagtatcctagaacacaggcaaaaactagtgaaagttctaagctggtctatgtccatcaccttcttggagaaggagcctttgcccaggtgtacgaagctacccagggagatctgaatgatgctaaaaataaacagaaatttgttttaaaggtccaaaagcctgccaacccctgggaattctacattgggacccagttgatggaaagactaaagccatctatgcagcacatgtttatgaagttctattctgcccacttattccagaatggcagtgtattagtaggagagctctacagctatggaacattattaaatgccattaacctctataaaaatacccctgaaaaagtgatgcctcaaggtcttgtcatctcttttgctatgagaatgctttacatgattgagcaagtgcatgactgtgaaatcattcatggagacattaaaccagacaatttcatacttggaaacggatttttggaacaggatgatgaagatgatttatctgctggcttggcactgattgacctgggtcagagtatagatatgaaactttttccaaaaggaactatattcacagcaaagtgtgaaacatctggttttcagtgtgttgagatgctcagcaacaaaccatggaactaccagatcgattactttggggttgctgcaacagtatattgcatgctctttggcacttacatgaaagtgaaaaatgaaggaggagagtgtaagcctgaaggtctttttagaaggcttcctcatttggatatgtggaatgaattttttcatgttatgttgaatattccagattgtcatcatcttccatctttggatttgttaaggcaaaagctgaagaaagtatttcaacaacactatactaacaagattagggccctacgtaataggctaattgtactgctcttagaatgtaagcgttcacgaaaataaaatttggatatagacagtccttaaaaatcacactgtaaatatgaatctgctcactttaaacctgtttttttttcatttattgtttatgtaaatgtttgttaaaaataaatcccatggaatatttccatgtaaaaaaaaaa

SEQ ID NO: 534723 - DNA, 216 bp, Homo sapiens
cctcccagatctcatttctgaaacatacttttcagttttcaaaattttattgagatgttggagagaaacagccaacatatacattcctcattttgtcgcaactggcattttacccacatgataggctcttctctggcattgacctaacttcaggtctccttggtagtcctccttctgttctctgttgctgcctggtgtccttgaagtctaccaggg

SEQ ID NO: 534724 - DNA, 316 bp, Homo sapiens
  misc_feature (305)..(305): n is a, c, g, or t
gtacgtgcaacgtcgaacacccactagcctaaaaaatcccaagcatataactggactgctcaccccaattggccaatctatcaccctatataatagctaatttatataataacatgaaagacattctcctccgcataacctgctgcagattgaaaacactgaacttgacaattaacagcccaatatctgacaatcaaccaacaagtgcattattaccctcactgtcaacccaatacaggcatgctcataaggaaaggttaaaaaaagtaaatggaactcggctaatatcttaccccgcctgtttnatatattatat

SEQ ID NO: 534725 - DNA, 402 bp, Homo sapiens
  misc_feature (92)..(92): n is a, c, g, or t
  misc_feature (95)..(95): n is a, c, g, or t
  misc_feature (126)..(126): n is a, c, g, or t
  misc_feature (133)..(133): n is a, c, g, or t
  misc_feature (170)..(170): n is a, c, g, or t
  misc_feature (174)..(174): n is a, c, g, or t
  misc_feature (191)..(191): n is a, c, g, or t
cctttgggtcgcttctgttcgtatataagcagccagttcggtgggtgtcataaaacagtgacaagaaggctgctggagcggcaaggtcccangtntgcccgaaagtcagaaggttaaagaatttanccctaancccgccccccccctcttaatcagtggggaagacggtntcanaactgtttgtttcaatnggccatttaagtttagtagtaaaagactggttaatgataccaatgcttcgtaaacccttcagaaggaaaggagaatgttttgtggccccctttggttttcttttttggggggggcagttttaagttattagtttttaaaaccaggactttttaatggaaacaacttgcccaaaaatttgtcccagaattttgagacccattaaaaaagtta

SEQ ID NO: 534726 - DNA, 382 bp, Homo sapiens
ggcggcatccgcaagaagccgttctgggagccgtagcgcttctgcagcgcggcgcggcgtggccgtctcgaagacctcgtgcacggccttccttggtcttgtgccagagcactcgaggtagtcgtaggcttggatgcgcacggccattgcgcggcgttcatccgtgcgcacggtttcctgcttcatgcgggccaggctctgtgcggacatgctcgtcgctgcgcaggtctttatttgtttggccaccaggatgatgggcacatatgggacagaagtgcttcacctctggggacccacttctcggggaatgtactccagcgagtccgggcttgtccaccgagaagcacatgagaatgactgtcggggtgtccgggtagggaga

SEQ ID NO: 534727 - DNA, 405 bp, Homo sapiens
cagactatggcgccttactcaacattgggaaggggggttccaactcttttaaggtctcatcttcagcacttctaaactgtgggaaactatgtgaaaacaaatggagtggccaaacacaccattcatcactgtgcttctggacagctgcaagtccatacgtgttctgataattcaatacaagaaagaagatttgcttgggaaggtctgaatggccctagctttgtttgttaaccataacctctaccagctggaaacacaatgccccactaatactaacagtgcctgcttgtccaaacagcattctggccacttacagcaattgacacaaattctaacaggtagatggggcaaagcattaccttgtgtaaaactgctgctaaaatatattcctagtgagaaaggtca

SEQ ID NO: 534728 - DNA, 359 bp, Homo sapiens
  misc_feature (11)..(11): n is a, c, g, or t
  misc_feature (19)..(19): n is a, c, g, or t
  misc_feature (22)..(22): n is a, c, g, or t
  misc_feature (41)..(41): n is a, c, g, or t
  misc_feature (271)..(271): n is a, c, g, or t
gctcggaccangcttagtntgnaatacatgtcaaaattgangcagagactgcaggtgatgtgtccaccagccacggaggtgccaaggcctgcccacgatactagaagctaggagagaggactaggcagcctttctctgggagcctccagaagaaactaaccctgccgacactttggtttgggacctttcgcctcccaaactgtgaaaataaattcctgttgttttaagctatctgataccttgtggtgctttggtaaaactaacttgtganactaacacaaagtaagtaataaaggaaaagaggaatacaaaataacaaggcctactaagcttcttcccctactcatcgcactaattta

SEQ ID NO: 534729 - DNA, 104 bp, Homo sapiens
atagtacatgactgttccttaaataaatccgttgcgtattcgctaagccgagttagccttgacgctgcttgtgacgcgggtcggtgcagataacgcgcaccacg

SEQ ID NO: 534730 - DNA, 158 bp, Homo sapiens
tgtaagcagagaatggtcagagaatgggattccgattgggaacttgtggggatgagagtgacctcggttgagctgggaagtggaaaaaggatgtttgagtcattgtgcacctattagagcctggcccgctgattccgtaggatggctggcgagacacc

SEQ ID NO: 534731 - DNA, 303 bp, Homo sapiens
aaagagacccacagaatcaccacacttgttgcccaggctggagtgcaatggcgtgatcttggctcactgcaacctccgcctcccaggttcaaccgattcttctgcctcagcctcctgagtagctgggattacaggcatgcgccaccacgcccatctaattttgtatttttagtagagacagggtttctccatgttggtcaggctggtcttgaactcctcacctcaggcgatccgccacctcggcctctgtgtttcctgtgcttcttagctctttccactgagaaggcttcagtgtggtggacg

SEQ ID NO: 534732 - DNA, 732 bp, Homo sapiens
  misc_feature (12)..(12): n is a, c, g, or t
  misc_feature (24)..(24): n is a, c, g, or t
tacggtaggtangaggctggggtngaatcggacgaggccgaggaaaaccgtgtactattagccatggtcaaccccaccgtgttcttcgacattgccgtcgacggcgagcccttgggccgcgtctcctttgagctgtttgcagacaaggtcccaaagacagcagaaaattttcgtgctctgagcactggagagaaaggatttggttataagggttcctgctttcacagaattattccagggtttatgtgtcagggtggtgacttcacacgccataatggcactggtggcaagtccatctatggggagaaatttgaagatgagaacttcatcctaaagcatacgggtcctggcatcttgtccatggcaaatgctggacccaacacaaatggttcccagtttttcatctgcactgccaagactgagtggttggatggcaagcatgtggtgtttggcaaagtgaaagaaggcatgaatattgtggaggccatggagcgctttgggtccaggaatggcaagaccagcaagaagatcaccattgctgactgtggacaactcgaataagtttgacttgtgttttatcttaaccaccagatcattccttctgtagctcaggagagcacccctccaccccatttgctcgcagtatcctagaatactatcgcgctgctccctgcacttccctccggcctccatcactcccgtcacctcactccccaccaccggtatcctccc

SEQ ID NO: 534733 - DNA, 3679 bp, Homo sapiens
  misc_feature (3567)..(3567): n is a, c, g, or t
ctgtattactcatgtgtcagatgtaccagatatcatgtttaggtattactacaaatgaaagaatgaatgccaggagatacaagcactttaaagtcacaacaacgtctattgaaagcccattcaaccatggatgtgtaagaaatattatagacttctttgaatttcgatgctgtggcctctttcgtcctgttatcgtggactggaccaggcagtatacaatagaatatgaccaaatatcaggatctgggtaccagctggtgtagcgacatcttatcctatgaagcatattgctgagtggtgcctgaaaattgtgtctgtccgtgtctttctcacactcgaatccacatcctttgaacaagagcatgctatgtgtagggctaatggtgaattttacagtctttttttcaacacttttattaacaaaagtaaacatggacagaacacactgccatttctgggaagagtaaagatgataaaaaataattttaatggttcttaatgtggaaattcacaacatactcaacttttgggttttgttctcacagtatttttcacaaaaaaagggtaaacttattctattgacagacatggtgtactgatcagaaatgttcagttttaactaaaactaaatttatgttatttggctaaatgttatgatgcagtctagtacgagtattgcatctaattccaggagcattgttttaagttgattgactagttattatgtacatttcagaatgtacacataaatactgtgatgaaaatcatgtgattgggatctactgtgatgttgtcttcaaaggcaggagaaaataatgttcacaataaaatgtgctaacaatgttttgtttctatcagctgttgcaatgctgatatatttctagttcagtgaaataatttgtagtaaccttactctgaggttttacggtctgataatgaagcacttgcatgagtatagtaagtcatgtttttttgttcaaatttaaaagccctgctaattgcatgacacaccacatagaatgtatactagcagatactatccagtgaagcataaattagaatttaatttgatgttcaaaaacagttccatttttaagggttaaggtggtattttcaagaaaaggcagaacaaataatgcaaaattctcagtaatagtgatacatggatatacttccttttaaattctcagctgcaaaataattgtagacaaaataatggcatttaactaaagatggagcatgatctgtgtacatagcacatgtgaataaaagaaaagctgacagtatattctggtttcaataaaatgacctatcagaaagtagaatttcatccccaagagtatttcagtttatccaatattgagtaagttctgaaacagttttagaaaaaattttctttttgttaaatgtgatgcactgatcaatttttgtcacagcattttcataccttcatggtggactactagtcactgcttccataaatattgtttacagggtgagatttggtttattcatcttaagtgctgtagcaaactgtggttcgagcaacctgtgggaaatctgtgagagggaatggggtgggagatgtgggggaatggtggtcagactgatgacagatcctagaccaatgtaaagaatgtgtatctgtatataaataatttatcaaatagttttctctttgtgtctgtgttagtgtttttaaagctgctcatttcattttgtccaaccaaaaagaaaagggagataactaatgagcttctagtgatgttcaaaattgctgttaataggcattataccctgcaagttcactgcatgtctgatgcttggtaaaactagtcttccctgtaaaatgcagattacaggtattaaagcaatctagtggtatacccgccccttgccttagtaagaggagcagtgaaatgtatatagttgatgttcagtatttccaagtaccatttttatatagtagcttatttgaccataagtcacacatcaaaaaaagattacccttagtgtatgtgttttaatattagaaaattggcatatgtactttatttttgaaaagggaagagatgggtgtggggtggcaatagcattgtgccattttgtcatagaatgtaaaaattggttaactttacaaatgtcagctagttttgactactaattgggggaaattttagataatttttaaattcaaagttatttataaaatgctagaatttgttttaattttttgtattttgagccacttcacatgaagactcagttgcatttttatcgaatacatttttatcaacagttaaagactatggtggttttttcagagtttggctaagaatgttgttaccatcttctttgtttgtggtacaatattttcagtgcaaaagagatgtcattcagttaaaaagacaaacctctagatgtgtaattacatggaaaatactagcaatgtgaatgcttttgtagtaaccatcttgtagtacctgtgaaatctataactcagaaatggtcagatggtcaggagccagctatgcagcagtataccatctgtttaattattttgtaggtcctgtgtgtggaaccaactataaacccagttctaaagttgtgtatgatggtgaacctttgggaatagttcttatcaacttaattggatacttttagcaaataggaacttaattctcagcactgaacatgaattacttccttggagtttttttcattcatatttttgttgtttccaggaatttatttgatattaatgggcgtaaaacagcatcattgtacttaagctatggatgtttttattttatattttctttatttataactgtgccaagtattattttgctacttaccgtgttattctgtggaaagaaaaacctgtaaagtgtttaataaattagccctccttacataaattaaatgtcaaaattttgtaaaatattaatcagaataaatactgactcttaaaaaaaaaaaactcgtgccgaattcggcacgagtttgaagatgagaacttcatcctaaagcatacgggtcctggcatcttgtccatggcaaatgctggacccaacacaaatggttcccagtttttcatctgcactgccaagactgagtggttggatggcaagcatgtggtgtttggcaaagtgaaagaaggcatgaatattgtggaggccatggagcgctttgggtccaggaatggcaagaccagcaagaagatcaccattgctgactgtggacaactcgaataagtttgacttgtgttttatcttaaccaccagatcattccttctgtagctcaggagagcacccctccaccccatttgctcgcagtatcctagaatctttgtgctctcgctgcagttccctttgggttccatgttttccttgttccctcccatgcctagctggattgcagagttaagtttatgattatgaaataaaaaactaaataacaaaaaaaaaacaaaaaaaaaaaaacctccggggcctttttgtcgggggggggaaaaagggttttgaaagggccatggtctatgttgttccggcccctttttgtcncaaggggaatcgcgggccccaaaggggcgataatcgaacccgtacttcttcttcttcacacgtccaacgacacagcagccccaaagagaggaaaaacaacgaaacacaccac

SEQ ID NO: 534734 - DNA, 418 bp, Homo sapiens
tggtggagtatataaactttccaaaattctcattttgctttaatttatcactgggcaaaaatagttgttttccttggaaaattttcaagaaagcatctgccaaatacccaagtctaaataacgtactttgttggttattctttcatcaagtaaaaatgctgttctatgaagaagacaactagttagctggaaacccaaataactgtaaaagtacttttccttagacaaccacagtacttcaatatataacagaagtgttttttgagtacttcccattttatcacacaaaatattcaaaagccaagtactaaaaggtcaagattaaataaaattaatttttactgcttcatcaagaacattcttaaatgaaactttttttttttttttgggcaattttatacggcttgacattaaaaaa

SEQ ID NO: 534735 - DNA, 3625 bp, Homo sapiens
  misc_feature (3513)..(3513): n is a, c, g, or t
ctgtattactcatgtgtcagatgtaccagatatcatgtttaggtattactacaaatgaaagaatgaatgccaggagatacaagcactttaaagtcacaacaacgtctattgaaagcccattcaaccatggatgtgtaagaaatattatagacttctttgaatttcgatgctgtggcctctttcgtcctgttatcgtggactggaccaggcagtatacaatagaatatgaccaaatatcaggatctgggtaccagctggtgtagcgacatcttatcctatgaagcatattgctgagtggtgcctgaaaattgtgtctgtccgtgtctttctcacactcgaatccacatcctttgaacaagagcatgctatgtgtagggctaatggtgaattttacagtctttttttcaacacttttattaacaaaagtaaacatggacagaacacactgccatttctgggaagagtaaagatgataaaaaataattttaatggttcttaatgtggaaattcacaacatactcaacttttgggttttgttctcacagtatttttcacaaaaaaagggtaaacttattctattgacagacatggtgtactgatcagaaatgttcagttttaactaaaactaaatttatgttatttggctaaatgttatgatgcagtctagtacgagtattgcatctaattccaggagcattgttttaagttgattgactagttattatgtacatttcagaatgtacacataaatactgtgatgaaaatcatgtgattgggatctactgtgatgttgtcttcaaaggcaggagaaaataatgttcacaataaaatgtgctaacaatgttttgtttctatcagctgttgcaatgctgatatatttctagttcagtgaaataatttgtagtaaccttactctgaggttttacggtctgataatgaagcacttgcatgagtatagtaagtcatgtttttttgttcaaatttaaaagccctgctaattgcatgacacaccacatagaatgtatactagcagatactatccagtgaagcataaattagaatttaatttgatgttcaaaaacagttccatttttaagggttaaggtggtattttcaagaaaaggcagaacaaataatgcaaaattctcagtaatagtgatacatggatatacttccttttaaattctcagctgcaaaataattgtagacaaaataatggcatttaactaaagatggagcatgatctgtgtacatagcacatgtgaataaaagaaaagctgacagtatattctggtttcaataaaatgacctatcagaaagtagaatttcatccccaagagtatttcagtttatccaatattgagtaagttctgaaacagttttagaaaaaattttctttttgttaaatgtgatgcactgatcaatttttgtcacagcattttcataccttcatggtggactactagtcactgcttccataaatattgtttacagggtgagatttggtttattcatcttaagtgctgtagcaaactgtggttcgagcaacctgtgggaaatctgtgagagggaatggggtgggagatgtgggggaatggtggtcagactgatgacagatcctagaccaatgtaaagaatgtgtatctgtatataaataatttatcaaatagttttctctttgtgtctgtgttagtgtttttaaagctgctcatttcattttgtccaaccaaaaagaaaagggagataactaatgagcttctagtgatgttcaaaattgctgttaataggcattataccctgcaagttcactgcatgtctgatgcttggtaaaactagtcttccctgtaaaatgcagattacaggtattaaagcaatctagtggtatacccgccccttgccttagtaagaggagcagtgaaatgtatatagttgatgttcagtatttccaagtaccatttttatatagtagcttatttgaccataagtcacacatcaaaaaaagattacccttagtgtatgtgttttaatattagaaaattggcatatgtactttatttttgaaaagggaagagatgggtgtggggtggcaatagcattgtgccattttgtcatagaatgtaaaaattggttaactttacaaatgtcagctagttttgactactaattgggggaaattttagataatttttaaattcaaagttatttataaaatgctagaatttgttttaattttttgtattttgagccacttcacatgaagactcagttgcatttttatcgaatacatttttatcaacagttaaagactatggtggttttttcagagtttggctaagaatgttgttaccatcttctttgtttgtggtacaatattttcagtgcaaaagagatgtcattcagttaaaaagacaaacctctagatgtgtaattacatggatctataactcagaaatggtcagatggtcaggagccagctatgcagcagtataccatctgtttaattattttgtaggtcctgtgtgtggaaccaactataaacccagttctaaagttgtgtatgatggtgaacctttgggaatagttcttatcaacttaattggatacttttagcaaataggaacttaattctcagcactgaacatgaattacttccttggagtttttttcattcatatttttgttgtttccaggaatttatttgatattaatgggcgtaaaacagcatcattgtacttaagctatggatgtttttattttatattttctttatttataactgtgccaagtattattttgctacttaccgtgttattctgtggaaagaaaaacctgtaaagtgtttaataaattagccctccttacataaattaaatgtcaaaattttgtaaaatattaatcagaataaatactgactcttaaaaaaaaaaaactcgtgccgaattcggcacgagtttgaagatgagaacttcatcctaaagcatacgggtcctggcatcttgtccatggcaaatgctggacccaacacaaatggttcccagtttttcatctgcactgccaagactgagtggttggatggcaagcatgtggtgtttggcaaagtgaaagaaggcatgaatattgtggaggccatggagcgctttgggtccaggaatggcaagaccagcaagaagatcaccattgctgactgtggacaactcgaataagtttgacttgtgttttatcttaaccaccagatcattccttctgtagctcaggagagcacccctccaccccatttgctcgcagtatcctagaatctttgtgctctcgctgcagttccctttgggttccatgttttccttgttccctcccatgcctagctggattgcagagttaagtttatgattatgaaataaaaaactaaataacaaaaaaaaaacaaaaaaaaaaaaacctccggggcctttttgtcgggggggggaaaaagggttttgaaagggccatggtctatgttgttccggcccctttttgtcncaaggggaatcgcgggccccaaaggggcgataatcgaacccgtacttcttcttcttcacacgtccaacgacacagcagccccaaagagaggaaaaacaacgaaacacaccac

SEQ ID NO: 534736 - DNA, 356 bp, Homo sapiens
tcatggcgaaacctatggaccatgattcatccagagcacaccgcagtttgcgccaggagagggttatcgaatgccggctttatatatattcctatctgctaataacccgggaagacaaactggtggggcaaggaagagggggaagatgttccccatcaatgggcaccgctcacgtcacccaggccggagctgttgtctcgcgtggttcgaggtgggctcacccagccaggcagcctgcaaattattctctggagcctcccggggacaggacaccgcctcccacctcacacacctgtgctgagggcttcctcccagttgggaggggtgtgcctgctcctggctggattctgtcccca

SEQ ID NO: 534737 - DNA, 1002 bp, Homo sapiens
gagcgcagccgagcccagacgccccgacacttttctgagcagacgtccagagcagagtcagccagacatgacctgagctgcctgctgtccccattctctgactcctgctggggccccacgcatggagaccccattcctgacgacatggatacccgcatatgcctgacctctatcgacacaggccattcggagcatgcccctgtgcttgcctggagtgagttggtcagcacgtggtatacggcagagcacgacaagcatgtgccaagggcataccgatgcagcaccacacatgaacacccacgacacagaccaatcagaagaggcaccaccgcaaggtggagccaggaagaccacagaccataacaagaaactgcagacggcatcacagaccgagcacacatacagacacggcgggcggtccatcagagcagaatcccggacaacacctcgcgggaccagcataggcaggcgatagtccccatagcgcatgtccaacccaaagttcagacccccgagaacagaaggcaatgacggggtcaaagaaccaagaggcatcgggcggttgggttgagaaggaattccaaccgagccaactgcaccagaaggggaagccgagcacggcaccgacagccattggccgtacaatcatcccacgaggaaggcatatccacagacggaggacacataaccacacggccgtgcacccgcccgaggatggtagaggaaccccacaaagcaacagaagagcgtaacccgtacccattcaccccagtggatcacccccgactgcatgcgggcaagcacgcgtggaaccactggatggaagcgagacaccacccaaatgcacacaacaagcgaaagagcccaagcgccaacgacccacaagcggacgcagccaacacaagatcgccacaaggtccacacccatcacagacagatcaggccgagagcccccagcgcttggggagggcccccaggaacagagatggccaaaagattccg

SEQ ID NO: 534738 - DNA, 1778 bp, Homo sapiens
  misc_feature (1666)..(1666): n is a, c, g, or t
ttagtgtatgtgtttaatattagaaaattggcatatgtactaagggtaatctttttttgatgtgtgacttatggtcaaataagctactatataaaaaaaagattacccttagtgtatgtgttttaatattagaaaattggcatatgtactttatttttgaaaagggaagagatgggtgtggggtggcaatagcattgtgccattttgtcatagaatgtaaaaattggttaactttacaaatgtcagctagttttgactactaattgggggaaattttagataatttttaaattcaaagttatttataaaatgctagaatttgttttaattttttgtattttgagccacttcacatgaagactcagttgcatttttatcgaatacatttttatcaacagttaaagactatggtggttttttcagagtttggctaagaatgttgttaccatcttctttgtttgtggtacaatattttcagtgcaaaagagatgtcattcagttaaaaagacaaacctctagatgtgtaattacatggaaaatactagcaatgtgaatgcttttgtagtaaccatcttgtagtacctgtgaaatctataactcagaaatggtcagatggtcaggagccagctatgcagcagtataccatctgtttaattattttgtaggtcctgtgtgtggaaccaactataaacccagttctaaagttgtgtatgatggtgaacctttgggaatagttcttatcaacttaattggatacttttagcaaataggaacttaattctcagcactgaacatgaattacttccttggagtttttttcattcatatttttgttgtttccaggaatttatttgatattaatgggcgtaaaacagcatcattgtacttaagctatggatgtttttattttatattttctttatttataactgtgccaagtattattttgctacttaccgtgttattctgtggaaagaaaaacctgtaaagtgtttaataaattagccctccttacataaattaaatgtcaaaattttgtaaaatattaatcagaataaatactgactcttaaaaaaaaaaaactcgtgccgaattcggcacgagtttgaagatgagaacttcatcctaaagcatacgggtcctggcatcttgtccatggcaaatgctggacccaacacaaatggttcccagtttttcatctgcactgccaagactgagtggttggatggcaagcatgtggtgtttggcaaagtgaaagaaggcatgaatattgtggaggccatggagcgctttgggtccaggaatggcaagaccagcaagaagatcaccattgctgactgtggacaactcgaataagtttgacttgtgttttatcttaaccaccagatcattccttctgtagctcaggagagcacccctccaccccatttgctcgcagtatcctagaatctttgtgctctcgctgcagttccctttgggttccatgttttccttgttccctcccatgcctagctggattgcagagttaagtttatgattatgaaataaaaaactaaataacaaaaaaaaaacaaaaaaaaaaaaacctccggggcctttttgtcgggggggggaaaaagggttttgaaagggccatggtctatgttgttccggcccctttttgtcncaaggggaatcgcgggccccaaaggggcgataatcgaacccgtacttcttcttcttcacacgtccaacgacacagcagccccaaagagaggaaaaacaacgaaacacaccac

SEQ ID NO: 534739 - DNA, 849 bp, Homo sapiens
  misc_feature (45)..(45): n is a, c, g, or t
  misc_feature (56)..(56): n is a, c, g, or t
  misc_feature (737)..(737): n is a, c, g, or t
agataaaacacaagtcaaacttattcgagttgtccacagtcagcnatggtgatctncttgctggtcttgccattcctggacccaaagcgctccatggcctccacaatattcatgccttctttcactttgccaaacaccacatgcttgccatccaaccactcagtcttggcagtgctttgaagatgagaacttcatcctaaagcatacgggtcctggcatcttgtccatggcaaatgctggacccaacacaaatggttcccagtttttcatctgcactgccaagactgagtggttggatggcaagcatgtggtgtttggcaaagtgaaagaaggcatgaatattgtggaggccatggagcgctttgggtccaggaatggcaagaccagcaagaagatcaccattgctgactgtggacaactcgaataagtttgacttgtgttttatcttaaccaccagatcattccttctgtagctcaggagagcacccctccaccccatttgctcgcagtatcctagaatctttgtgctctcgctgcagttccctttgggttccatgttttccttgttccctcccatgcctagctggattgcagagttaagtttatgattatgaaataaaaaactaaataacaaaaaaaaaacaaaaaaaaaaaaacctccggggcctttttgtcgggggggggaaaaagggttttgaaagggccatggtctatgttgttccggcccctttttgtcncaaggggaatcgcgggccccaaaggggcgataatcgaacccgtacttcttcttcttcacacgtccaacgacacagcagccccaaagagaggaaaaacaacgaaacacaccac

SEQ ID NO: 534740 - DNA, 185 bp, Homo sapiens
aacgtgtcatactcgggggagtgggaggagtcaattccactcccaagctttcattaataaagaccacatcatgttacctctcaagacctctttatctatgtatactgaattaatccatcttagtgtgagtagaaagagtgaagaaagcccaggactaaggcctaaaaatctgcagtattgaggaa

SEQ ID NO: 534741 - DNA, 163 bp, Homo sapiens
atgccgtggtgcagagccccgaattcctacttcatggatgtgacaatgcccaggatgctataaaatcaccacggtctttaaccatgcacaaacgagtagttttcgtgtgattcgctgctccacttgtcctcttgccagctctaccaggaggcacaaagcaagg

SEQ ID NO: 534742 - DNA, 333 bp, Homo sapiens
cccgggggggggggggggggggggcccccctcccccccccctgggtaaaaaggggggttgggggaaatttccccccatttggggggggggggccgggggaaattcttttccccctttttggaaaaaaaccctttggggaggaattttccaaaaaaaaagccccctttcccccccgggtttttcccggttagggttttgtttttgtttgggggcaaaaacggggggaaacccaagttttggggttttttttttcccaaggggttttttttgggggggcctttttggcccctttgaaccccccccgtttttgggaaaaaaagggtttttttttta

SEQ ID NO: 534743 - DNA, 513 bp, Homo sapiens
catccgtaccgtagactttccaagtgcatgaagagcacggggaaatattgtcaagcaacaaggtaggaaaacaaagtgtgagattgtcacattcaggctacggctttgttttttgccctgagggagaagcagcaaatgtcccaaagaacggacgcggctgccacctccttgaggagatgggactgaaccccgcccggagcctggactccgctttcgactcctcccgacaataaattatggaccgggtgtggtggctcacgcctgcaatcccagcactttgggaggttgaggcgggtggatcacttcaggtcaggagatcgagaccacggcgaaatcccgtctctactaaaaatataaaaaattagccgggcatggtggcgggtgcctgtggtcccagctactcaagagaggctgaggcgggagaatggctggacccgggaggcggagcttgcagtgagctgagatcgcgccactgcactccagcctgtgtgacagagcgagactcgtctcaaa

SEQ ID NO: 534744 - DNA, 623 bp, Homo sapiens
  misc_feature (12)..(12): n is a, c, g, or t
  misc_feature (24)..(24): n is a, c, g, or t
  misc_feature (592)..(592): n is a, c, g, or t
  misc_feature (621)..(621): n is a, c, g, or t
tacggtaggtangaggctggggtngaatcggacgaggccgaggaaaaccgtgtactattagccatggtcaaccccaccgtgttcttcgacattgccgtcgacggcgagcccttgggccgcgtctcctttgagctgtttgcagacaaggtcccaaagacagcagaaaattttcgtgctctgagcactggagagaaaggatttggttataagggttcctgctttcacagaattattccagggtttatgtgtcagggtggtgacttcacacgccataatggcactggtggcaagtccatctatggggagaaatttgaagatgagaacttcatcctaaagcatacgggtcctggcatcttgtccatggcaaatgctggacccaacacaaatggttcccagtttttcatctgcactgccaagactgagtggttggatggcaagcatgtggtgtttggcaaagtgaaagaaggcatgaatattgtggaggccatggagcgctttgggtccaggaatggcaagaccagcaagaagatcaccattgctgactgtggaagttgcttggggtttatcttaaccccagatcattctttgactnaagagagacccctcacccttggtcgaganct

SEQ ID NO: 534745 - DNA, 252 bp, Homo sapiens
ccatgcctcactcatgaacaccaaccacccaactatctataaacctagccataattacccccatactccttacactattcctcatcacccaactaacaaatattaaacacaatactaccactctacctcacctcaccaaagtcccactaaaaataaaaaattataacaacaccctgccgaaccaataatgaacgaataatctgtatcgctatcattcattggcccccatcaatacctaggtccatacccgac

SEQ ID NO: 534746 - DNA, 566 bp, Homo sapiens
  misc_feature (12)..(12): n is a, c, g, or t
  misc_feature (24)..(24): n is a, c, g, or t
tacggtaggtangaggctggggtngaatcggacgaggccgaggaaaaccgtgtactattagccatggtcaaccccaccgtgttcttcgacattgccgtcgacggcgagcccttgggccgcgtctcctttgagctgtttgcagacaaggtcccaaagacagcagaaaattttcgtgctctgagcactggagagaaaggatttggttataagggttcctgctttcacagaattattccagggtttatgtgtcagggtggtgacttcacacgccataatggcactggtggcaagtccatctatggggagaaatttgaagatgagaacttcatcctaaagcatacgggtcctggcatcttgtccatggcaaatgctggacccaacacaaatggttcccagtttttcatctgcactgccaagactgagtggttggatggcaagcatgtggtgtttggcaaagtgaaagaaggcatgaatattgtggaggccatggagcgctttgggtccagatgcagccagcagaggtaccatcctgactttgaactgatagttcctgttttatttaccca

SEQ ID NO: 534747 - DNA, 935 bp, Homo sapiens
  misc_feature (690)..(690): n is a, c, g, or t
ccacgcgtcgcggacgcgtgggtcgacccacgcgccgctgtttgcagacaaggtcccaaagacagcagaaaattttcgtgctctgagcactggagagaaaggatttggttataagggttcctgctttcacagaattattccagggtttatgtgtcagggtggtgacttcacacgccataatggcactggtggcaagtccatctatggggagaaatttgaagatgagaacttcatcctaaagcatacgggtcctggcatcttgtccatggcaaatgctggacccaacacaaatggttcccagtttttcatctgcactgccaagactgagtggttggatggcaagcatgtggtgtttggcaaagtgaaagaaggcatgaatattgtggaggccatggagcgctttgggtccaggaatggcaagaccagcaagaagatcaccattgctgactgtggacaactcgaataagtttgacttgtgttttatcttaaccaccagatcattccttctgtagctcaggagagcacccctccaccccatttgctcgcagtatcctagaatctttgtgctctcgctgcagttccctttgggttccatgttttccttgttccctcccatgcctagctggattgcagagttaagtttatgattatgaaataaaaactaaataacaattgaaaaaaaaaaaaaanaaaaaaaaaaaaaaactttttgggccgcgccttgaggcccctgaaaagagcttcttcttagaccccatttcgttgtgggcgccggcggcccccagttggtgttatctgtgtgaccctgtgcgcccctaggccgtgttgccccgaggaaaactgcggcgcccggaacctgggtgcttggggttttctccgccgagtttaaaaacgcccgggggggaaccccgagcgtttctcgtgcaccaattgcg

SEQ ID NO: 534748 - DNA, 1536 bp, Homo sapiens
  misc_feature (1)..(2): n is a, c, g, or t
nncaagacgcgtgggggcgcgtcgtagtatttctcgctgtcttagtcatttcgtcgggttattttctgtttatgcgcccccctgtcgtcttgtgtcgctgaggcgttgattcagctgtccctgttcgtgttgttattcttgtttcgtctgttcagcggtgctctctcttttttgttcttggtttgtgttagtctcctatcttcttgtttttgttggcctgtgtttgtggtcttttatttttcctcgaaatcgggtgttgatatgtcttctttggtttctttcgttctttctctcctggttgctcgcctatatctgttgttgatccgatttctagtcctttcgctgtgtgtccatttcgctgtttgtggggggtgcctctcttcatttgtactgcccttgtgttgtcatatgtctttgtgccttttattgttgtctttattcgttactatgttttcctggggtgttctccttttcagtgtttctgtatgattctgtctctggctccttttgctttatgtccttgtgcttttgatgttgttggtctatcttcattctggtgtattcttgtgtggtgttactgtggttcttttcctccttgtggttgtcttgggtgtgtctccttgctgtgctcctctatgggcccttgtgattgtgatgcttctgtgtttgttgctggtgtgttctagtagcgttgtaatcctatctaccttgctctttcttagtacatctcttgttctcttggtagacctgataggttgcctatcactcctcggtcggctctgtcggtctttgggtgcatccatgccgttaacttcctctgtacagttcacgtgtaggatgtacttcctggagtatgttgtgtgacttttattagtatgataggtggtcatactattggcattatgagtgtgtatagtagtctatagacttgcctatagctctctaggtatgttcaataatccttgcctgcatttaaggatctcttagattactatagtctagctgtctgtgccaaacctctaggctatactgggtgtgtagctagtttgtcctagggccttctccctatgccttggtttttgaatgagctattgtataggctacactgtggtatatatgatggcctcacagatctcatatagttactcgtcctttcccccttaccattgggcctagtgtatatatagataagccttgtcatagttattcttggtgcagggacgggtaagacctcgtcactttagtggtcaagatgcacaggatataagtcgtcccgttccctagaatttgttaattcttgatgtatagtaatctttttcatgatgttcctttatttgtggctaaacaagacattagaatggagggcaccaaggcacatattcatgttgtgaacacccagtcatgactctacagtgtgcagtagtacgcgtccatctttcattggggaagcttgaggagtgcacgtctagttacaacgtagcgggacaagagtgggtaagcacattaacctcaggcttactctcattgagtaccccc

SEQ ID NO: 534749 - DNA, 291 bp, Homo sapiens
  misc_feature (263)..(263): n is a, c, g, or t
gtgctgtgctgggtgatctaaggatccgagctctctctgtggggatctgggtcgtaagaagagctgaggccctgcaggccggggggctcttcctcgggctgacagctgtctcttctgcagctgccagtcgccgctccaggctccacacgcgtttggccaggcccagtgtcagcgcccgcagccggggggctgcctctgggcctggtacctgggagcaggtcaaaggccagggccggagggcccccacagaagagcgtcccccnacagagcagagggtcgggtcaccgagct

SEQ ID NO: 534750 - DNA, 3625 bp, Homo sapiens
  misc_feature (3513)..(3513): n is a, c, g, or t
ctgtattactcatgtgtcagatgtaccagatatcatgtttaggtattactacaaatgaaagaatgaatgccaggagatacaagcactttaaagtcacaacaacgtctattgaaagcccattcaaccatggatgtgtaagaaatattatagacttctttgaatttcgatgctgtggcctctttcgtcctgttatcgtggactggaccaggcagtatacaatagaatatgaccaaatatcaggatctgggtaccagctggtgtagcgacatcttatcctatgaagcatattgctgagtggtgcctgaaaattgtgtctgtccgtgtctttctcacactcgaatccacatcctttgaacaagagcatgctatgtgtagggctaatggtgaattttacagtctttttttcaacacttttattaacaaaagtaaacatggacagaacacactgccatttctgggaagagtaaagatgataaaaaataattttaatggttcttaatgtggaaattcacaacatactcaacttttgggttttgttctcacagtatttttcacaaaaaaagggtaaacttattctattgacagacatggtgtactgatcagaaatgttcagttttaactaaaactaaatttatgttatttggctaaatgttatgatgcagtctagtacgagtattgcatctaattccaggagcattgttttaagttgattgactagttattatgtacatttcagaatgtacacataaatactgtgatgaaaatcatgtgattgggatctactgtgatgttgtcttcaaaggcaggagaaaataatgttcacaataaaatgtgctaacaatgttttgtttctatcagctgttgcaatgctgatatatttctagttcagtgaaataatttgtagtaaccttactctgaggttttacggtctgataatgaagcacttgcatgagtatagtaagtcatgtttttttgttcaaatttaaaagccctgctaattgcatgacacaccacatagaatgtatactagcagatactatccagtgaagcataaattagaatttaatttgatgttcaaaaacagttccatttttaagggttaaggtggtattttcaagaaaaggcagaacaaataatgcaaaattctcagtaatagtgatacatggatatacttccttttaaattctcagctgcaaaataattgtagacaaaataatggcatttaactaaagatggagcatgatctgtgtacatagcacatgtgaataaaagaaaagctgacagtatattctggtttcaataaaatgacctatcagaaagtagaatttcatccccaagagtatttcagtttatccaatattgagtaagttctgaaacagttttagaaaaaattttctttttgttaaatgtgatgcactgatcaatttttgtcacagcattttcataccttcatggtggactactagtcactgcttccataaatattgtttacagggtgagatttggtttattcatcttaagtgctgtagcaaactgtggttcgagcaacctgtgggaaatctgtgagagggaatggggtgggagatgtgggggaatggtggtcagactgatgacagatcctagaccaatgtaaagaatgtgtatctgtatataaataatttatcaaatagttttctctttgtgtctgtgttagtgtttttaaagctgctcatttcattttgtccaaccaaaaagaaaagggagataactaatgagcttctagtgatgttcaaaattgctgttaataggcattataccctgcaagttcactgcatgtctgatgcttggtaaaactagtcttccctgtaaaatgcagattacaggtattaaagcaatctagtggtatacccgccccttgccttagtaagaggagcagtgaaatgtatatagttgatgttcagtatttccaagtaccatttttatatagtagcttatttgaccataagtcacacatcaaaaaaagattacccttagtgtatgtgttttaatattagaaaattggcatatgtactttatttttgaaaagggaagagatgggtgtggggtggcaatagcattgtgccattttgtcatagaatgtaaaaattggttaactttacaaatgtcagctagttttgactactaattgggggaaattttagataatttttaaattcaaagttatttataaaatgctagaatttgttttaattttttgtattttgagccacttcacatgaagactcagttgcatttttatcgaatacatttttatcaacagttaaagactatggtggttttttcagagtttggctaagaatgttgttaccatcttctttgtttgtggtacaatattttcagtgcaaaagagatgtcattcagttaaaaagacaaacctctagatgtgtaattacatggaaaatactagcaatgtgaatgcttttgtagtaaccatcttgtagtacctgtgaaatctataactcagaaatggtcagatggtcaggagccagctatgcagcagtataccatctgtttaattattttgtaggtcctgtgtgtggaaccaactataaacccagttctaaagttgtgtatgatggtgaacctttgggaatagttcttatcaacttaattggatacttttagcaaataggaacttaattctcagcactgaacatgaattacttccttggagtttttttcattcatatttttgttgtttccaggaatttatttgatattaatgggcgtaaaacagcatcattgtacttaagctatggatgtttttattttatattttctttatttataactgtgccaagtattattttgctacttaccgtgttattctgtggaaagaaaaacctgtaaagtgtttaataaattagccctccttacataaattaaatgtcaaaattttgtaaaatattaatcagaataaatactgactcttaaaaaaaaaaaactcgtgccgaattcggcacgagtttgaagatgagaacttcatcctaaagcatacgggtctcatctgcactgccaagactgagtggttggatggcaagcatgtggtgtttggcaaagtgaaagaaggcatgaatattgtggaggccatggagcgctttgggtccaggaatggcaagaccagcaagaagatcaccattgctgactgtggacaactcgaataagtttgacttgtgttttatcttaaccaccagatcattccttctgtagctcaggagagcacccctccaccccatttgctcgcagtatcctagaatctttgtgctctcgctgcagttccctttgggttccatgttttccttgttccctcccatgcctagctggattgcagagttaagtttatgattatgaaataaaaaactaaataacaaaaaaaaaacaaaaaaaaaaaaacctccggggcctttttgtcgggggggggaaaaagggttttgaaagggccatggtctatgttgttccggcccctttttgtcncaaggggaatcgcgggccccaaaggggcgataatcgaacccgtacttcttcttcttcacacgtccaacgacacagcagccccaaagagaggaaaaacaacgaaacacaccac

SEQ ID NO: 534751 - DNA, 422 bp, Homo sapiens
gtcgacaatgagatgtaagagcgtattataccatagccgcctaattaaagatatactcgcggcgagatactattgactcagtcgatgggggctacgatatgggctccagtgcgagtcataagtggatatccgtaagacgaggtatctttactataaaagctattgtgttagcaagccatataaagttgttcgctcaggagtttgatagttcctggccggtggcatgtgagtcgtacactgtttcgtgagcctagggtgtcgtgactgtgaatacctgggcggagtaggggaagggagcctactagggtgtagaataggaagtatgtgcctgcgttcaggcgttctggctggttgcctcatcgggtgatgatagccaaggtggggataagtgtggtttcgaagaagatataaaatatgattag

SEQ ID NO: 534752 - DNA, 185 bp, Homo sapiens
  misc_feature (67)..(67): n is a, c, g, or t
cttagaggaccccttaaattggcacagaaattatttgggctatgtggagcaagctgtcttgcataanaaagctatattggcgctctagagaaagtgagaatggcaaagaatttgagagatacgtgagcaccaaaaaaaaaaatcacacaacttaaacattgtgcaataaaacacgatgacagaat

SEQ ID NO: 534753 - DNA, 983 bp, Homo sapiens
  misc_feature (12)..(12): n is a, c, g, or t
  misc_feature (24)..(24): n is a, c, g, or t
  misc_feature (477)..(477): n is a, c, g, or t
  misc_feature (871)..(871): n is a, c, g, or t
tacggtaggtangaggctggggtngaatcggacgaggccgaggaaaaccgtgtactattagccatggtcaaccccaccgtgttcttcgacattgccgtcgacggcgagcccttgggccgcgtctcctttgagctgtttgcagacaaggtcccaaagacagcagaaaattttcgtgctctgagcactggagagaaaggatttggttataagggttcctgctttcacagaattattccagggtttatgtgtcagggtggtgacttcacacgccataatggcactggtggcaagtccatctatggggagaaatttgaagatgagaacttcatcctaaagcatacgggtcctggcatcttgtccatggcaaatgctggacccaacacaaatggttcccagtttttcatctgcactgccaagactgagtggttggatggcaagcatgtggtgtcggcaaacgtgaaagaggcatgaatatgngtggaggccatggagcgctttgggtccaggaatggcaagaccagcaagaagatcaccattgctgactgtggacaactcgaataagtttgacttgtgttttatcttaaccaccagatcattccttctgtagctcaggagagcacccctccaccccatttgctcgcagtatcctagaatctttgtgctctcgctgcagttccctttgggttccatgttttccttgttccctcccatgcctagctggattgcagagttaagtttatgattatgaaataaaaaactaaataacaaaaaaaaaacaaaaaaaaaaaaacctccggggcctttttgtcgggggggggaaaaagggttttgaaagggccatggtctatgttgttccggcccctttttgtcncaaggggaatcgcgggccccaaaggggcgataatcgaacccgtacttcttcttcttcacacgtccaacgacacagcagccccaaagagaggaaaaacaacgaaacacaccac

SEQ ID NO: 534754 - DNA, 958 bp, Homo sapiens
ataggtgctagaagtgccggacgtcgggaaggtctagatcaacttgaagaagtatgacggtcgaccaaccattcaaaagaaaggtatgtggacgggcttatgagccgcgtcagaccaacaagtgtctgttacgagctaccgatggagaagaacaagatcagcactgtggctgagctccataggaacgtgcactcagtctaagatggagttcttcaaacctccttagagctaaacatgcgaatgggttgaagcgaaggagagaccactcaagaccaacccactacggacgaaccaaaactcagaaggcagaaagcaagcaagcagcagcgaactgcccgggcagaaacgcaaacaagacagcaaacgacaagagtcacacaacagcgagcacagcagcaggacacgaaagagggcatacatattcgctgcgttacaccccaaatagacgacacagacatgcggatatcctcagaccttaggcacacgactagccaggttctcctgcgtgcccccaaacgcacgtgcacccacactaacgaataaacggcctcgcggcaacgaacccagctcgcaggtgtaacagaggatcagacagtgaaacgaactcagttactccgcctgccgcgccacctgaccctgcgcaagactggacactactccacatgaatcactgaagccaaaggtgcgtggcgaccaccctgagacaaaagcagcaccacttacacactgaagacacccgcacggcacaatcgtgcacgcccacccaccgaagaggccgcgaccacccaccatgcaacgccggtgccgcagaggcgccccaagcgctcggacacaacgcaagcccccacaacgcgcacagagagccaccggacacacagcgcccaccgacgccaatccccccgccacggcacagcacaagaacgccagacgggacgacggcgagaaacacgaccgcccc

SEQ ID NO: 534755 - DNA, 217 bp, Homo sapiens
acaagaggttggacttccaacccaggcatgtgtagtctatgcacattgggatgcagtctagaggtgtggctgataagctgaatgtagagatggtatctaaatagtagtaaccgcactgtctggatcccaagattactttaaaaatttcaagaagtagatgtgtgcaaattcttagggataagttaagaatgaaagttccaggcggggcgtgcagggg

SEQ ID NO: 534756 - DNA, 156 bp, Homo sapiens
ctcgattgctcggctgctccccgctggctgcagtgctgggggtgagtgcagaagccactggatgctgctggcctgtgctgcccctgctgagctcagcactgtggttggggtccaggtacgtcgcctgccctgcaggcttgtcgggctagtctgggg

SEQ ID NO: 534757 - DNA, 448 bp, Homo sapiens
aggagtttgagaccagtgtaggcaacataatgagaactctgtctccacaaaaaattacaaaaaaattacccaggcatggtggcacaggcctgtactctcagccactcaggatgctaagctgggaggattgcttgactgcagctggttgaggctgcagtgagcagagatcatgccaatgctctctagcctggttcacagagactgaccctctctgggggggaaagaaaaaattagaaaacaactgtcatgctgggcgcagtggctcacgcctgtaatcccagcactttgggaggccaaggtgggtggatcacctgaggttgggatttgagaccagcctgaccaacatggagaaaccccatctctaacaaaaaatacaaaattagccaggcatggtggcgcatgcctataatcccaggtacttggaccctaaggcaggagaaccacaatg

SEQ ID NO: 534758 - DNA, 388 bp, Homo sapiens
cccttcgcgcctgtactccttgctgttccgcagaacttccacctttgccctcaccatcgcagtgggcgccctgttcttcgagcgagccttcgatcagggcgcagacgcgatctacgagcacatcaacgaggggaaactgtggaaacatataaagcacaagtatgagaacaaggagtaacaccctgcccctgtgggacccgaaggaacagtcgccggtcagctgtttgcctggagttggggcctcagcctaaggatgagtttcaagttgccgttcaccgaccgccagtgtgtgggcaagctatggctccactgtacaaacagactcacttctgctgtgtttgagtacagctgtcagcaaataaatgcaaagtgctcatgccaaaaaaaa

SEQ ID NO: 534759 - DNA, 731 bp, Homo sapiens
gctccgggaagatggcggccgtgcaggcggcgaggtgaaagtggatggcagcgagccgaaactgagacaagaagtggtggtaatcattagttccagggtgctctgccatgttgacgcaagcgtgctgtaaggcttgttgaacgggggtccctgcgcagaaacctcctgggcatgagtggggtcgacagggaactgcgactgggtcacacgttgcgtccgtttcacgaggccgccctcacgaagggacaaggtcattttctgatcaacagaagtgagctgataggaggcgcctgcaacaagcgtgagaagaaagttagccagagaaggaggccacacagaaagagctcagttgagaaacagctaagacgcaagccttctgcatgtctgccaagcaaacacaccgagctgatagatggtgtgggtcctgaggaagagaggcgtgggaacccaggatcaagtactacggaagatccgttggatcatgcaagttcatctagggctagacatgtgctcccctgggggaagcacccacaatactggccaccacaagattgccatgtcaagaaatctgcactctactgacttttatgccaaaaattttagtcacctgacatatctggggatcacctgcattgtaaatctccttaaaggtgggcaggtaggcatccatgacccgaaagaagtcttctgggggaaagctccctcttctatgaagtcttcgatgatagggg

SEQ ID NO: 534760 - DNA, 274 bp, Homo sapiens
  misc_feature (33)..(33): n is a, c, g, or t
  misc_feature (139)..(139): n is a, c, g, or t
  misc_feature (180)..(180): n is a, c, g, or t
  misc_feature (196)..(196): n is a, c, g, or t
  misc_feature (218)..(218): n is a, c, g, or t
  misc_feature (234)..(234): n is a, c, g, or t
  misc_feature (249)..(249): n is a, c, g, or t
caggaacaaaaggttaagaacttcccagttcanaacatgaccaccattggggcccccgagctctctctctctcccttgattaagtgggccccattaatccccagtccaaactcccaaaacaaacctctaaccccaaccncataggtaaacatttaaatgaattagatgttcccattaaanggcatagaccccctgnaaaatgtagaagtgtccagtgnacatgaatttttaatnaaccaaaagggcaanaaagaagagatctaaaaaaaaaaaa

SEQ ID NO: 534761 - DNA, 574 bp, Homo sapiens
  misc_feature (1)..(1): n is a, c, g, or t
  misc_feature (66)..(66): n is a, c, g, or t
  misc_feature (102)..(102): n is a, c, g, or t
  misc_feature (120)..(120): n is a, c, g, or t
  misc_feature (194)..(194): n is a, c, g, or t
  misc_feature (208)..(208): n is a, c, g, or t
  misc_feature (257)..(257): n is a, c, g, or t
  misc_feature (262)..(263): n is a, c, g, or t
  misc_feature (277)..(277): n is a, c, g, or t
  misc_feature (316)..(316): n is a, c, g, or t
  misc_feature (320)..(320): n is a, c, g, or t
  misc_feature (325)..(325): n is a, c, g, or t
  misc_feature (368)..(368): n is a, c, g, or t
  misc_feature (574)..(574): n is a, c, g, or t
nattcaaaaagatatcaaaatactaagaaagccagcgaaaacggccacctaccaacagcgcaacanaacagagatacctgggaaagggaagtttaaatgaanggtagcattaactgttcncctacatatataagcaaaaaccctcctgaccacacatgatcataaccaactataacccaagcctttatacttangtccctatcaaccngaggctaaccacccaacagttccaggcaattccctacctgagcttcttntcaanntatccttctcccanagaaagcagctgcttatggggcctggagatgagcccccnctgnccccnccggccctccttgccaagccattcctgggtgagttcaggcctncgggagccacacattcatctccacctggacacttgagccgcatggccagacccctccacctgatgcggtggtgcgtgtgatttgtcaaaagaaagccttctggatgctgttaagatgtacccttctaggtgaacctggtatcagacccacagtacttgctgtttgagaaaaaataaaaacaaaaaggtcacctgttctccagcccn

SEQ ID NO: 534762 - DNA, 739 bp, Homo sapiens
  misc_feature (489)..(489): n is a, c, g, or t
acgtatcattctaatccatcaggaaaatgagctgaatggcccagctatcatccaagttgacacattctaagaggaagtaaaaacatttcttatcacttagattgttttccaaggctaagtgctacaatttgctggagctgcagaggatcgctgagtggggtactgtgtctcatagacatgcgccactccatgtgagaacaatgggtgaaggtgagggaagccccatcagccttgggtcttttcgctgtgcctcctatgtatgtctggttggcgtgggaagcagtgattaatgacgatcttaacatattattaaaaatagagcaattgtaagatcgctattatacacttatccagatcgtgtagtctggtgcaactaaacacaggggtaggacctttacatttgcactagcaggagatactatgcagtactaagttgattacatttttccaactatacaaagaatagaaagacgcagttcctagtgtgtnacttcccttgtaggaacccgagtcgttgaattccggtaaacagaagagttggctcattctatatctcaattaatttgataagacaccccaaacagagaaaggtcagaattgggtttgggtttcacttatatgtctaagggcctacacatttatggaaacgttcccaaattggacaggtatggcgattacggggttagttatcaaccgcgtggttgctagaccccttggttcgcccttcaatttttcgccg

SEQ ID NO: 534763 - DNA, 364 bp, Homo sapiens
cgatatttgagggcatgctgccaatgcaacccgcacatactactggggttgtctgtccacctctaacatgtctaagcctggcacagataacggagctgttgctttgacactcagatatgccatgctattccccctcctgtgataccagctcttatgtgtgagacctcacagtggtacccaatatgatggggctcgtgttgcatacattctagttcacgctaagtctcttgcctacagagactacgtgcgtatgatagcacgtctaaggcactcttacagcccagatagctcatgtgactcgtgtgaacgagcttgttccgcttgggcaccaccaccggaccgaacggttcctggcgtcacgtgc

SEQ ID NO: 534764 - DNA, 481 bp, Homo sapiens
ctcctattttagacttccaatttcttgataacctgttttattactccaggcagatgtcagctacatagccctaaatttgcatattaaagggccaactcttgtgaaaaatcagatagtgaaatttatatctcaaggtacagagagaaagagtctggtggtactacagggagattaaaaatggatgccaagtcaaacataaaattacagaaatctatcatagaattgtataaggaaaccaattttatttagataggtagttctaaatttagtctctgtcttttaactggatctgtgaactctgggcagagcccacactgaatcctgggtctccaaaaagagaactagtatggggctagaccacgtgacgctttcatagtgcactttttttcaaacaaagacatttctctaagtgtctaaactactctctttcttactttaaacaccccagagtaatctctgctacaaataaaaaaatagtcca

SEQ ID NO: 534765 - DNA, 104 bp, Homo sapiens
taagacaggacagaatctaggtcttcctgatgtcccacatacacacgtcctatccatttctaggcatctaaagtagtagagatctatctacatatttgcagtct

SEQ ID NO: 534766 - DNA, 407 bp, Homo sapiens
  misc_feature (348)..(348): n is a, c, g, or t
  misc_feature (383)..(383): n is a, c, g, or t
  misc_feature (407)..(407): n is a, c, g, or t
aaagacctgtaggaaattctaagatgaatcagatagattgtacatcctttatgaaaagctaagacaagttcataagcacctgtactttgccatagaatgggttcagggtctcagaagaagaagccaatatttcttgtcggagaaatcagagaaggcttccttgcaaaggaggcatttcatgagttgtttttactggattcaggactactgatacaaatttgggaagtggttatgggagtagatgaactttttgcaaagaaagttgaggttgctgactccatttgtattctccagggtggacctattcttagtgttgcacacaaacatgttttcattaagggaaatgcnttaagattcttctctgttcagggcatgtgcccacngggattctttctcacacatacatn

SEQ ID NO: 534767 - DNA, 380 bp, Homo sapiens
cctcctacattttatatcaagtatcaaaataggtacatggtaataaaatcaaagagtagacctctggcatagccctgatgtagagttagttgaaacggtcccagcgaaaaacagggaggacaccttgtgctgtgggaccacttatggcataggatagtgtactgagcatgctacgctaaatatacaaacaacataagaacgataaactaccaaccaaacaaaaacacaaaataacagctcgacaccccgaacccccacaaaccaaccaaaaaaaactcagagggttatcatattactatacgagattcattctaacacctagcccctctaccactgaaaaaaataacacgcaataatctacaacaaaaactcctcatctt

SEQ ID NO: 534768 - DNA, 375 bp, Homo sapiens
aaaaaaaccagggggtttttttagggggaatttttttcccgcccccccgggttttccttttttgttgggtgggggggtttaccaaaggccccagtggccccccctttgggaaggcccccctgggggggttttttaagggccgggccattttgccccccccctgggggaaggttttttaagggggaaatggttttttttggccggggccccccatgggccgccggttccctggttgggaagggaaaggttggaacccctttggttatatggtttttttcccttggtttgggttttaaaatttttttccctttccccggcccaaattccccggttttggttttggggatttttgggtttttaattttcctttcccta

SEQ ID NO: 534769 - DNA, 348 bp, Homo sapiens
ccgtgtggacaacgtgtcagcagagagagtctctgatacacagaccatgatgaacccataaggagtggagatcaatacgcgaaggatgtgtggacaggctgcagagacatgacgtgccgatagtgtccgagcatcacgtgtggctccagcccttgtatctgccagtgtagacacctctgtactgacccactgtcctggggtcgctcttgggaggcacaggcatgggtgtgtctggcctcaattctgtatcagtccagtgtgttcctgtcatagtaagtgtctcccaggcaggccatggtaggggcctcgcaggggccatagaggagcacagggtcaggctactcagag

SEQ ID NO: 534770 - DNA, 547 bp, Homo sapiens
gatccccgaggtctcaagaggggtgtcttcagagcccccaggctatctggaaattcagctccagtgagaaggatcttatactctgccgagtttatcaatttcctggtcttgagacctcttccgggacttgtgagtagtatccagctggtagttcgaagtgagtcttaatgccccgtgataccatagtcttgtgatccactcctgggggtcgttcgctcccacagaatgacatagaagagactgatggaagctcgtcagatcatgcgagaaccataccccacgtggtacagctcttccctcctagggtccgtccgcttctgttgtgcggaatgctgtgtggtgtccatctgaatcccctgcatacgactgctggctggtgtgctctcccccctttcccttaatcatggtggcccgtgccttcatgggtagatgtgggagcccgtgtggaggcgttcccccatgtttatgctgccctattctagggggtcattctccttgggtcaagctctttgtctctgtcggagctgttgtggcccttttggctttg

SEQ ID NO: 534771 - DNA, 683 bp, Homo sapiens
  misc_feature (6)..(6): n is a, c, g, or t
  misc_feature (142)..(142): n is a, c, g, or t
  misc_feature (158)..(158): n is a, c, g, or t
  misc_feature (213)..(213): n is a, c, g, or t
  misc_feature (230)..(230): n is a, c, g, or t
  misc_feature (239)..(241): n is a, c, g, or t
  misc_feature (243)..(243): n is a, c, g, or t
  misc_feature (272)..(274): n is a, c, g, or t
  misc_feature (288)..(288): n is a, c, g, or t
  misc_feature (313)..(313): n is a, c, g, or t
  misc_feature (322)..(323): n is a, c, g, or t
  misc_feature (339)..(339): n is a, c, g, or t
  misc_feature (367)..(367): n is a, c, g, or t
  misc_feature (374)..(374): n is a, c, g, or t
  misc_feature (388)..(388): n is a, c, g, or t
  misc_feature (410)..(410): n is a, c, g, or t
  misc_feature (428)..(428): n is a, c, g, or t
  misc_feature (498)..(498): n is a, c, g, or t
  misc_feature (539)..(539): n is a, c, g, or t
  misc_feature (568)..(568): n is a, c, g, or t
  misc_feature (571)..(571): n is a, c, g, or t
  misc_feature (585)..(585): n is a, c, g, or t
  misc_feature (594)..(594): n is a, c, g, or t
  misc_feature (605)..(605): n is a, c, g, or t
  misc_feature (613)..(613): n is a, c, g, or t
  misc_feature (618)..(618): n is a, c, g, or t
  misc_feature (641)..(641): n is a, c, g, or t
ttttcntttcactaccaggtaattttcaaccaataagaaaaaggaaccaacactcagctctgtagaaatctaccttcttttagaaacctcaggcctctgcacccctttagacaactcatttacaaccacaaccttccatggnttctcacatgccagcnagggcagggtaaaaacggcaatttcttacaccgaaaggtcctttttatgtaacanacagacctccccaaacnacaactgtnnngngctattgatgactcgcatgggatcaaatnnntagtgtcccctgantgccccgacaggtctaggacaacanaggttaaannggacagcagggtcgtncaactcccacactgcctcaggtgttttntcaaagnacgacaattctgcnatggggagttacacgtgggaangggtcagactgtgcaggnaccctcagtgctctgcgactaccggctcaatagcttgagctcagaggatcaagtgaagtgtctgtgtcanttttaatctagcacacaagagggacaactgagggggtacanggtattggggcatgcgacaggtcattggnaanagaactgagttagnttaagggtncattaaataantctttgtngttgngtagaaatcacaaaacagttggngaggacaggtctgtaggctcagctttacatccaggtttttat

SEQ ID NO: 534772 - DNA, 318 bp, Homo sapiens
gcacttacaggtgaaaatggtttgttagagagcaaataaataatgcattttagatcattagggagcgggggtgaacaaatgttagacgtgcgtttaagaagttgttgtcagtgaaaaagtcaggctatttgatgagagataattgataagttcaaggaggattttaaatacaaataaagtgtttttcatgtgtttcattgagatgatttgaggtatcagggccaccagaagacaacagagtgggttttggtgagtttctttttctctaggtttaattgaacagtttttttttttttttttaatagggttaacgaacct

SEQ ID NO: 534773 - DNA, 414 bp, Homo sapiens
  misc_feature (162)..(162): n is a, c, g, or t
  misc_feature (295)..(295): n is a, c, g, or t
agtttccacgagttacccctttttagaggtcttttctcccccccggggggggttggggtccccccggataaagggtggggccccttggaccttgtggagtgcccggttttttttccccccggtttgtgggtttccccctgtcgggaaatttttgggtgggtnaaaaaatttttctcagggtcaaaggggcctccccccttgcgagggtgcaaaaaaaattaggggcctttcttgggtttttttcccccttgggggaaagggaagggggacacccaccctttcctttcccccccgnccccaggggccttaatccttttttttttttccccgttttttttaatttaacaaaaagggccctttattccgggcggggatttgggggaaaaaagcctttttaaaactggggttttccca

SEQ ID NO: 534774 - DNA, 102 bp, Homo sapiens
caggcgtgagcacttgggccctgcctgtatttttaatcagccacaaatccagcaacaagctgaggattcacctcataaaacaggcttggtgtcttggtgatc

SEQ ID NO: 534775 - DNA, 402 bp, Homo sapiens
ttcgcactgtgggctcagagacggcttcagttccagtgctctacgtagtgagctcagaagctttcagcttgaagggggggttctcacgtatagactgcttaggaagccagagggtcaggcagaaggcagggctccagcattgcagggcggagggctcactcagctcaacactgcccagctctgagtgaggccagagagttatggcctcccttgcctgtgggtccggggcacaacctagggaccatcctcagagcccccacacctgctgctcacagccagaatgtaggacccgcttagctgctctcagaagagtcctgttcagcaagccgtttaaactcactcctcccataccacccaggccatcgcctcttccattccctgagctacacttgatagttgtaa

SEQ ID NO: 534776 - DNA, 188 bp, Homo sapiens
gacatttcaaaatcaaccttgcttacccactgtgacagggacaaaaaaaaaaaaaaaaaagggcaccctttttcgtgggaaaatccaaaggggtaccttttcaaattttcccccctcaattggaaaggttccagggatctttcaaggcccaaaccttaagttccaccgccctttggaacccccccaag

SEQ ID NO: 534777 - DNA, 143 bp, Homo sapiens
acccaccccacattatattaacccctatttcacccaacaattgggcgaagtcctttttcccccccgggggggggggccccccccctgggagaaaacacctcggcccgcctcggcctctatatacccccccatcatgaacacaa

SEQ ID NO: 534778 - DNA, 155 bp, Homo sapiens
atttggggaaaaaaggagaaatttaaaaaacttttgtctttttaaattcaaaaacggccaatttaaacggttttttttttatcccatcaagctcaaaaattttgaatgtctcattattattattcaaaattaaaagtttcccagcttacccttta

SEQ ID NO: 534779 - DNA, 616 bp, Homo sapiens
  misc_feature (387)..(387): n is a, c, g, or t
  misc_feature (496)..(496): n is a, c, g, or t
  misc_feature (545)..(545): n is a, c, g, or t
tgtggtggctcacacctgcaatttcggcaccttgggaggtgaacgtgagaggatcacttgagcccaggagtttgagaccagcctgggcaacatagtgagaccccatttctacaaaagaaaggtgggaggattgcttaatttcaggagttcaatgctgcagtgcgttatgattgtaccactgcactgcagcctgggcaacgaagcaattctaaaacgagaaaaattttaaaatatatacaacaaacaaattatatattgattgtgtatgttatcagtgaggcttccagtcaacagtaggctactaataattaagctctgagggagtcagttatatgcaggttttttgactgtgtggggagttgacaccccaacccccacactgtacangagtcaactatatacattcaggaatcccaatgaagtccaggtgtggtggctcatgcctgtaatcccagcactctgggaggccaaggcaagcagatcacttgaggtcggnagctcaagaccagcctgggcaacatgggacaatcccatgtccactacanatacaatagcccggcgtggtaatgcacacccgtaatcccagccactaggaaggctgaggcatgagtcctcg

SEQ ID NO: 534780 - DNA, 851 bp, Homo sapiens
  misc_feature (12)..(12): n is a, c, g, or t
  misc_feature (24)..(24): n is a, c, g, or t
  misc_feature (477)..(477): n is a, c, g, or t
tacggtaggtangaggctggggtngaatcggacgaggccgaggaaaaccgtgtactattagccatggtcaaccccaccgtgttcttcgacattgccgtcgacggcgagcccttgggccgcgtctcctttgagctgtttgcagacaaggtcccaaagacagcagaaaattttcgtgctctgagcactggagagaaaggatttggttataagggttcctgctttcacagaattattccagggtttatgtgtcagggtggtgacttcacacgccataatggcactggtggcaagtccatctatggggagaaatttgaagatgagaacttcatcctaaagcatacgggtcctggcatcttgtccatggcaaatgctggacccaacacaaatggttcccagtttttcatctgcactgccaagactgagtggttggatggcaagcatgtggtgtcggcaaacgtgaaagaggcatgaatatgngtggaggccatggagcgctttgggtccaggaatggcaagaccagcaagaagatcaccattgctgactgtggacaactcgaataagtttgacttgtgttttatcttaaccaccagatcattccttctgtagctcaggagagcacccctccaccccatttgctcgcaatgagccccagctatgagccgccccacgagccacacaatgcgccggctcgtggtgggaagattacttggggccaggagttcaagaccaggctgggcaacataacgagaccccatttctacaaaaatttaaacaaacttagccaggcatgatggcacttgcctgtagtcctagctacttgggaggctgagataggatggatcccaaacgg

SEQ ID NO: 534781 - DNA, 193 bp, Homo sapiens
gtgtatggtcgtcgtacttaaaaggagggcccaggcactttctgtatgaacccctgtcatgatcacagtgtcagagcacgcgtcctctttctatggggaagttgaggagtgcccttcaaagccagtagcaggcaggggtgggtaggcaccctccttcctgtatttatctaactacaattgctaacctgcacaa

SEQ ID NO: 534782 - DNA, 716 bp, Homo sapiens
  misc_feature (12)..(12): n is a, c, g, or t
  misc_feature (24)..(24): n is a, c, g, or t
  misc_feature (477)..(477): n is a, c, g, or t
tacggtaggtangaggctggggtngaatcggacgaggccgaggaaaaccgtgtactattagccatggtcaaccccaccgtgttcttcgacattgccgtcgacggcgagcccttgggccgcgtctcctttgagctgtttgcagacaaggtcccaaagacagcagaaaattttcgtgctctgagcactggagagaaaggatttggttataagggttcctgctttcacagaattattccagggtttatgtgtcagggtggtgacttcacacgccataatggcactggtggcaagtccatctatggggagaaatttgaagatgagaacttcatcctaaagcatacgggtcctggcatcttgtccatggcaaatgctggacccaacacaaatggttcccagtttttcatctgcactgccaagactgagtggttggatggcaagcatgtggtgtcggcaaacgtgaaagaggcatgaatatgngtggaggccatggagcgctttgggtccaggaatggcaagaccagcaagaagatcaccattgctgactgtggacaactcgaataagtttgacttgtgttttatcttaaccaccagatcattccttctgtagctcaggagagcacccctccaccccatttgctcgcagcgccaccccacgagccccacaaagagccacgcgaggagccccacaatgcgcccccaacgagccacactatgag

SEQ ID NO: 534783 - DNA, 2617 bp, Homo sapiens
aagcagtctcaagcctgccgcagggagaagatggcggtcgccgtgagaactttgcaggaacagctggaaaaggccaaagagagtcttaagaacgtggatgagaacattcgcaagctcaccgggcgggacccgaatgatgtgaggcccatccaagccagattgctggccctttctggtcctggtggaggtagaggacgtggtagtttattgctgaggcgtggattctcagatagtggaggacccccagccaaacagagagaccttgaaggggcagtcagtaggctgggcggggagcgtcggaccagaagagaatcacgccaggaaagcgacccggaggatgatgatgttaaaaagccagcattgcagtcttcagttgtagctacctccaaagagcgcacacgtagagaccttatccaggatcaaaatatggatgaaaagggaaagcaaaggaaccgacgaatatttggcttattgatgggcactcttcagaaatttaaacaagaatccactgttgctactgaaaggcaaaacaggcgccaggaaattgaacaaaaacttgaagtgcaggcggaagaagaaagaaagcaggttgaaaatgaaaggagagaactgtttgaagagaggcgtgctaaacagacagaactgcggcttttagaacagaaggttgagcttgcgcagctgcaagaagaatggaatgaacataatgccaaaataattaaatatataagaactaagacaaagccccatttgttttatattcccggaagaatgtgtccagctacccaaaaactaatagaagagtcacagagaaaaatgaacgctttatttgatggtagacgcatcgaatttgcagaacaaataaataaaatggaggctaggcctagaagacaatcaatgaaggaaaaagagcatcaggtggtgcgtaatgaagaacacaaggcggaacaagaagagggtaaggtggctcagcgagaggaagagttggtggagacaggtaaccagcacaatgatgttgaaatagaggaagcaggagaggaagaggaaaaggaaatagggattgttcatagtgatgcagagaaagagcaggaggaggaggaacaaaaacaggaaatggaggttaagatggaggaggaaactgaggtaagggaaagtgagaagcagcaggatagtcagcctgaagaagttatggatgtgctagagatggttgagaatgtcaaacatgtaattgctgaccaggaggtaatggaaactaatcgagttgaaagtgtagaaccttcagaaaatgaagctagcaaagaattggaaccagaaatggaatttgaaattgagccagataaagaatgtaaatccctttctcctgggaaagagaatgtcagtgctttagacatggaaaaggagtctgacgaaaaagaagaaaaagaatctgagccccaacctgagcctgtggctcaacctcaggctcagtctcagccccagctccagcttcaatcccagtccgagccacagcctcagctacaacctgagcctgctcaacctcagcttcagtctcagccccagcttcagcttcaatcccagtgccatgcagtactccagtcccatcctccctctcaacctgaggatttgtcattagctgttttacagccaacaccccaagttactcaggagcatgggcattttctacctgagaggaaggattttcctgtagagtctgtaaaactgactgaggtaccagtagacccagtcttgacagtacatccagagagcgagagcgaaaccaatactaggagcaggagtagaggtcgaactagaaatagaaccaccaagagtagaagtcgaagcagtagcagtagcagttctagtagcagttcaaccagtagcagcagtggaagtagttccagcagtggaagtagtagcagtcgcagtagttccagtagcagctccagtacaagtggcagcagcagcagagatagcagcagcagcactagtagtagtagtgagagtagaagtcggagtaggggccggggacataatagagatagaaagcacagaaggagcgtggatcggaagagaagggatacttcaggactagaaagaagtcacaaatcttcaaaaggtggtagtagtagagatacaaaaggatcaaaggataagaattcccggtccgacagaaagaggtctatatcagagagtagtcgatcaggcaaaagatcttcaagaagtgaaagagaccgaaaatcagacaggaaagacaaaaggcgttaatggaagaagccaggctttcttagccattctttgcagcagaagatttcttgatgaaaaaggattacctttccttgtaaagaggatgctgccttaagaattgcatgttgtaaaaaatctttttggaagatacagactgtttgtttaccagacattcttgtactttttgcataattttgtaagagttatttatcaaaattatgtgaggttccaaaatatgtaaaaatgataataataaaaaaagattaacatcccttgtcatcttttttaaatatcctatactcttcagtaagaatctgtatattttaataggcaaatctttaagtctgttcccttcaattctgtatcatacattgct

SEQ ID NO: 534784 - DNA, 970 bp, Homo sapiens
  misc_feature (9)..(10): n is a, c, g, or t
  misc_feature (464)..(464): n is a, c, g, or t
  misc_feature (858)..(858): n is a, c, g, or t
ggttttttnntttggcagacgccaccgcggaaaaccgtgtactattagccatggtcaaccccaccgtgttcttcgacattgccgtcgacggcgagcccttgggccgcgtctcctttgagctgtttgcagacaaggtcccaaagacagcagaaaattttcgtgctctgagcactggagagaaaggatttggttataagggttcctgctttcacagaattattccagggtttatgtgtcagggtggtgacttcacacgccataatggcactggtggcaagtccatctatggggagaaatttgaagatgagaacttcatcctaaagcatacgggtcctggcatcttgtccatggcaaatgctggacccaacacaaatggttcccagtttttcatctgcactgccaagactgagtggttggatggcaagcatgtggtgtcggcaaacgtgaaagaggcatgaatatgngtggaggccatggagcgctttgggtccaggaatggcaagaccagcaagaagatcaccattgctgactgtggacaactcgaataagtttgacttgtgttttatcttaaccaccagatcattccttctgtagctcaggagagcacccctccaccccatttgctcgcagtatcctagaatctttgtgctctcgctgcagttccctttgggttccatgttttccttgttccctcccatgcctagctggattgcagagttaagtttatgattatgaaataaaaaactaaataacaaaaaaaaaacaaaaaaaaaaaaacctccggggcctttttgtcgggggggggaaaaagggttttgaaagggccatggtctatgttgttccggcccctttttgtcncaaggggaatcgcgggccccaaaggggcgataatcgaacccgtacttcttcttcttcacacgtccaacgacacagcagccccaaagagaggaaaaacaacgaaacacaccac

SEQ ID NO: 534785 - DNA, 951 bp, Homo sapiens
tagtgtgtgccgcggcggcggcgggcatcgtatcgggcggattgacgggcgcctccaccttgctccctccctgtgcttgccggcttcctttttgtctttcttgggcggctgatgagctgcaggttttctttgcgcagcaagctgcggggcgcaacggaggccctgagcttgctagtacactcctacacctgtgacactacgggacagcgacatttgatcaccacggaggcaggaccagagaccacctgtggggacccccagacgtgagatgacatccgcactgatcggtggacagaccagaaaacatatagaaggagcaacagggagaacagcccctgggacaggaaaccagagggtaccaattgacatacatcgtgaatgccacaaaggaggagcgagacaaaatggtggatcataaagatggggcacccccaacgtattcaaatgtgaacacagcctcaggataaaaaaaaccaaactatacaccacctttgtagaaaaggagagatcatgtactataggatatccccacaacaactagatagcacagcagtttccagtacaagaggaacagccataagccctgaacacttttgaggattacctcatcctctaaggagatatgtcatataggactgttcacggtgccacgtggatgctgttaccctagatgagtgacccagtgacacacacaaatcaatgtggagctagggcatcgagaaacgcgcacaaagtgcaacgaagtcagatacgttatcacaaacattagtctccgttttgtgtatggtgtgtgccacacccgcatagaatacgaatgtgttgttgaccttatatggatgcaccaggattggacaacaaaccaccctatgtgaacgcggaagtggtgagtaatcgatacaggacgacaaacgcagggggagaggatgttgtcgacacagcgtgggacaaccc

SEQ ID NO: 534786 - DNA, 241 bp, Homo sapiens
ggttttaacttttccccttggggggggggggggcaccggctccgggacccccccccagtgggggggttccaggggaagcggttttttgggggtttttttggggccccgccccggctcctgggccccccccccccggggggggggggggaaatcagggttcgggggcccgtttttcccggggggcccccccgggaaagaaatttttgtttgaaacaaaaggggggggggtttttttttttta

SEQ ID NO: 534787 - DNA, 645 bp, Homo sapiens
  misc_feature (45)..(45): n is a, c, g, or t
  misc_feature (56)..(56): n is a, c, g, or t
  misc_feature (533)..(533): n is a, c, g, or t
agataaaacacaagtcaaacttattcgagttgtccacagtcagcnatggtgatctncttgcttcatctgcactgccaagactgagtggttggatggcaagcatgtggtgtttggcaaagtgaaagaaggcatgaatattgtggaggccatggagcgctttgggtccaggaatggcaagaccagcaagaagatcaccattgctgactgtggacaactcgaataagtttgacttgtgttttatcttaaccaccagatcattccttctgtagctcaggagagcacccctccaccccatttgctcgcagtatcctagaatctttgtgctctcgctgcagttccctttgggttccatgttttccttgttccctcccatgcctagctggattgcagagttaagtttatgattatgaaataaaaaactaaataacaaaaaaaaaacaaaaaaaaaaaaacctccggggcctttttgtcgggggggggaaaaagggttttgaaagggccatggtctatgttgttccggcccctttttgtcncaaggggaatcgcgggccccaaaggggcgataatcgaacccgtacttcttcttcttcacacgtccaacgacacagcagccccaaagagaggaaaaacaacgaaacacaccac

SEQ ID NO: 534788 - DNA, 771 bp, Homo sapiens
  misc_feature (12)..(12): n is a, c, g, or t
  misc_feature (24)..(24): n is a, c, g, or t
  misc_feature (502)..(502): n is a, c, g, or t
tacggtaggtangaggctggggtngaatcggacgaggccgaggaaaaccgtgtactattagccatggtcaaccccaccgtgttcttcgacattgccgtcgacggcgagcccttgggccgcgtctcctttgagctgtttgcagacaaggtcccaaagacagcagaaaattttcgtgctctgagcactggagagaaaggatttggttataagggttcctgctttcacagaattattccagggtttatgtgtcagggtggtgacttcacacgccataatggcactggtggcaagtccatctatggggagaaatttgaagatgagaacttcatcctaaagcatacgggtcctggcatcttgtccatggcaaatgctggacccaacacaaatggttcccagttttgtttcatcctgtcagctgccaaggacttgacgtggtctggatggcaatgcactgtggtgttttggcaaagtgaaatgaaaggcaatgaactattgtatatgngtggaggccatggagcgctttgggtccaggaatggcaagaccagcaagaagatcaccattgctgactgtggacaactcgaataagtttgacttgtgttttatcttaaccaccagatcattccttctgtagctcaggagagcacccctccaccccatttgctcgcagtatcctagaatctttgtgctctcgctgcagttccctttgggttccatgttttccttctgtagctcaggagagcacccctccaccccattgctcgcttaactga

SEQ ID NO: 534789 - DNA, 463 bp, Homo sapiens
  misc_feature (12)..(12): n is a, c, g, or t
  misc_feature (24)..(24): n is a, c, g, or t
tacggtaggtangaggctggggtngaatcggacgaggccgaggaaaaccgtgtactattagccatggtcaaccccaccgtgttcttcgacattgccgtcgacggcgagcccttgggccgcgtctcctttgagctgtttgcagacaaggtcccaaagacagcagaaaattttcgtgctctgagcactggagagaaaggatttggttataagggttcctgctttcacagaattattccagggtttatgtgtcagggtggtgacttcacacgccataatggcactggtggcaagtccatctatggggagaaatttgaagatgagaacttcatcctaaagcatacgggtcctggcatcttgtccatggcaaatgctggacccaacacaaatggttcccagttttgtcatgcctgctgtcactgtgccatacacaacatgcatgcaagactaccactcacctcttgaa

SEQ ID NO: 534790 - DNA, 575 bp, Homo sapiens
  misc_feature (463)..(463): n is a, c, g, or t
gctctagcaggatctcgaggttgtggcaggcatgtggtgtttggcaaagtgaaagaaggcatgaatattgtggaggccatggagcgctttgggtccaggaatggcaagaccagcaagaagatcaccattgctgactgtggacaactcgaataagtttgacttgtgttttatcttaaccaccagatcattccttctgtagctcaggagagcacccctccaccccatttgctcgcagtatcctagaatctttgtgctctcgctgcagttccctttgggttccatgttttccttgttccctcccatgcctagctggattgcagagttaagtttatgattatgaaataaaaaactaaataacaaaaaaaaaacaaaaaaaaaaaaacctccggggcctttttgtcgggggggggaaaaagggttttgaaagggccatggtctatgttgttccggcccctttttgtcncaaggggaatcgcgggccccaaaggggcgataatcgaacccgtacttcttcttcttcacacgtccaacgacacagcagccccaaagagaggaaaaacaacgaaacacaccac

SEQ ID NO: 534791 - DNA, 1127 bp, Homo sapiens
  misc_feature (92)..(92): n is a, c, g, or t
  misc_feature (512)..(512): n is a, c, g, or t
  misc_feature (1015)..(1015): n is a, c, g, or t
cacacttattcgacgtgtcacagtcaggaatggcagaccagcaagaagatcagccatagctgacggtggacaactcggaataagtttgactngtgttttatcttaagccaccagatcattccttctgtagctcaggagagcacccctccaccccatttgctcgcagtatcctagaatctttgtgctctcgctgcagttccctttgggttccatgttttttttgttatttagtttttatttcataatcataaacccgccgaggaaaaccgtgtactattagccatggtcaaccccaccgtgttcttcgacattgccgtcgacggcgagcccttgggccgcgtctcctttgaggtaaggggcctggataccaagaagtgactgctcatctaatcccataaagctcatgttaaccagcatctgcgcacggtaggtaagcaatttttctcgatggtacacagtgactaaaagaacagctgtttacccctgatcgtgcagcacgtgctttgccgtgntttcccctttaagcacaattctcttctggcccttcatgctgtttgcagacaaggtcccaaagacagcaggcatgtggtgtttggcaaagtgaaagaaggcatgaatattgtggaggccatggagcgctttgggtccaggaatggcaagaccagcaagaagatcaccattgctgactgtggacaactcgaataagtttgacttgtgttttatcttaaccaccagatcattccttctgtagctcaggagagcacccctccaccccatttgctcgcagtatcctagaatctttgtgctctcgctgcagttccctttgggttccatgttttccttgttccctcccatgcctagctggattgcagagttaagtttatgattatgaaataaaaaactaaataacaaaaaaaaaacaaaaaaaaaaaaacctccggggcctttttgtcgggggggggaaaaagggttttgaaagggccatggtctatgttgttccggcccctttttgtcncaaggggaatcgcgggccccaaaggggcgataatcgaacccgtacttcttcttcttcacacgtccaacgacacagcagccccaaagagaggaaaaacaacgaaacacaccac

SEQ ID NO: 534792 - DNA, 692 bp, Homo sapiens
  misc_feature (42)..(42): n is a, c, g, or t
  misc_feature (48)..(48): n is a, c, g, or t
  misc_feature (444)..(444): n is a, c, g, or t
  misc_feature (450)..(450): n is a, c, g, or t
  misc_feature (453)..(453): n is a, c, g, or t
  misc_feature (469)..(469): n is a, c, g, or t
  misc_feature (532)..(532): n is a, c, g, or t
gaggcattgaggcagccagcgcaggggctttctgctgagggnggcagngccggagcttggaggaaaaaccggcgaggataagttttgtttcctcttgtgggacacagatcaggagatttaaatacagacgttacctcttcaaaaaattattaggtcccaaaattaaggggcctttaactaagggattatgtggcgttaggcgggtttacacgttttttaaaccggctaaacttcttctaaaaattataaggccttttaaaaggaattctcttaaaacggcagcacaaaactctattggcaacaggcacctttagcacacgcaggtcagccaatggaggcacacggccaacacaggcatcacacacaaggggttctttcctttaaaaaaaaaacaaatttggaacggggggcaaggggttctgggcaaggcactcggaaacggcntttccnttnttccaatggggcaagntaacaaaaaacagtggtcatcttcacaacacgacacaattgcgcagacgcaaacagggacttnaacagaaaggccccccccgaaaaatataattaaacccaaatttaaggaaaaggggggccaaatgtgagctatattaaggattctcaaaaacattggagaaagggctgaaacctttaaaacaagggcttttaaaaaggttttaagctttttaaaaaagtta

SEQ ID NO: 534793 - DNA, 1329 bp, Homo sapiens
  misc_feature (12)..(12): n is a, c, g, or t
  misc_feature (24)..(24): n is a, c, g, or t
  misc_feature (1329)..(1329): n is a, c, g, or t
tacggtaggtangaggctggggtngaatcggacgaggccgaggaaaaccgtgtactattagccatggtcaaccccaccgtgttcttcgacattgccgtcgacggcgagcccttgggccgcgtctcctttgagctgtttgcagacaaggtcccaaagacagcagaaaattttcgtgctctgagcactggagagaaaggatttggttataagggttcctgctttcacagaattattccagggtttatgtgtcagggtggtgacttcacacgccataatggcactggtggcaagtccatctatggggagaaatttgaagatgagaacttcatcctaaagcatacgggtctcatctgcactgccaagactgagtggttggatggcaagcatgtggtgtttggcaaagtgaaagaaggcatgaatattgtggaggccatggagcgctttgggtccaggaatggcaagaccagcaagaagatcaccattgctgactgtggacaactcgaataagtttgacttgtgttttatcttaaccaccagatcattccttctgtagctcaggagagcacccctccaccccatttgctcgcagtatcctagaatctttgtgctctcgctgcagttccctttgggttccatgttttccttgttccctcccatgcctagctggattgcagagttaagtttatgattatgaaataaaaactaaataacaaaaaaaaaaaaaaaaaaaaaaaaaaaaaaaaaaaaaaaaaaaaaaaaaaaaaaaaaaaaaaaaaaaaaaaaaaaaaaaaaaaaaaaagagaggggggggcgcgccgcacaaaaattctctcccccggggggcgcccccattggcgcgccgcgccccccctttttttgaacagaaggggcgcccccaaaagagaaggaggcaagcttattatgagcacagacgaagcgaagcgcggcgccccggcactattaaacaacagacgcacgaggagcggggaaataacagcctgcggcctcagcgggagcacaacattggggagggagaagcgaccccctaagacgggcggggggggcggagcagaacaacatgatggggccaaacacatcctcctctctgcgcgggtgttttttttgacgacccctccagaggagcggacataatattaaacacctttcaagcagggcttagtataaccgcggggggtacaacacaccacgcgggcaaatataaatgctgcgcggcgcggctcgggaaaaatttttcgctggccgcacggaggagcataatactttcaggaacaaaaattttttcccacgaggggacggcgtcgaagtagn

SEQ ID NO: 534794 - DNA, 2973 bp, Homo sapiens
ctgtattactcatgtgtcagatgtaccagatatcatgtttaggtattactacaaatgaaagaatgaatgccaggagatacaagcactttaaagtcacaacaacgtctattgaaagcccattcaaccatggatgtgtaagaaatattatagacttctttgaatttcgatgctgtggcctctttcgtcctgttatcgtggactggaccaggcagtatacaatagaatatgaccaaatatcaggatctgggtaccagctggtgtagcgacatcttatcctatgaagcatattgctgagtggtgcctgaaaattgtgtctgtccgtgtctttctcacactcgaatccacatcctttgaacaagagcatgctatgtgtagggctaatggtgaattttacagtctttttttcaacacttttattaacaaaagtaaacatggacagaacacactgccatttctgggaagagtaaagatgataaaaaataattttaatggttcttaatgtggaaattcacaacatactcaacttttgggttttgttctcacagtatttttcacaaaaaaagggtaaacttattctattgacagacatggtgtactgatcagaaatgttcagttttaactaaaactaaatttatgttatttggctaaatgttatgatgcagtctagtacgagtattgcatctaattccaggagcattgttttaagttgattgactagttattatgtacatttcagaatgtacacataaatactgtgatgaaaatcatgtgattgggatctactgtgatgttgtcttcaaaggcaggagaaaataatgttcacaataaaatgtgctaacaatgttttgtttctatcagctgttgcaatgctgatatatttctagttcagtgaaataatttgtagtaaccttactctgaggttttacggtctgataatgaagcacttgcatgagtatagtaagtcatgtttttttgttcaaatttaaaagccctgctaattgcatgacacaccacatagaatgtatactagcagatactatccagtgaagcataaattagaatttaatttgatgttcaaaaacagttccatttttaagggttaaggtggtattttcaagaaaaggcagaacaaataatgcaaaattctcagtaatagtgatacatggatatacttccttttaaattctcagctgcaaaataattgtagacaaaataatggcatttaactaaagatggagcatgatctgtgtacatagcacatgtgaataaaagaaaagctgacagtatattctggtttcaataaaatgacctatcagaaagtagaatttcatccccaagagtatttcagtttatccaatattgagtaagttctgaaacagttttagaaaaaattttctttttgttaaatgtgatgcactgatcaatttttgtcacagcattttcataccttcatggtggactactagtcactgcttccataaatattgtttacagggtgagatttggtttattcatcttaagtgctgtagcaaactgtggttcgagcaacctgtgggaaatctgtgagagggaatggggtgggagatgtgggggaatggtggtcagactgatgacagatcctagaccaatgtaaagaatgtgtatctgtatataaataatttatcaaatagttttctctttgtgtctgtgttagtgtttttaaagctgctcatttcattttgtccaaccaaaaagaaaagggagataactaatgagcttctagtgatgttcaaaattgctgttaataggcattataccctgcaagttcactgcatgtctgatgcttggtaaaactagtcttccctgtaaaatgcagattacaggtattaaagcaatctagtggtatacccgccccttgccttagtaagaggagcagtgaaatgtatatagttgatgttcagtatttccaagtaccatttttatatagtagcttatttgaccataagtcacacatcaaaaaaagattacccttagtgtatgtgttttaatattagaaaattggcatatgtactttatttttgaaaagggaagagatgggtgtggggtggcaatagcattgtgccattttgtcatagaatgtaaaaattggttaactttacaaatgtcagctagttttgactactaattgggggaaattttagataatttttaaattcaaagttatttataaaatgctagaatttgttttaattttttgtattttgagccacttcacatgaagactcagttgcatttttatcgaatacatttttatcaacagttaaagactatggtggttttttcagagtttggctaagaatgttgttaccatcttctttgtttgtggtacaatattttcagtgcaaaagagatgtcattcagttaaaaagacaaacctctagatgtgtaattacatggaaaatactagcaatgtgaatgcttttgtagtaaccatcttgtagtacctgtgaaatctataactcagaaatggtcagatggtcaggagccagctatgcagcagtataccatctgtttaattattttgtaggtcctgtgtgtggaaccaactataaacccagttctaaagttgtgtatgatggtgaacctttgggaatagttcttatcaacttaattggatacttttagcaaataggaacttaattctcagcactgaacatgaattacttccttggagtttttttcattcatatttttgttgtttccaggaatttatttgatattaatgggcgtaaaacagcatcattgtacttaagctatggatgtttttattttatattttctttatttataactgtgccaagtattattttgctacttaccgtgttattctgtggaaagaaaaacctgtaaagtgtttaataaattagccctccttacataaattaaatgtcaaaattttgtaaaatattaatcagaataaatactgactcttaa

SEQ ID NO: 534795 - DNA, 1291 bp, Homo sapiens
gcaagtttcagactccgactaactacgctggggactccgaggctgctcagaaaaatgaagcctgaccctggccctgcacccgagtggactgctccaatgatgggcgtgagtgttgcatgtggatgtgtgcccctgccacacattctgctgtgtaactgcaatgccatgtgctctgtgtgctgtgaatgtggctgtgcctgtgatgcctgactcaaatgtgcttgtgcctcctgtgtgcatgtggtgcatgctgacggtgatgctgatgtgtgtgtgaagcatctcctgcatgtgcctgtgatgtcccctgtgatggatgtgccataactttgtgatgcacgtggcctttccaatgtggtcactggatggagactgcctgtgtgcaaatgaccttcttaatgtgatcgctcgtttcctgtgtgctctgcaaatgtgcatgtgctgtcgctccctgaaaccgtgcttgctgaaccccaatgccaaggaacaggatgcctgtgtggctgtgtgtgcctgtgtggcctgtgggtgcctggtgtgtgcctgagctctgtccgaatctttctggcctgagtggctcggcgaagtcgcccccaatcgctcctgtcctggggtgtccgtccatgcccctgtgtggcctgactcctggaacacatggcctgatgctggactcctgtgaaagcatgcccgacgaagggacccctgtgaacgctgtgttgctgctcccggtcacccatgtggcatgttgctgggaattcctgcctgttttgccgctcgatgggcgcactgggctgtgcacgctcgccgcccgtgttgtgctccgccggaccgaacctgatgcagctgtgtcgtgctgttgtcgcgcccgtgtgggcttgcatctcgtgatgggacctccccgtgtccccactgtgccctcgtgggccgcacttgtgtcgacgggcccggacgatcaacggggttggcacgttccaaggaccggcgcctttcacgactgagcttgagagctatggccattgcgcgcctcccatggctgcacgccaagcaccgggggtcaggccccgagttggtaacagctggccgctgtctgcgccccgcagaggtgcaacaccgcgacatcgagcccgcgcacatggccctccaaggtccttgtgtgtcccctgcgacgacccgtccccccccgggcacgctgtcccccaggcagggccacggttggccctcgcagaggacgggcacaatcctccgcaaagggcttcccacctcgccgctgtgaacacgccaattccgggca

SEQ ID NO: 534796 - DNA, 890 bp, Homo sapiens
gtttttcttcttagaaaaaggtggcgaggtgcagtgactcacgcctgtaatgccagcactttgggaggccaaggcacgtggattgcttgagcccaggaatttgagaccagcctgggaaacatggtgaaacctcctctctgcaaaagtacaaaagttagccaggtgtggtggagtacacctgtagtcccagctacttgggaggctgaggtgggaggatcacttgagcctgggaggttgaggctgcagtgagcggtgattaagccattgtactccagcctggacaacagagcgagaccctgccttaaaaaaaaaaaaaaggatccaattaccgggaacacactggaacactgagtgtatttctcaaagcgtgaacatacgcgggtccaaacgtaaaccagtcacccattctggtgaaagcctaaggaatgtccaaatccctgtaaatctgaactacatcactcaactcccgggaagacacagggctctggcccctgtggcccaggctgggacgtgcaagcgggtacaggctccggctcactgggaacctccaatgggtcccaagcagattctttccgggcctaaggcctccctgagtacgcgggggcattcacagggtacaccaccaaagcaagggcccaggactaaaattagggggacgatacaggggctacgaacgacaccaagcggggtttgggccaggggttgggcccagggggccgcacggagataggcgcctaagagagagcccggagagacctcaagacgggggatcccgggcctggccctcgcgacaacgctcgcgaaagaaggagcaggggaagaagtcaccacaggtgatgtagaggcagcacacacgggccccgaagcctcacggcaagtgtgcgccgaga

SEQ ID NO: 534797 - DNA, 173 bp, Homo sapiens
ggcaaactgattatgatcagtgtctagaagtatttgccaatttctatgaaactgtgaacgtaaagaaaggcctgtgagtcataagtacaggagaggaaattaactgcaatatttactgtgcagattctgattcactactgttttgggacaaagcctggttgcttgttccgctg

SEQ ID NO: 534798 - DNA, 383 bp, Homo sapiens
ctgaagcagttttaaaatttcccctcccctttgcagagcggtggggtttttgataaggggccttatttgcggcccactttaacatttgaatttggtattagaaattggagcagcatatcccataccctttttgcagtttttgctgtgtactttgcccctgaaaaaaagtgattcccccaagcttatcccttgctccaagtttagaaatcaggggagaagaattattgaaaagtgtgacccaataatttttgtaaaactttttctccccaattttttgtgatttccccaaacagggcaaaattcctgtgatttgatgtgaaatgaaagcccagcccagtgctgagtgatgagatttgaacggggaataaaatatgcttgaatta

SEQ ID NO: 534799 - DNA, 193 bp, Homo sapiens
ttgttttggaaattttaagtttaggcttattaaaagaatcccccctctcaaaaggggtccgggttagaggattaatttaaagtccccccatttaaatccctcatttttttggcattatttaaaggttttttatttgaaatcccccattcatttttttaacagcgggaaaattaaaaattttcatgatttggga

SEQ ID NO: 534800 - DNA, 206 bp, Homo sapiens
  misc_feature (40)..(40): n is a, c, g, or t
ctcggacccgcctcgtgagactggatcatgttattacacnctttttcaaataaaagtagtacaacagcaggagtgaaagccagtgtaagctatgcactttggatgataatgacgaatccatgtagttcatccttagcaacaaatctatcactctggtgtagaattttgatggtgcaggaggctgtgagtatagagtctcacggaga

SEQ ID NO: 534801 - DNA, 148 bp, Homo sapiens
  misc_feature (50)..(50): n is a, c, g, or t
  misc_feature (89)..(89): n is a, c, g, or t
cttttgaaatttaagccttttttttttaaaaaacaagggtaatagacatntaaaattcccctcctcataaagcttttaaaatggtttcnttggatataggccttaagaaatccctataaaatgccaataaagtttctccaatttgtga

SEQ ID NO: 534802 - DNA, 361 bp, Homo sapiens
aaccacagtggcctcaaagaactcaaatgaaaggaagacttgcaagtctctcactttaagtccagagctagaaatgattaagcttagtgaagatgcagaattttcatagctagagagaagtcaacgcttggcttcaaaacttcaaaggatgggctgactctctttgaggagcactgcagctggtgactttaagttacagccagtgctcattgaccactctgaaaatctcagggcccttaagaattatgcaaaatctattctttctgtgctctagaaatggaacatcactgtctgggtgacagcacatctgttaatagcatggtttactgaatattttaatcccactattgagaactgctca

SEQ ID NO: 534803 - DNA, 162 bp, Homo sapiens
ccccaaggacgggactggggaatttccggggttttcaaaccccaaggttttttttttggggtttttaattttcgaaactgggggcaaaaaaaggggcaaaaaggggcccctttttttatgaaagggggttttggaaccccaaaaattttggttttaaaccca

SEQ ID NO: 534804 - DNA, 536 bp, Homo sapiens
aacgaatgtacccttgtgcatgctgacctcagcgagtataacatgttgtggcatgctgggaaggtctggttgattgacgtcagtcagtcggtagagccaacccatcctcatggcctggagttcttattccgtgactgtaggaatgtttcacagttcttccagaaaggaggagtaacggaagccctcaatgaacgggagctgttcaatgctgtttctggcctgaacatctcggcagacaatgaagctgatttcttagctgagatagaagctttggagaagatgaatgaagatcacattcagaagaacgggaggaaagcagcctcgtttctgaaagatgatggaagcccacctgtgctgtctgccgactagtacagcggtgacggacggcagctgccatagccagcgagtggaggtgacctgacataccaaagcaggagtggacagtgctgcttctgggcttctcacttgtgacccacgtgccagatgtgtgcaatttttaactcggcattgaaagaataaaatgtcactacctctca

SEQ ID NO: 534805 - DNA, 430 bp, Homo sapiens
  misc_feature (93)..(93): n is a, c, g, or t
gtggaagccaagtctattttatgatgatatgatgacatcttctctctggtatcagctaagcaacccaaacaaaagccgtctgccaggcgcacntgaacaagatttgacacaagtgtccacatctttatgatccctgaatgccttggagccagtagagcacacagggatccacatgtaccctgcagcaccattgtgaagtaagtgataatgttgtatatgctgatggtcttaactggattacaaaaagcaaatactagaacagctagctcatcgttcacccaatgtacttggtatttttctgcactggtttaatcatgcttaatactacaaaacaaaaataaatatttcacagtggttggtttgttttgtttttaaaccacagtttgatttagttagccttgctggggccataatatgcttcagggtgtgt

SEQ ID NO: 534806 - DNA, 402 bp, Homo sapiens
actacaataaatttaaaaggcatctgcatcaccccccaaaaaaatcacatacccattagcagtcactgcccatttactcccaacccttggcagctactattctactttctggtccatatatttgcctattctggacattccatataaatggaaccacacaatatgtggtctcttgtgactggtttctttcatttaggaagtttgaaaggttcatttatatggtagcataatttaatagttctttttttattaccaaataatattccattggtatggatatgccacacttttttatccattcatcagtggataaacattgggtttgtttccattttttggttattatgaataatgctactagcaacattcatttacaacttatgtgcacaactggtcgagatt

SEQ ID NO: 534807 - DNA, 230 bp, Homo sapiens
  misc_feature (44)..(44): n is a, c, g, or t
ccccgggttttttaaaaaaaaaaaaaaaaaaaaaaaaggggggntttttccccctttttttgccggggaaaggggtatttccctttggggggttagggaaattttcctttgggggcctttttaaaaaaagtttttaaaggggggttttttttttaaacccccccccggccccccttttttttaatttggggggccccccccgggggggttaaagtttttttcccccccca

SEQ ID NO: 534808 - DNA, 269 bp, Homo sapiens
  misc_feature (2)..(2): n is a, c, g, or t
  misc_feature (5)..(5): n is a, c, g, or t
anggntgcatgcactccagcctgggcaacaagagtgaaactcagtctcaaaaagaaagaaagaagagaaagaaagctctgcaggtcagctgtaagtaaatgccaggcacggtgtgctcacaccttgtcatcccacgcgctattgggaggctgatggcagcagggcgtgatcactatgacgtccgaggagtttcaccgaccaggcctagggcaacgtaggcaacaacgcctgtactctaacaacaaaatacaaaaatatagccaggtagt

SEQ ID NO: 534809 - DNA, 384 bp, Homo sapiens
acggttagtccttaacaccgtgtgttaaaccggctgtctggtgcggaatctgggatgagagagccttgcctcggctgcaatgactcgaaagctgccgctctcgctccaaccggcgccgctcgggccacccgcagcttcctggcagtcggctcttctttcctcccatccgtcccccgtttctggaccgcagactacgctcctgttccagcccacctactcgtcttctgccccatctgctacccgtctctgaaccaattcgtccccgtcactaccccgtcttgggcatgccctgccgagctcttcctgcctgaatcttcataagatctgcatctgccgcctcatgtccgttggggccccaattccatacgtcctccctatcgtagg

SEQ ID NO: 534810 - DNA, 319 bp, Homo sapiens
aagaacctcatgatgtaagaaattttgactatactgctcgaagctaggacctcgagaatctcccaaacaatttctgcatgatttggtcaggaagaatctacccaagagtccaaatccttcctgtgaaaaagttccagtaggtagatactcgaaatgtagggttagggtaatcaagtctgaagatgatcttctgtagtatgcctacaatcttaacagaagatggcatcaagctcagacctaggagctacttagcccttaccgttagttaaggcagcagttcatcagatacttcatcctatccgatgttgctgatggactc

SEQ ID NO: 534811 - DNA, 1607 bp, Homo sapiens
  misc_feature (587)..(587): n is a, c, g, or t
gtgctattgtaagtcccgactgcattggatttgcaagttatggtacgataaagatgtacttgtaacgaactcccgttagatcatcaccgctagccacagggaaacaatgtataagcttggggacagagatgccttttttcatcattgcctggacgagtaacacatctgagacgcacctcattggtgtgcgcaagtagtatgttatcatcgccttgagctctcacgcttgcgctagcactaatttagtcccatactcgcatctcttggcgcaagagcacttcgcacgcgtcatcacgagagagaggacgagtcctagtggatatttgcaatcaagtcagagaataacctagaaaaaatagaaagtaggagatgaccagagacatgtccacaatcaaccatgctcgtgacatataaggggttggtcaattatagttcgatttatggaagaatgaacctcgacgatcgagtcgttcgcatatacaagtcatagggttatatcagcgtgtgttgccttagagcagtgtgacaccattgcgccagggaagacatcctttatgtaaacagcactcttacctcagtgtgtgtcntgaatgtcggctcgcaaatttcacactagtcgtcggtgtgacaaaatttcgtcgcggggcgctcgcacctttttattgacaagttgggggcacacggatcgaatggtcgcttatcacaaaggcgcgcaattgtgcgcaccaaatgtttatatacacaccacttatatttccccgtggtggccttcgcgctgaggtaaggacctttctttgcggaataatcgaacgtactttcgtggaggacgcatttttgtgtcccctccaaatccatgacctccatataggagacgaattatcctaaccatattggtctcaccgttaaaccttaaaacaaccgttttttccccattccccgttttgggaaggagggggcacaccatatgaaccagacattggagacacccagccgtttatatcccttgcgttgggaagcctacatttaatgtattaaccttttttgctggcacaaatttggagcgggaaggccccacctgtattacatgatcccgaaaaatacacttttgacccggacagttttccctaggaagcccttggatttgctaacgcgaaagatagactcatatcaatctcaccgttgtaaaggcccttatccaaagttcggtttaaccaacattagggggaacttccgcggcgggttacaacgcgcaacctcttcttttttttctcccaatatgctgggcggacattttagcggtgggggcaacaaacatggcaaatatcagatagggttatattattaatccactcggtaccattagacggcataacacaagcggtattggctccctcttccgctgtatttcaaaaggccctaatatgagatacatacggttagggaggcagcactggaaacccaaacccgctattcatgatggcacttccattacaccccctcttgcgatatggttacccaatgcaaacaacaggtcctcgatggcagccacgcgcaaatatctttcattcatgcataaggagcgacactcaacaaagtctttcgggtca

SEQ ID NO: 534812 - DNA, 425 bp, Homo sapiens
tacctcttacctgtaacctaccttatcatgtggcttttaattggcagtcactcgccatttctaagcagatatagtactacctctcagaactcacattggcaagtgtacaaagatgacttaaggtgaagtgacggacaaacatcacacttctgcatactcaccctattttctttctccctttaaggtgctaaacttgcacctcatgtccactcagtaacaagtattgggacgtagagcacagcctcactcagctctgaaaggtaatacaccctgtgaggaagtgagccagcagtgcgccctctgcactctgctcggatcttaagctctgctctcagcagatcccagctgtaaccacttcttaactgtactgaaggtgtgtcctcaagaagaaagtgttcaaattaaaaactctgctgccaagtaaa

SEQ ID NO: 534813 - DNA, 3137 bp, Homo sapiens
  misc_feature (3070)..(3070): n is a, c, g, or t
  misc_feature (3076)..(3076): n is a, c, g, or t
  misc_feature (3092)..(3093): n is a, c, g, or t
  misc_feature (3130)..(3130): n is a, c, g, or t
ctgtattactcatgtgtcagatgtaccagatatcatgtttaggtattactacaaatgaaagaatgaatgccaggagatacaagcactttaaagtcacaacaacgtctattgaaagcccattcaaccatggatgtgtaagaaatattatagacttctttgaatttcgatgctgtggcctctttcgtcctgttatcgtggactggaccaggcagtatacaatagaatatgaccaaatatcaggatctgggtaccagctggtgtagcgacatcttatcctatgaagcatattgctgagtggtgcctgaaaattgtgtctgtccgtgtctttctcacactcgaatccacatcctttgaacaagagcatgctatgtgtagggctaatggtgaattttacagtctttttttcaacacttttattaacaaaagtaaacatggacagaacacactgccatttctgggaagagtaaagatgataaaaaataattttaatggttcttaatgtggaaattcacaacatactcaacttttgggttttgttctcacagtatttttcacaaaaaaagggtaaacttattctattgacagacatggtgtactgatcagaaatgttcagttttaactaaaactaaatttatgttatttggctaaatgttatgatgcagtctagtacgagtattgcatctaattccaggagcattgttttaagttgattgactagttattatgtacatttcagaatgtacacataaatactgtgatgaaaatcatgtgattgggatctactgtgatgttgtcttcaaaggcaggagaaaataatgttcacaataaaatgtgctaacaatgttttgtttctatcagctgttgcaatgctgatatatttctagttcagtgaaataatttgtagtaaccttactctgaggttttacggtctgataatgaagcacttgcatgagtatagtaagtcatgtttttttgttcaaatttaaaagccctgctaattgcatgacacaccacatagaatgtatactagcagatactatccagtgaagcataaattagaatttaatttgatgttcaaaaacagttccatttttaagggttaaggtggtattttcaagaaaaggcagaacaaataatgcaaaattctcagtaatagtgatacatggatatacttccttttaaattctcagctgcaaaataattgtagacaaaataatggcatttaactaaagatggagcatgatctgtgtacatagcacatgtgaataaaagaaaagctgacagtatattctggtttcaataaaatgacctatcagaaagtagaatttcatccccaagagtatttcagtttatccaatattgagtaagttctgaaacagttttagaaaaaattttctttttgttaaatgtgatgcactgatcaatttttgtcacagcattttcataccttcatggtggactactagtcactgcttccataaatattgtttacagggtgagatttggtttattcatcttaagtgctgtagcaaactgtggttcgagcaacctgtgggaaatctgtgagagggaatggggtgggagatgtgggggaatggtggtcagactgatgacagatcctagaccaatgtaaagaatgtgtatctgtatataaataatttatcaaatagttttctctttgtgtctgtgttagtgtttttaaagctgctcatttcattttgtccaaccaaaaagaaaagggagataactaatgagcttctagtgatgttcaaaattgctgttaataggcattataccctgcaagttcactgcatgtctgatgcttggtaaaactagtcttccctgtaaaatgcagattacaggtattaaagcaatctagtggtatacccgccccttgccttagtaagaggagcagtgaaatgtatatagttgatgttcagtatttccaagtaccatttttatatagtagcttatttgaccataagtcacacatcaaaaaaagattacccttagtgtatgtgttttaatattagaaaattggcatatgtactttatttttgaaaagggaagagatgggtgtggggtggcaatagcattgtgccattttgtcatagaatgtaaaaattggttaactttacaaatgtcagctagttttgactactaattgggggaaattttagataatttttaaattcaaagttatttataaaatgctagaatttgttttaattttttgtattttgagccacttcacatgaagactcagttgcatttttatcgaatacatttttatcaacagttaaagactatggtggttttttcagagtttggctaagaatgttgttaccatcttctttgtttgtggtacaatattttcagtgcaaaagagatgtcattcagttaaaaagacaaacctctagatgtgtaattacatggaaaatactagcaatgtgaatgcttttgtagtaaccatcttgtagtacctgtgaaatctataactcagaaatggtcagatggtcaggagccagctatgcagcagtataccatctgtttaattattttgtaggtcctgtgtgtggaaccaactataaacccagttctaaagttgtgtatgatggtgaacctttgggaatagttcttatcaacttaattggatacttttagcaaataggaacttaattctcagcactgaacatgaattacttccttggagtttttttcattcatatttttgttgtttccaggaatttatttgatattaatgggcgtaaaacagcatcattgtacttaagctatggatgtttttattttatattttctttatttataactgtgccaagtattattttgctacttaccgtgttattctgtggaaagaaaaacctgtaaagtgtttaataaattagccctccttacataaattaaatgtcaaaattttgtaaaatattaatcagaataaatactgactcttaagtgtgtgcttatgatttcactcaatttacttcaggaaattgatgaaatgatagtggtacctatgatatgaaaagattatacatttatatcctggttnactagnagtcaagtggcataannctgtaggaatttggaaaaataaaagatggtgttagtnttctaaa

SEQ ID NO: 534814 - DNA, 282 bp, Homo sapiens
  misc_feature (87)..(87): n is a, c, g, or t
ggggggcccccccccccggtaaaaacagttccaaataaattttttggttcaaggccccgaaaggaaggaagacggtggggccccctnaagtttaattttgggttttccttaaaaaaaatttgctttccttgtttttttttttaaagggaaaggttcaaaaaccatttgggttttttgccccttccccccggattgtaaaacaaattttttttttaaaaccccggggggcagggtcataaggggggagggttttccggggttttttaaaaacccctttggtta

SEQ ID NO: 534815 - DNA, 1328 bp, Homo sapiens
  misc_feature (92)..(92): n is a, c, g, or t
  misc_feature (1328)..(1328): n is a, c, g, or t
cacacttattcgacgtgtcacagtcaggaatggcagaccagcaagaagatcagccatagctgacggtggacaactcggaataagtttgactngtgttttatcttaagccaccagatcattccttctgtagctcaggagagcacccctccaccccatttgctcgcagtatcctagaatctttgtgctctcgctgcagttccctttgggttccatgttttttttgttatttagtttttatttcataatcataaacccgccgaggaaaaccgtgtactattagccatggtcaaccccaccgtgttcttcgacattgccgtcgacggcgagcccttgggccgcgtctcctttgagctgtttgcagacaaggtcccaaagacagcaggcatgtggtgtttggcaaagtgaaagaaggcatgaatattgtggaggccatggagcgctttgggtccaggaatggcaagaccagcaagaagatcaccattgctgactgtggacaactcgaataagtttgacttgtgttttatcttaaccaccagatcattccttctgtagctcaggagagcacccctccaccccatttgctcgcagtatcctagaatctttgtgctctcgctgcagttccctttgggttccatgttttccttgttccctcccatgcctagctggattgcagagttaagtttatgattatgaaataaaaactaaataacaaaaaaaaaaaaaaaaaaaaaaaaaaaaaaaaaaaaaaaaaaaaaaaaaaaaaaaaaaaaaaaaaaaaaaaaaaaaaaaaaaaaaaaagagaggggggggcgcgccgcacaaaaattctctcccccggggggcgcccccattggcgcgccgcgccccccctttttttgaacagaaggggcgcccccaaaagagaaggaggcaagcttattatgagcacagacgaagcgaagcgcggcgccccggcactattaaacaacagacgcacgaggagcggggaaataacagcctgcggcctcagcgggagcacaacattggggagggagaagcgaccccctaagacgggcggggggggcggagcagaacaacatgatggggccaaacacatcctcctctctgcgcgggtgttttttttgacgacccctccagaggagcggacataatattaaacacctttcaagcagggcttagtataaccgcggggggtacaacacaccacgcgggcaaatataaatgctgcgcggcgcggctcgggaaaaatttttcgctggccgcacggaggagcataatactttcaggaacaaaaattttttcccacgaggggacggcgtcgaagtagn

SEQ ID NO: 534816 - DNA, 132 bp, Homo sapiens
cacgagggtcacactaacatccatctcctggtaactacatacagtctgagggatgccccagttgactctgttgcttaccatgcccggaatgggcctccagttcctccagagccacatccaaatgttcaggaa

SEQ ID NO: 534817 - DNA, 492 bp, Homo sapiens
gcttccctttgagggtaacccgacctttctctctggctgcccttaacattttttccttcatctcaactttggtgaatctgacaattatgtgtcttggagttgctcttcttgaggagtatctttgtggcgttctctgtatttcctgaatctgaacattggcctgccttgctagattggggaagttctcctggataatatcctgcagagtgttttccaacttggttccattctccccatcactttcaggtacaccaatcagacgtagatttggtcttttcacatagtcccatatttcttggaggctttgctcatttctttttattctttttttctctaaacttcccttctcgcttcatttcattcatttcatcttccattgctgataccctatcttccagttgatcgcatcggcatcctgaggatactgcattcttcacgtagttctcagagggggggccacggtacaacaattacacaccttatagatgagtc

SEQ ID NO: 534818 - DNA, 404 bp, Homo sapiens
aaaggagcccttttttttttttaaagtttttagtgaaacgcgtataagttttgcaggggcgaattaaaaaagcccattcccctttttttgtacattcaaaacctgaacacccatgtgaaaagggggcccttttttgaaagatgtgaaaccacagtttttttgtaaaaaaaaaaaaaaatctacccgtataggcatatatttatattttgtgttaaggggaaaggggcacatcacagtttgtgaaaaagggatcgccccctttgaaaggaacaaaacgttttcagctgatgtccggggaggtttaaattttgtagagtgttcccccccccgccccgttttgtccctttcacccccctgtttgcccgggcagtagtgggtgcccaaaaaacccctttccctgttta

SEQ ID NO: 534819 - DNA, 865 bp, Homo sapiens
gccgacggacggagcgcccccgcccccgtgcctggactggcgaccgactgccgcgatgcgccttctcagcaagcagtcagctaacgcgactgaagctgcacatcccctggcgaggacgagttccccgacctgaggcgcccacaacaagccagcatggccaaaggtgctgacccccagagactgtactgctgtgagcatgcgcgccaagtgaggcactgcctgaggacggcgttcagcagctaggagcatgagctgtcaagtccaggacatgtgctgtgtgacaagccctgggccaaccctgtacgagtcattagagcacatgtagagagccttgcagattggcctgtgagcgactgagagagaccgtccatagcgggagagtagttgttcaatcgtgagttctcattcagagcacaccaagtacagtcaggaagtgaagccaggccagccgtgactgtggctaaccaaaagcgccgcaggacagaatagaagacaacccagacgagacacctgaatccatcaagagtcaccctagaagcaacaccccagtagcgagaggggacaggagcaggaacaggaagccccattgagaaacccacacgacatacgttagccgggtagccattagaccggccaatccagagcaggagggattaggcggaccaacactagggaggccctaggcaaaggcacagtttcaccaggattaggcacttttcattgacgacttcacccaccacaactaggccaaccattggccacgcaccacggacctgctgttggacaggcctgcccctaagtgacacaagtctagaacagaaaatgcttcggctagtagttgcacaacgagcccccattgtacccc

SEQ ID NO: 534820 - DNA, 198 bp, Homo sapiens
cctctcagcaagagctgagagcagcagcctattagaggattgctgcaagaggaactctcgattctccgcccctggggctcattgctcaggtaaagatggtaaagcctgttgctagtcaagtattgagggtcttgggcgtttttcaataatcttcaaggcttaggaggtaaaggtttaaggaaggattcctaaatggga

SEQ ID NO: 534821 - DNA, 351 bp, Homo sapiens
  misc_feature (2)..(2): n is a, c, g, or t
  misc_feature (66)..(66): n is a, c, g, or t
  misc_feature (107)..(107): n is a, c, g, or t
  misc_feature (110)..(110): n is a, c, g, or t
  misc_feature (127)..(127): n is a, c, g, or t
  misc_feature (132)..(132): n is a, c, g, or t
  misc_feature (147)..(147): n is a, c, g, or t
  misc_feature (153)..(153): n is a, c, g, or t
  misc_feature (169)..(169): n is a, c, g, or t
  misc_feature (199)..(199): n is a, c, g, or t
angtcaatcttaactgacagatctcttctttcttactgggcgagtatttgtaaaataagaaaaacnggaggaaaagagaacaaacaagagagatgtgggatgacggngtnggggaaggagtcacggngaggngagacaatgtctgtngctgtnccctcagcgtctgggngaagagcccaagccctcccattgaactgangcgggaggaaagggccctcctgcggcctaccgcaaggaaacgatcgccgggcagacccgggactagcgccaaaggggcttggaagggcggcgttaagaaaaatgggccgtacctacaacttctttcggcagccctcgctgggcccggggagc

SEQ ID NO: 534822 - DNA, 775 bp, Homo sapiens
gacactctaaagataatgtgcactacactagttttcgtagaactattcatgtgtaggcactcaccttgagaagtaggatttttttttttacttaacgctttggtctcttaaagtattattatatatagttaactgtaaaaacattgagatatattaaaaatattataggacaggtaatacatattcatggtagcaagtgaaataatacaaaggtttatgaataaaaagttactactctcctaggtagccaatgttaccagtcttgcatatccttctgctgctttttctctgctcatacaaacatgaacttactcatgcatacacataggtgtttcaaagttttattctgaatacatcacgaacacaaagtggtataattacatatatcaatgtaatatataaacatgttataaatatgaatataaatgtaaaatgaaccctatttaaacatcactaagcctaagacacagaacattaccaatgagcctgaatattctcatgcgtggccacatctcttttctattccccgtcatagaaatcactccatcccaaattttacgttatttcttttctttacttgggtgcttataatttttaactatgctttactctttggctattaactgtatgtatcatgaattcatggttaagcttctatattttacataagtagtataatttggggattggtatttcattgagttccatattggtagataaatcggtagatgaatttgcagaaatggacttatatcatacgaaagcaaaaatatat

SEQ ID NO: 534823 - DNA, 713 bp, Homo sapiens
tcgcctttaagaaggttttcagggattatacctcaggtatttctgagggtcctatggtctaataggagaaatatcttcccgagctcagaattaaaagttctcctaaattatgaagatcccaaatcttatgtaaataaccttaggcatgagtccttagggagaagttaaggaccatggttaaagggcttttttagaaaaggtggtgctgtatgttctggattggacataaatgaatagacttgggcaaggggaggaaataagttaaaaggcagttaacaagagcctattccctataaggggtataattttcacacagtactcaaagctggttatcttttctgaccattttagtacagaattacgtactggggggttactaacatcaatctggtgactattctagaactaggcgccttagtgtgtttagggggccactttcttctgattgtcagatgcttgcagacctggtactccaaaggcaggccaacagcaggggcgcggggataactgaagcggcgcatggagaggacatccccctcagaggtggggacaaggtgcctctagggcagcggggggaatactattgctcgaaaccggggattttgacttgtgtcaaccagctcttggtggccctatctgttgttgtgtcaatgcgatccgttataaaacatgagtagttgaatttccaaaaacaaaaaaacaacacaaacggg

SEQ ID NO: 534824 - DNA, 401 bp, Homo sapiens
ccggaaattcggccttaatggccggggaaggttgatggaaagactgggggttaggaaaggccgaatgggattaacggggccttggttgaaggccaaaagggaacctgaaggttctttaaacgggttttgtccggggggaagggatcaagttgggcttgccaggaggttaagggggccttaacgttttttggttttttaacctgccaataaaactgttccaggacaccaccttgatttggcttggccatatccaatttagaattaaggtttaattcaggataaggttgggggtttaggaaatggggacctggttggcataattttaggactttaatggccggttttacattgggcttttaaggaagttggccagaagttcccggttggaaaggacagttcct

SEQ ID NO: 534825 - DNA, 466 bp, Homo sapiens
accccatctccactaaaaatgtggtgcctgtaatcccagctattcaggaggctgaaggaggagaatcgattaaaccggggaggtagaggttacagtgaactgagatcacgtcaatgcattcccaccttggcgacagggcaagactcttctcaaaaaaataacaacaaacaacaacaacaacaacaacaaatttaaggaaacaaattcctggttaggaaggaggagaatcgattaaaccggggaggtagaggttacagtgaactgagatcacgtcaatgcattcccaccttggcgacagggcaagactcttctcaaaaaaataacaacaaacaacaacaacaacaacaacaaatttaaggaaacaaattcctggttaggaaggtgggtgaaaaaaaaaatctatacatgtaggcaagcagtttgtgatatgtggactaatattccaaatctcactctagtaccctcg

SEQ ID NO: 534826 - DNA, 801 bp, Homo sapiens
agacaacatcgtgtgtctgtgactaccctatgtcagctccgagtatcatcccgagcttcctgtcgtgggctctgcgtgcaccaggctggctcctgcagtggcactgtggggtcgactgtcttccaaataaaaaactgggtcgggtcataagtgccatcccagccacacattcggactacatgacagatactggcctcgatcactaaaccccagaaaattgctagcaagtgcaattttctcacttgcagtagaaatatgcactttacagagaacaatgaagctatacagacttccagatgttaccaccgacttccaggcttttgagaccaatggacaccaaaagatatcaaagtcagctccgagaattaatcaaacacttacctgaagcagcttcccatctggctccagcatgatggcctgcagcagcgcaagctaccccaactcggctaccctcccccgatacagccaccattcatttgacaacgcaaaagcaagcaagcgaagaagcacccaaagcggaaccacactacgacctgactctaccactgaagacaactcataagcaaccaccctccaacgcgagaacgccacccacccactgctcccacacacgaagcccacaaagcacgccgtacttcccatactacccgccatcccaacgccagcagcaagtgcccctgcctggcacccccaacccacccgacgccggccacacccctaggaccacaaccccgccacaaccaaccgcacagcaccaccacaccccaccacgcgaccaccacaccgccacaccccacccca

SEQ ID NO: 534827 - DNA, 352 bp, Homo sapiens
tacctaaacagaagcaacacacaaacgcatgtctgcagctattgagacacgttccagtattaagttataccagcaaacagtgctgtagtgtctcttttttcctgtcagactatatagtagtattctgcagtcatattcttccttctttaatgtatagaatttttcaaaagatggatttgacacactcaccatttgattcatttccatgcaaaatatatttttgtgctgaaattatgtcaaatggatgtcatatacgggttggtgtgctgccttttgatggctacgtttcggatagagcaatcttcgctgtgaaacagtgtgtatgtgtattttattaggctgactcttacta

SEQ ID NO: 534828 - DNA, 245 bp, Homo sapiens
taacggagctagtcagtcggctgactggagacgtgaccaacctctgaagtctcccttgagtacccatcctaggagtcagtgttgctctagtggctcagtgtgtttctctgcttgtctttctttttagtgattattgccatcggttttaaatggtgcctctaatggtatcgggaactgtgacccaccttttcatccgttctttggcagggcacactgccctgtgtccaataactatcatgacagat

SEQ ID NO: 534829 - DNA, 393 bp, Homo sapiens
  misc_feature (79)..(81): n is a, c, g, or t
  misc_feature (85)..(85): n is a, c, g, or t
  misc_feature (91)..(91): n is a, c, g, or t
  misc_feature (95)..(95): n is a, c, g, or t
  misc_feature (125)..(125): n is a, c, g, or t
  misc_feature (168)..(168): n is a, c, g, or t
  misc_feature (189)..(189): n is a, c, g, or t
  misc_feature (203)..(203): n is a, c, g, or t
  misc_feature (205)..(205): n is a, c, g, or t
  misc_feature (210)..(210): n is a, c, g, or t
  misc_feature (245)..(246): n is a, c, g, or t
  misc_feature (287)..(287): n is a, c, g, or t
  misc_feature (296)..(296): n is a, c, g, or t
  misc_feature (306)..(307): n is a, c, g, or t
  misc_feature (352)..(352): n is a, c, g, or t
  misc_feature (373)..(374): n is a, c, g, or t
gtaacggttgcagtgaaccatgaatgtgccaccgcactccagccagggcagcagagcgagagcctgtcttgaaaaacannncagnacatancatngcagatgactacttaataaaaatatagccnatgatgggcaaatgtatatataacatgaaaattaaaaacactnttatcttatgtatttactgtntaccccagaatcananctacnaggatcaattatcccaggtcaatgttagggttctnnaactgggacaggaggcttctacccaccaggccctggttcgnagtgggcancagcagagtnncctgcaataacttagagtagaacttgaatgcctgaatcaggcatnagagcctgcagctgccatggnnagagctgacccagaccctc

SEQ ID NO: 534830 - DNA, 231 bp, Homo sapiens
  misc_feature (1)..(1): n is a, c, g, or t
ncaattcctcctcctcctatttataatatttatcttgtaatagtatttattgctacccctctccttaaaaatattattagtctgatttttaaaaacaattatatccccccaataatttttttaatttatttagccccaatgatggttgtctttggatatactacagcgatggctattgagcagtatcctgaaacatgggtatcagacgttgaagtcttgatgagtgtttta

SEQ ID NO: 534831 - DNA, 133 bp, Homo sapiens
atctagagatccctccagagcgcatcatagctcactgcagctcgaatcctgcgctcggggatcctcatgctcagtctcctgagtggctgaaactataggtacacaccatcatgcctggctaatttttattgta

SEQ ID NO: 534832 - DNA, 162 bp, Homo sapiens
tgagagaggggcttgctctttaacccaaactggagtgcagtggtctgagcatggttcacttcagcctcaacctcccggcctcaagccatccttctgcctcagcctcccgaatagctgggatctacaagtgtgcaccaacttgcctggcctattttttttttg

SEQ ID NO: 534833 - DNA, 245 bp, Homo sapiens
tatgagactcagctgatctttgtaagcttgttgggagaggcagagtcaagagttgccttactttagagctggtttagtactattcctatgcaatggcctttctggggtttctactgactgcctttggtgttcaccaagatttttccattctggctggtcagatcttaaacctctcctacccctatatgagctctgggaattgcttatcttacagctcccaggcattcgttcccttccttcctcag

SEQ ID NO: 534834 - DNA, 307 bp, Homo sapiens
  misc_feature (10)..(10): n is a, c, g, or t
  misc_feature (20)..(20): n is a, c, g, or t
aatcgcttgnaaccgggganagaggttgcagtgagctgagatcacaccatcgcactccagcctgggcaacagagcaagactccatctcaaaaaaaaaaagaagtactaacttaatacaaaaaaaaaagttccaaattgctaaaaagggatttttttctgattggcctctgaaatttcctttttaaaatttggtggtttctctgacctcctttccagttgttaccttgctgttagggatttctaaagcccccgcccaggaggggaatccttcttagagttcgaccctgcaggctttgcaagctttggc

SEQ ID NO: 534835 - DNA, 102 bp, Homo sapiens
cagtggtatatttgttgttttactgttaatttgacacatctgaaccaaagcattcacaatactagatatacttcctcgtgagccagattctatagcctcaac

SEQ ID NO: 534836 - DNA, 350 bp, Homo sapiens
  misc_feature (144)..(144): n is a, c, g, or t
agctggttgaagaagagcttggaccgtgctcaggagcgcctggccacttgcccttcaaaaagcttggaggaggcttgaaaaggcttccttgttgagagtaagaagaggattgagggttatattgaaacccgggcccttaaaaangtttgagggaaagagtattgggccccccaggaatacccactctcaagagagcgctaacgacacattcaaagagagagacagatagggtgtttagagaggtcgctcataaatgtgagatgcatcattaaggaggactacttgagcagcagcacaggagcgacgatgctgctgctcagcaggaccccctgtcgccgaagatgattgat

SEQ ID NO: 534837 - DNA, 165 bp, Homo sapiens
caagaccagattcgggcgctacatctagagcagtaggtcacgaggtcacccaatacttagatggctttcacctgactcattcaggtaatgtgtcatcaatgaagtcacacaaatgggggccataatagtcagtggccagtaagtgacagttcctcatcctgagga

SEQ ID NO: 534838 - DNA, 454 bp, Homo sapiens
  misc_feature (146)..(146): n is a, c, g, or t
  misc_feature (242)..(242): n is a, c, g, or t
  misc_feature (305)..(305): n is a, c, g, or t
atatagagattgagttaccagagtaactaaatactagactgctgtatttgttggatgtgcagagaaggaaactcaaatatggaacgtggtcttaatgtcttatgaatcatttttacttaacttttaaaattcagattaatagagtnctctaaaaagaaggtttttttgaatttttagaaatagctcagagttttacgtttccctctgtcagaatcttttcaggattcctcattgcctcttcntcagagtcgtttaagaaatatttattagttatcacagtgtcccacagaacaaccacagtcttngctgttaggaagcttatagtctcatgtccattttcaaacttgtatttcaccacttttctctgtacttccccttttttgaccagtctacatttcgtatctgtgggatctgcatttgtgaattcaaccagctgaggatgggaaacacttga

SEQ ID NO: 534839 - DNA, 377 bp, Homo sapiens
cgatgcacggatctgggtagtccacatctttagccccgctacttggaaggctgaggcatgaggactgcttgagcccaggtgttttaaggctgcagtgagctatgatcacactacctgcactgtagcctgagtgacacagtgatgacctatctttaaaaaaaaaaaaaaaaagttttaaatggaaaaataaaatagttttggagcctccagttctgatgccagtttggctcctcagtactgccagtgctggatgtggcagcaaggtgaagcaaaagaaccaagtgacctgagaggagatacacgggaaattaaccatcaagtgacattaactacttcaataatgctatgaggccaggtgcagtggctcacgcttcagc

SEQ ID NO: 534840 - DNA, 444 bp, Homo sapiens
ggcctgggcttttgaccctggatggtctcttcagaacgtgctgcagggtacacacggttttctcacaggccaccttgaggttattggggtgcttgtgtgtccactccaggtgcatggcagcatccaggtccccattgccaacaaagacggcgtccactttgcgaatgtccatccggatgcgttccatcaccacggagccagggggattcctcctccttctgatccccagcacaatcaggtagttgctgccctgcggggcgggctggccggcgctggtgatgaccacggtgtcggggcccatagagtgcagcatgtccatcacccgcaaggcttcctcctggctgtggatcttccggccactcagtaactcggcctcaaactgtttgggcgtgttaatgtctgcaagcgggaccactttttcttggtagacggggaggaggcttt

SEQ ID NO: 534841 - DNA, 984 bp, Homo sapiens
ggaggatccggagtgcgctacctcgcgatcctttcccgatccgatctgtgcatgaacaggacgttctcctgggtctgctgaccggacttacgcccatgaattgtgcttgatgagaagcccaagagatacagtgcagtggcttcttgagcactggatgcctgtactcctggggcatggtcggttctggcgtccagcgagtgctgggtactgaagcagcggtatgtcacgtaagacgtgactcctcgggatgtcatgcgaatgcgcccgcggtctggaccgtagagtgggacggaccctcttagtgcccgactagttgatggcacgttgtcggtgcagttgcagggtgtgcattcgtctcgcgtgtgcgtcgagtcgttgcctgagctctttctccgttcttgcgttccctgcctgcgtgttccatgtgccgtgcaacggagggcacctgtgccccgtccttttgcgggccccctggggcctcgaagtgtatgtctgcacgcagtgcagcgtgcgggcctgacgagcgtacgaagcctgggcgcgtaccttaggctcgctggtgcatagacagctggaccagggtttactttttgtttgttcagtacccccctggacttcccttcctgctgcctttggctgccgccgttcttcgttcggggatgattggagccccggttggcccaggcgatccacctgttttggacttaccttcctgacccgcagagagggagtctggctttggctctctgtgtcgcgagcactaagtctagcttgggagaggcacgtaggttgaccttggccctggggggggtcgggaggggtgaggtggggtgtaaacgataggccaatccccgggaccccgggggggggtgggctccccaggaggcaccttttcgctccctgcggtggcggaaacttggtcgcggggcccccttggggggcggccggtccctcggttcacggtgggaggcccgtaggagaggg

SEQ ID NO: 534842 - DNA, 321 bp, Homo sapiens
taaaaaataaatcaccctaccatgaacacagcagccttccttccaattaataactaacgcaaaaaacgtccgaattaagatacctaatacaatatgtatgacgcatgagtgaacagaaaccatccacctaacagaatcagtcattagataacttgatgtcatggcccagacatcacggaataatgtaaaactgatgggaagaccatttaacagatgacatgtgctatcatggataatcccgtagacattgtcctacatgcactcataatggcctgggaagttatccaacaggaatcccagaattccatgagtacacattca

SEQ ID NO: 534843 - DNA, 339 bp, Homo sapiens
agcccagtgatacagctccaaagagaacaggccagcaatgatgcccacgatggggatggtgggctgggaatactggctcccatctcagggtgagtgggcttgcggcaaaccctcatgctgcacatggcagtgtgtatctcttgctccgtgtccagcaaggcagccaccacagcctgccacacttcttggaagtgttcctatccctctgcatggcctgtgtctcctacgacgctcctgtgtccgtgtggtcttggtcgctcccctatccctgctcgctacgtgctcgtgattggtggggatcctactcagagtctgaccttgcatggcattgcaatgctt

SEQ ID NO: 534844 - DNA, 743 bp, Homo sapiens
gggaacatagggtttttatacaagaatataaagtgaattaagcgtgaaaaaaaaaaaaaaaaaaaaaaaaaaaaaaaaaaaaaaaaaaaaaaaaaaaaaaaaaaaaaaaaaaaaaaaaagaaaaaaaaaaaaaaaaaaaaaaaaaaaaatttaaacaaaaaaaagtttagccgaccggcccaaaaaaaacctaattgggccaatctaaccaatggggcggaaattccaattaactggcccattgttccaaaaagcgggcgatgacaatatctatggcccgcctattaaaaaaaaaattccggggaaaaccctttttgcaaccaagggtaaaaccccatgggccccccacctttttcccctccccaaaagtgtgccaaaaaagcccggcacaaaaaagattgtacaaccatattggtaaacctaaaaattcccaacgggaaattttttgccctcaaaattctttgtaaaaaacccgcggcccaataattggggaaaaaccccccttatattttaaacaaaatagcgcctctattttggggtaaacgccctttttacacccacatggaagaaacaacccccccttattataaaatgagggggcccccaaacatgcgaacataggggcccaatatctttaaaaaaaaggggagtgaccgccgccactttaggggggaacaaaaaccccgtaaatacaagggtgggggggcgcccactctggtgcccttcttggaggcggtctggct

SEQ ID NO: 534845 - DNA, 524 bp, Homo sapiens
  misc_feature (2)..(2): n is a, c, g, or t
  misc_feature (32)..(32): n is a, c, g, or t
  misc_feature (124)..(124): n is a, c, g, or t
  misc_feature (242)..(242): n is a, c, g, or t
  misc_feature (524)..(524): n is a, c, g, or t
tnacaaggttcgggggcgcttcaagaaaaaancttaccctcagtaccacacaatactaacccttcccctcctctgagggcttacatcacctcccaggagatgaaggggattcggggggggtttnccaagggggcaggtccccagggggaacggttcctaggggacctggtagctaaggcagggccagaccgaccaccttctatctttgagggccaggtacatctttgggatcaggggtttcngggctgggctgagcaggagcgcaatgaatttggcagacaggtggaggtcagggaggcagacttcggggcaaaggtttaccaaggaggggctgctacaggtggtaagggctgataggcattcacaccaaagaagataaccatagcgtggtggggccatgactctctacaatggtaactcaattcaaagggggtgcctaaagctctggaactgggattccaaccaggtgaccgaactcactgaccaggacaggcatgggtatttcaacattaatagcatggcan

SEQ ID NO: 534846 - DNA, 331 bp, Homo sapiens
  misc_feature (3)..(3): n is a, c, g, or t
  misc_feature (33)..(33): n is a, c, g, or t
  misc_feature (282)..(282): n is a, c, g, or t
ttntttttttttgagacagagtctcgctctgtnacccaggctggtgtgcagtggcgtgatctcagctcactgcagcctccgcctcctgcctcagcctcctgagtagctgggaactactggtgcatgccaccacgcccggttaatttttgtatttttattagagacggagtttcaccatattggccaggctggtgccgaactcctgacctcgtgatccgcttgcctcggcctcccaaagtgctgggtttacaggcgtgagccaccgcgcccggctcctttttnaggtttttctacctctcaggctctgccaggcagtcagttccatggaatt

SEQ ID NO: 534847 - DNA, 570 bp, Homo sapiens
gagctggccttccagcagcagctcctgcaaatgcaacagttgcagcagcagcacctgctcaacctgcataggcggggtgcgtggatcagcctgcagcccaaccaaggcctcggggcccctccagacccttccgcaagcagctgtttgcccaacagacctgcatcagttagttgagagaggcgagggtgcccccgggcagactgccgaggacagcgtcaagcaggagagggctggaacctcactggcaacgggcagaacaccagaatacacataggtttgaccagattcgcccacacagagggtgctaagacaaagcagcgatcggtaacaacgaataagcactagaaagagaaaggagagaagacataagtgatggagaacaaaatagtcggggagaagaacaagaagtctatccaacagcggaagggaaagaagacagcgagcaatcacaaaacacaccaatgataggagagaaacaggaagaaggtgacaagagtaacacaagaggaatgagaagaacaaaatgcaggatgaaagaaacatgagagaaaaaggtgaaataaagaaaaa

SEQ ID NO: 534848 - DNA, 488 bp, Homo sapiens
aacggctcatttcagtttggtgattaatcaaagaactaaatctcgaactagcattagacccaacaatcccattacttggtatatacccaaaggaaaataaattgatctgtcaaaaagacatctgcactcttatatttattgcagcactattaacaatagcaaagaaatggaatcaacccaggtgcccatcaatggtggattgaataaagaaactgtagtatgtatacaccatggaatactacgcagccacaaagagaacaaaactatgtcctttgcgtcaacatggatccagctggtggccagtaccctaagtgaactgacgcaggaacaaaaaaccaaataatgcatgatctcatttataagtggaggctaaacattgggtacacatggacacaaagatgggaacaaaaaaacactggtgacttcaaaaggcggaagacaggtgaagggttggaaaactacctatgggtgactatgttcactacttg

SEQ ID NO: 534849 - DNA, 1631 bp, Homo sapiens
gggtcactggcatcccgaaccctcctcctgctgctctggtgtgggccctggcccctgacctggagacctggtgctggctcccactccatgaggtatttctacacctggcatgtcccgtggcctggcctgctggtggagccccgcttcatcttgatgtggtgctacgtggactgacactgcagtatctgtgaggttcgacatgcgacgccgctgatgtcctgagagaggacgcctgtgtggcgcacgtgtgatagatgcagtgacggtggcctgcgatggtactctgtgcgacctgtgatacacatcaagatcttagcaaagtgcccagtgcgacatgagcctgactcggatgaggagccttgtcgggaagcctttgcgctgtgctatcatagcacatcccatgaggctgataggccgggtgttctcactacttttggcacgagagatgttagttggctttgctgaaccataggcgggcctgtgagccttgcggctgcgccttccctccccagctgggggcagtaagcccacgattaaggcctatcgtgacttgtgcacaggggagtttacagttctgcctcgttgaaccagatgtgaccctttgaggcgtcctttggactcgtgcagtgcgagagatcctgcgggctcaatgactcatccccaaggcgcaaatgttgcggaggggctgcgccccgttcgatggctgtgacgcacgcttgaaagaagcctaaccctggaagtgggcaacgttgcggttgaaaggtgggtcccgggaggattatccttgtcatgaaccgtggaaagggagacgctagaagtagcgtctggacaccccagaagaaccagcggtggaccaaacacaccatttttttgaccttgaaggccatccttgagattggttgggacccgtgcggcattttaaaccggtgtggagcattcacatgtaccctggtatgagaatgggacggcacaaatcagggaccttgagctgtgtcgcacaaaccgagggaaataaacgtcacaaacggtaacatgtgaggccatgagacaagagaaaacacactatcccaatgaggtgcaccactgatgagacgtccaacaccacgtaaggtgagcggacaaagcaccgccgatgtagttgcttttttcttcctttgtcgtcttctctctctcgtgcgccaggccgaacgagaagcagaaggacgaggcacggcgaccagagggaacgagcacagcgggagagaagacacaacgacgccaagcgagaacgcaggagacggcagacagacaaggcgcaccggaagacagcagacacagccggaagacgtgagaggagcaaggaaggacgcagagagtgagcacacacgcctacggagagagaagcttccgacgtagaaggaagagcacgagaaaggcggagggagagggaaggggaggcggagggcagcgaggcaacgaacaaggggagggagcacggaggtgcaggagcaaaggacaaagctagcagatgcagcacgcgtaggcgaggcgagaggacagagtccggcagcgacgaggcaggagtgagtaaggagggacagagccaaaggagcataggccggcagaggagccgcgcgcggaagagcgaccgt

SEQ ID NO: 534850 - DNA, 85 bp, Homo sapiens
ctctcttgtaccacagtttcttctgttaatccagtgttacaatcgtgtgaatggcacataacagtttgacaagtacatacaccat

SEQ ID NO: 534851 - DNA, 140 bp, Homo sapiens
  misc_feature (67)..(67): n is a, c, g, or t
ctgcctgggtgctggtcgtctcttgatggatccaccattggcactaagcggatgaggggccctcggncttcttgtaactcactgctggggcactcgtgcccctgcgcgaggtgccagcacaacaatccagaaccggagca

SEQ ID NO: 534852 - DNA, 351 bp, Homo sapiens
  misc_feature (244)..(245): n is a, c, g, or t
atgggccctgttactggctgcgagtggattacagccgtggcgagggcgtctgcagttgttgccccgagcgggtggccgaatgggacgccgcgatcggacgcaaatcgatcgacgaccagttcattgagctgatggacgctctcgatgggtacgatagcccggaagcgatcagtcaacggctcgctgagctccaaggcccgatcagggaactcgcggcggcttgccggcagacggtgctattcanncgagctcaagtcgagttcgagtgaccaaagccgacatcaagctgcggccgatggagggaggttgcctcttcgccgcttggtatctgctgatggaccgcattgcacg

SEQ ID NO: 534853 - DNA, 142 bp, Homo sapiens
taagcgcatggcatgcatgaaggaatcgcagatcagctcagagattgatcttccgcctaccaacgacgagaagaaatgggctcgaccccccatttccatgaactttgaggtgccattcgcgcccgctggcctaaggcacatg

SEQ ID NO: 534854 - DNA, 417 bp, Homo sapiens
atcttttattttaaaaagctgttttaatatatttattatatgcatagtatgatatgagtgtatgtatgtgtgttgtgtatgtatatgtatatgtgtgttgtatatatgtatacacacacatttatgtatgtgaattaatacaaatactctacccaccaaattgtttactcttctgagggagaggagtgacattttgggtggatagtaaaagaagtctctgattttttatttgtatatatgtatacatatcaacaaaaatatatccatgtattgaaatgggattttaggccaggtgcagtggttcatacctatgataatcccagcactttgggatgcgaagacaggtggattgcttgagctcaggagttcaagaccagtctgggcaacatgacaaaaccccatctctacaaaaaaaaa

SEQ ID NO: 534855 - DNA, 184 bp, Homo sapiens
tcttcatctgtcatggaaggcctgaaccccggtaaaccactgttagtccatagagtccaacaatgctgaaaaacttggagtctgatgtttgagggcaggaagcatccagtatgcgagaaacataaaggctggaagaatcagcaagtctgttctttctatcttcttctgcctgctttattctagc

SEQ ID NO: 534856 - DNA, 142 bp, Homo sapiens
ctttatgtttgcagctgcaaacacaccaatgcaataacaatgccaaacacacaatgccagctgcaaacacacaatgcaacacacaatgccaaacacacaatgccagctgcattgtgtgtttggcattgtgtgttgcattgtg

SEQ ID NO: 534857 - DNA, 81 bp, Homo sapiens
ggtttccccccccagggcccgggacagggttttttttgcccaaagggggggcccaataaatgttgttggctggttgcccca

SEQ ID NO: 534858 - DNA, 274 bp, Homo sapiens
cagatgagatgggaaaggcaggcgcggcttcgtgtcagtagttctttgacgtgaagaggggcagcacagtcatttacacttgatccagcctcgttggcatcttacaaagttaagacagctaaagagaattacaataagaaggcaatgcttgtggaatgtacagtacttattggcggcgcacgcctcattacgatgcgcctgcttgcttctcctgttcaatcgtttctttggaaggcagtggatttctctctcacatctcgtctcttctcttgta

SEQ ID NO: 534859 - DNA, 315 bp, Homo sapiens
tggtgtcagtgtcagtctaaatctatgggtgaagcagttagtccataagacaaaaaattatttgcctagtggattccctttacctctttttaagaagctcagagatctgtaatcattaatttactaaggattttttaaaatattattttagtcacttttaaacctgaaaatttctcttttgatttagatttttgaagtgaggcttgagcatacacaagtaacgctgggattttcgttcttcgtgggggttttgccccctcattttttctagcattttgaagaagataaacattttgaactgaagtatataacaaa

SEQ ID NO: 534860 - DNA, 166 bp, Homo sapiens
  misc_feature (117)..(117): n is a, c, g, or t
atattatcggatctaagtacagacgcgaagaatcaaggaaagataaagtactgtgagagatgataccatgggataaaagtccttgagatgtcctgtctattcaaccaccaggcaatntatacgctgcagttttccatgctcagcaacaccgtcgcaaggggtaccg

SEQ ID NO: 534861 - DNA, 429 bp, Homo sapiens
actggttggggatggagaataggatctcactttgttgcccaagccggagtgcagtggcacaatcatgggtcagtgcagcttcatcttcctgggcttatgtaatcctcttgcctcagcctcccaagtagctgggaccacaggtgtgtgtcaccatgaccagctaatttttttttactttttaatttttttagagatggagtctcactgtgttacccaggagttcaagaccagcttgcaacatagcgagaccccacctctacaaaaaatacaaaaatattagccgggtgtggtggtatgtgcctgtagtcccagctactcaggaggctgaagtgggaagggtcacttgagcccaggagtttgaggttacagtgagcaatcgtggcaccactgcactccagcctgggcaacagaacaagatcctgtctctga

SEQ ID NO: 534862 - DNA, 1019 bp, Homo sapiens
ggttttactgggatgataggacggatgagtggattcttcaccaccatgtttcctgttgctcttctctccatcccttcttagggcgggaggagtggacatttattctctagatgacgttcccaaggagatgccagtctgctctgccttacggtgggaaggagagaggaagcccacgtcagctcttatcagcattagaggtgttcaactgatccttccccaccatcttcagaatctgttcctcctggtagcttgacgtggggggtggggatggtggaagtccggtggatgtgtgtgagaggacccagggaatgggggatcgggaggggaaggccgggaggttccaccaatcgtaacaacgtcatggagtgcataagagagagagtgaggcgtgggcgagtcccgatgctgctcttacgggtgcccaacacagcctatctgatgttgagcgggtaagggagagggtccatcgtgtgccttgtggttcagagtctcctgagtctgagtgctactgatggcctggccgagggctgacatgggttatctctgaagtcgagagagctagggccctggggtggacggatgtagtgtggattcttcacgttatggatccagccatctgttgaccattggactggtcatgctagtgggaaggaataatgctattgtctgaccgacatgaactcacctgatgtagtgggccaggcgcatcaagagctgtccggcgtgtaccgggcacgcggtccaggcgcggccaacctcactgcacttctcatcacagcgagccgggggtagaaggggaggcaaacaagagccgaagggtggcaccgggggtggaaaggagaggagaaaggaacaccggcgaaataggagacgagcacaagaggcaacgcctccacgcacgcacgcgcgcacggaggtccgaacgggaccgactcaggatgtgcggaggtccacacgccgcggatgcgggccacatccatccgacaccagtcaacggccgctcacagatcatgagcata

SEQ ID NO: 534863 - DNA, 405 bp, Homo sapiens
cacgagggcagacaagcgaaccagacactcttgatcacacacatgtgtctaccacacagagcaaggagtgtgtgagtgtccttcaatgtgctgatggactacacacatgtgaaggccagggggtgggtgggcgtggaccttcccttcactggacagaactgtcccccagcttagggaccacactctactttcacactggaggtggacagagtcaagctggggggctcaagagaggtcacaggccctcaatctcttgtcctttccctgtctgtaacaaggtgtctggcccgcctttcccaacaacttggttcatatgatataacgtgtgaactgggaacaagcccctgtccgcggtgggccccttaagcaatataacacgcaaggcccctgtcctcttataacggg

SEQ ID NO: 534864 - DNA, 158 bp, Homo sapiens
cacgaggcgcacccgctcctcgaaggcgatcggcgtgagcccccgctggcgcaacagaaattcgtagcgttcccgggagaaccgcccgtcctggtggaaggcttcgatctcctggatcacgctctaacgctggatgatcttgaacatcatacttcttt

SEQ ID NO: 534865 - DNA, 191 bp, Homo sapiens
gtttttggggggccccttaaaaagggggggggcccgttttttttttttaggccccccctggaagcccacgggggtttttttttataaaaaaaaaaaccggcccttttcccccccggggcccccaaaggaaattttttatgggggggtttaccccaaaaaaagggccctgggggtttttttcccccttttta

SEQ ID NO: 534866 - DNA, 376 bp, Homo sapiens
ggtcgtcgctgactgactaacgttttctgaccttcgtcatataccgacagatgacgaacgacgacgtagtgggaaggcacagaaccaccaggtaggtttgaggggatacatcctaagagcaagacccattccagggcagtcggaaaggaacgccgccagggctgtctcttcaaagcatgcaactatcaagaccttgtacttcatcccctgtttggaagacctgatttcctcctggtcttacagatgcgcaagtcgtgccattgcaccaccacgatactgacgaagaaggctgtgtgcgaggtgaactccacgatttccctctgctcataggtccactgcttgccgtagctgtctaccacattgttgatccagtggt

SEQ ID NO: 534867 - DNA, 958 bp, Homo sapiens
aaatacggtggggacgtccggcttcggagcgggagtgtgcgcggtgccagcgactaggaagagaatgcagtatgggtgatgctgatgaacatggcagaagaccagatttgctatatatgcaagtgttcccagtgccatcatccgttcgaaagagtggatggctggcactaatactgggccagatctccgcgattggtcgtctttgggcgcgacagaggcaggtcaggcccctggatactcttacacaggacgactcggaataagtagacaagtggcttcttctggggaggaggatacacggatggcgtatttggcgaatcccgataagtacatccctgaacacaaagtgatcttggtcggaattaaagaaagaggggaagagagggctaggattaaggaggttatcgcgaataatatgctatcgtaagtgagtaattcgttggtgctggatggccttatcttattgacgagaacggtgaactgtctcaatgacgtttgttgatgtgtaccagtgccttttaagtatggattgtcagtacgaccgaggaattgcagaatcatgaatgagtggcagaaatatttttggtgggcagtcggctgatcttagaacctaagagtgcctgtggttagatgagtatgtgcagtttgccgattcttagtagtgacctccaatttcggtaatggtgattcccggttggcccctttatatgattgattcgacttcgtgaggtaatgtcccactgtcaccaccgatggtgagtgcgtcttaaccttacgcgatggtatttgccacgtaatagcgggtgcggactctgaatattggggcttggtcctgttctaacccgcgctcccgggtgggggggtatgcccaaagaagggaaaaaacgaggcgcgaagtggggcagcgcaaaaacgcaaaaggccaaagacggggggaaaaatagcgccccacagcgag

SEQ ID NO: 534868 - DNA, 263 bp, Homo sapiens
  misc_feature (41)..(41): n is a, c, g, or t
  misc_feature (89)..(89): n is a, c, g, or t
  misc_feature (119)..(119): n is a, c, g, or t
  misc_feature (170)..(170): n is a, c, g, or t
  misc_feature (227)..(227): n is a, c, g, or t
  misc_feature (252)..(252): n is a, c, g, or t
ctacggcaactccacagacccagctgcagctccagcaggtngcgctgcagagcaagcactcagcagcagttccagcagcagcagcaggngtcgctacagcagcagcagcagcagcagcnacagcagcagttccaggctcagcagagtgccatgcagcagcagttccaagnagtagtgcagcagcagcagcagcttccagcagcagcagcagcagcagcagcattctnaattgaaattggcattcattcaaanttcaggcaaca

SEQ ID NO: 534869 - DNA, 925 bp, Homo sapiens
gctgactccaaagagggtgtcttgccgctgacggctgcgttccactgccccaatttcattcggcttcactcgcaacgtccgcacggaggcagtgctggtccgactcgggagacgtgcgcggcggccatctccggaggagaaggatttcttgaaaaccgtggaagggagggatgctgcatatgtgtgaagccccaggaggcccccaaggaactcgtcatcccgtttgatccagaatggtcatcgcaggcaggcaccagcccggccctcctggtgccatctcacatgatactggggccttgtgctggatggggtggtgtctccaggcatgtgaaggagctcattgcggaatccaagaagtctctggaagagagagagaagtgcgggtgtcagaccccacgctcgctatccccatgatccagacacaggatgcacccccagcggggaaggggcagacagcgaaaccctggtcagagtacagtgtccagcagcgagagctaacttatgaggcgagtccccgtggagtgcctatggtgctggaccatgctgcggcggcatgggctggaaacctggcgagggcatcgggcgaaccttcaatcaagtagtgaagccccgtgtcaactcgactgaggcccaaggggttagggctgggtgccaacctgaccgaggaccaggccttgagccccaatggccccgtcccgccatgccaagaccagatgaggcagcacggagaaaggataaggaaagatcaggctctagggctgggtgcctgggaggagcctgatggtggattctttctggccctcaccgagggcctctatgggaaaggttggcaagtgcctttgatccctgacgatgatcgggccatgggttcaggactggcatgagggggaaccagggatgggagactgttaagattgaagtacta

SEQ ID NO: 534870 - DNA, 94 bp, Homo sapiens
tcaagcttctaacgatgtacggggacatggataatttttgttcttcccctgtgtgatttttgccatcaaaataaaaatttgagactcgtaaaaa

SEQ ID NO: 534871 - DNA, 424 bp, Homo sapiens
atttttgtatttttagtagagatggggttttgccatgttggccaggctggtctgaaactcctggcctcatgtgatctgcccgccttagcctccttacatgcgtgagccactgagcctggccaaaatattgtctaattattcatcattctgtagtgttgagtaaatgtaacttttttgtgtctatattatgtagttttgagtaaatgtaactttttttgtctgtgtctttggacacttgtagccaaaaagaggaagaagaacaggaggcatacagggtattttaaggtctagattgaacctggaccttggaactgcttcctaggtgttgcaaatgggtaagaaacatatgtaacaaacctgcacgttgtgcacatgtaccctaaaacttaaagtataatagtaaaaataataaaaaaaagatcaa

SEQ ID NO: 534872 - DNA, 140 bp, Homo sapiens
  misc_feature (97)..(97): n is a, c, g, or t
gcggccgcctactactactactactgctcgaattcaagcttctaacgatgtacggggacatgaaccaccacgcccagccaaagttaaactattattnctgtgtcagaatctgtattaaatgtgacttgtcaagcaaaaaa

SEQ ID NO: 534873 - DNA, 209 bp, Homo sapiens
tggtcgcagtcgtacttgtgcataccgatgtgatctctcatggattacgccagatcttgtgatggtgtacggccctgtcttggcccgtttgtatggtctgctccttcacgttcgtcggtatttcaatttcacacctagtggggacgctgcttcgatggggtactgtcgactgtgacaggcccttcccgggagcttgcatgcgagccatg

SEQ ID NO: 534874 - DNA, 137 bp, Homo sapiens
acgatcaccagagaataatgtgggcttccagagctcaggccttcacagctagccatactaggtgttggacccctggaaccactttatagcactctatgttcttagtactacattacctttagactaccaccgcgact

SEQ ID NO: 534875 - DNA, 113 bp, Homo sapiens
ccagtcttttctaccattcttgatattctctgagcatagcctagtgtttcagttcatatttaatgatacttaaatcgtgggaattttaatagttagttccaacaataagcaga

SEQ ID NO: 534876 - DNA, 137 bp, Homo sapiens
actctcagcaggcatccccccatgctctcctcccgtggctcccctgttcacaggctttcaacagtggcctccattcccacattcaccagtggccctcgcacacagcagtccgtgtcattgttcatttttctgtccac

SEQ ID NO: 534877 - DNA, 435 bp, Homo sapiens
gactgactgccatggatgccataaggtacaccatttacgagtacggagccctcaccattgatggggagtactacatccccttcaagcagtatgctggcaaatacgtctctttgtcatcgtgtgccagctactgtaagcctgacgggacagtacattgaactgaatgcactacaggaagagcttgcaccattcggtctggtcattctggtcttctgttggaaacaatttggaaaacaggaaccaggagagaactcagagatccttcctaccctcaagtatgtccgaccaggtggaggctttgtccctaatttccagctctttgagaaaggggatgtcaatggagagaaagagcagaaatcctacactttcctaaagaactcctgtcctcccacctcggagcccctgggtccatctgacccatcttggggatcctct

SEQ ID NO: 534878 - DNA, 347 bp, Homo sapiens
ttgagatgtcagcttaccccagttaaaatggcttttatcaaaacaacaggcaataacggatgctggtgaggatgtggagaaaggggaacccttgtacactgttggtgggaatgtaaattagtacagtcactatggagaacagtatggcgtttcttcataaatctagaactaccatatgatccagcaattccactactgagtgtatatccaaaagaaagaaaatcagtatacgaaagaggtatctgcactctcatgtttgttgcagcactactcacaatagctcaaatatggaatccaaagtgctcatccaacggatggaataggtaaaggaaaatgtgggatgtggg

SEQ ID NO: 534879 - DNA, 2405 bp, Homo sapiens
  misc_feature (2082)..(2082): n is a, c, g, or t
  misc_feature (2134)..(2134): n is a, c, g, or t
  misc_feature (2145)..(2145): n is a, c, g, or t
cctgacaagcgtccgagaacgagcacaaaagaaacgaaagatccacacgcccaaacacaaaaaaaaaaacaaaaaaagagccggcagacgcgataagcgcaccacgacaagcaccagacgcagaagaggacgacgccagacgtttttacagccacgagaagccgccaccgatgacggcgcgcgacgcacgacgggcggcgcagagtagcacacgaggaccagcaggaacagaaaggacgacgagacgagcaagagcacgagcgcgacagcgcacagcacgagcggatgaacgcacgacaggtggcagaagaagacagagagaaaagatgaggagagacgacaagcggaagaagagagagaagacgaggagacgaagggaagaggagaagaagagagaaggagaggggggagagaaaaggagaaaaggagagagagaacaggaggcgaaacagggctcgagagaggagaagaggagcgaaaggagaggaaagaggaacgagtacgaacggcgggccgagtacgagagacccgagagccgagcgtagagcaagcgaagagatcgaaacagaaaggaagaaaggagaaccgaagccagaaggcggaagcggaggcggcacacagcagaggcgtcataaatgagagaatcgaaacacaccaccgcaaagtagagcgagaatgcgggaggccaagaaaagaaagagaggagaggagagcgcaaagcggcgtgacggggcgaacggccagcggagcgcggagacgcacaggggcgggagaggtaagaggtagaacgcggagagagagtgggtacggaaagggaagaggaggagagagagacgggcgcagagaagaagagcaggtgagcaagaggggggaacgtcagaacggaagagtcagcgacgacgcgcggaggagcggagaacgggaggccgccgcggcaggcacacggcggaggagcgacgggctggcgcaagcagagggacgggagaccagagggagggagagcgaggaagcgagaaagcgcggaggcaaagcaagagacagaagagcagtgagcagagagcgagggggcggagcgagcaggcaggggggcgaccggacgaagcagaggggggcgaagaggaaggagagcgggtgagaggaagaagcacgcagagaaggcggcgtcagggtagggatagaaggagatcaaagcacgtagacaagtacagaaaggtaggcaggaggagagtacgacgggacgacgtatagcaagatggagagggccagtgcagagcgcaaggcgtggcacgtgaagaggaaagagcgcgaaggaggaggaggcgagcgagcgagcagggagcggcgtgcagcggcactgaagcgaggcagacagaagacgagaggcggcagggtaggaaggagaggaggcgggagcgaacgagacgagaacgcagagcggagagagagacgggagcagagagcgaagagagcggagcagaaagcagcggacagagaggtgtgcaggacgcgggcgagcaggcgatcagagcgaagtgagagacggcggacaggcagccgtatgaatgcaccgagcgtgacgccgcgacagacgtgcagcgtgcatgcgatgaaggcgcgcgcagcaacagagtggcagatacgaatgcgcgacaggtcgacaggcgaggacgagtggaagggaggacgagcggcgcgagcagcgcgacgggctcggtacccgctagagcacgacagggtgcgagcggtcaacggagcaggaggggacgagcgatggacgagagagcgaggaggcgcgaagacgtgggcagacgtgagagaggggcgaagcgcatgaagcgcacacagagcgcgtcgaagtgtccgcgtgagtgctagtagaggcgcgcgcgggagcaggagcgcggcggcgcgcggaggcgtgcgcgtagatagcggatcggggaggcgcgcgacgcgcgcggctgtcagcggggcgcgtaggcagcgagcgagacgagtaggtcgatagacgagctgcatcgacagcgagagtacgctgaggctgcggtgcgggtccgcttagtgactctgcaggagatcgancgcgagggactgaagtagcgtgaatcagtcgtgagagcagagcgcgcgcggnatcgacggagngtctctgcgacgagctacacagcatgcatgcagctgaaggacgacagcagatgagggtagaagggcgaggactgatgcgtcgactggccgtcgcgcgagacagagaggcgagcacgtaccgatgcgatcgtgatagacacgacgcaacgagtagaccgagcggcagagcgagtgcagcggagacgagtccgagcagacgagcgacgaggagtcacgcgacggcgtggcgtgcaccgcggcagcggagcgtgcaggagctc

SEQ ID NO: 534880 - DNA, 484 bp, Homo sapiens
atctcatgaaacagacatatactactctgattaaagccaccaacttattgtggttatgcaatctctacgattgagcatatcgtctgctgcctatcattgtatttgtctattcatgctggagtttacttctttctcagcacatattccagaatttagctgtatgcaatgctgtcttcccaatttatagtcagtacccctctttggtcgctagtagaacccccctgctgtaatcccagcacttgggaaggctgaggcgagcagatcacctgaggtctggagttggcgaccagcctgaccaacatggagaaaccctatctctactgaaaatacaaaattagccgggtgtggtggcgcattcctgtaatcccagctacttgggaggctgaggcaggagaattgcttgaacccgggaggcagaggttgtggtgagccgagatcacaccattgcactccagcctgggcaacaagagcgaaaactctgtct

SEQ ID NO: 534881 - DNA, 105 bp, Homo sapiens
atctaacactcatggcagagttcttctattctctcttattttttggaaagcggaggtcccgctctgtgtagcccaggctgagagtacagtggcacaagtcatcga

SEQ ID NO: 534882 - DNA, 137 bp, Homo sapiens
aatagctgaccaggctttgtccagtgccaactcagaggtgggcacatcctgcgtactgcatcacgtgcagaagctggcaggccctgtgaccccagtggagaccatcctgcagcgctgcaacctggaggagatttcca

SEQ ID NO: 534883 - DNA, 116 bp, Homo sapiens
aatagtgtcttcacagcatcagctgaatgaatacttttatgagtccgtgtatgggctgatgatcttcaatcttgatcctccacctatttcaagcatacaactttatcataactccc

SEQ ID NO: 534884 - DNA, 391 bp, Homo sapiens
  misc_feature (153)..(153): n is a, c, g, or t
ctaatctatcagcagaatattcttggacaatatattgggaagttcaagctatcaggacaatacagctcttatagtcccccagcattgactactaagcatagcgggcgctatgcttgcacatagttccgtgactcagcaacatgccatgtgaangctcctaatccataacagtcatagtctctgctccttcaggaacagtacatcttcctggccttaatccattatagcaggcgtgatgtggaaactgcctttcagggaagactggcagacagttgcttacattcttcctcaaagtatttaccatcagctacagtccaaaattgctttttgttcaaggagatttatgaaaagactctgacaaggactcttgaatacaagttcctgatagatt

SEQ ID NO: 534885 - DNA, 156 bp, Homo sapiens
ccccccccggaagcttaaggggttttttttccccctgttttcagccgccctataaagactgggggtttgggggccagggtctcccgttatgggcccaaagggggtgaaaaaacaggggctgggatatttggccaaaaaaaaagttttttttttcta

SEQ ID NO: 534886 - DNA, 142 bp, Homo sapiens
  misc_feature (22)..(22): n is a, c, g, or t
ccagacacgtcacaacaaaaanaaaaaaaaggggaaaaagaccctgcagatgtcgggccgacttttatatttttagggttttccctcaatggctgtctgaattttctcacccttccccttggtgttaggactcgtcaccgtg

SEQ ID NO: 534887 - DNA, 326 bp, Homo sapiens
  misc_feature (34)..(34): n is a, c, g, or t
  misc_feature (54)..(54): n is a, c, g, or t
  misc_feature (147)..(147): n is a, c, g, or t
  misc_feature (161)..(161): n is a, c, g, or t
  misc_feature (202)..(202): n is a, c, g, or t
  misc_feature (230)..(230): n is a, c, g, or t
  misc_feature (247)..(247): n is a, c, g, or t
  misc_feature (276)..(276): n is a, c, g, or t
  misc_feature (283)..(283): n is a, c, g, or t
tacaggcatgagccaccacacccggcctgagggngtatcttgactcacctgctnggaccttcaaataatctttcctgtgcctcagttacttcataggttcgctgagaggattaactggtgctaatccatgtaaaacactgaaaaggngcatagcatgtagngagcaggtgctaggtattattactgatgctcttaattaagngaggtaaggaggggagagatggagtggnagaacccagcatcttgngaacatcagaccacagaaaaggcagcacncctgatncctgtgcttagcctaggaactaaggctttgaaatggctctgaa

SEQ ID NO: 534888 - DNA, 648 bp, Homo sapiens
taagtaaaaacaggtttcaccgtgtttagccaggatggtctcgtcctgactttgtgatccgcccgcctcggcctcccaaagtgcgtgggattacaggcgttaagccaccacacctgtggccccggcacgttatcttttataaggaaagtgacaccagttctccgtggctttcgtgaccaaagaaaaaaagtgtcacgaggagaactttgaagaaggcaggacaggaagggtgtggtgtggcagcaaacacactgtgcaagacgtgctatctctgtggaattgtggtgcagtggggtgtgctctctctcgcggaaaggcgggtgtggtgaacacaggccgccacttatccaacaagtgtagacgagggcgcccgtgggctctcccgcggtggtgtgtcctctcacacttctcagaggtgtgtgtgtccaccctgtggtgcagtgtgttgtggacacacgccaagaccatttgtgggggggcgagaggaaacaccgagtctttcctagaagagaggtgctatatcccagagagctctcaagacgtgtctgtggggacaggggaaagccccgaggggggtaattttttttacccaagggcccccaaaataagaggttgggtggtgtgttttacacagacaaaaaacaagcc

SEQ ID NO: 534889 - DNA, 547 bp, Homo sapiens
  misc_feature (172)..(172): n is a, c, g, or t
  misc_feature (355)..(355): n is a, c, g, or t
  misc_feature (392)..(392): n is a, c, g, or t
  misc_feature (473)..(473): n is a, c, g, or t
  misc_feature (492)..(492): n is a, c, g, or t
  misc_feature (495)..(495): n is a, c, g, or t
  misc_feature (500)..(500): n is a, c, g, or t
  misc_feature (505)..(506): n is a, c, g, or t
  misc_feature (531)..(531): n is a, c, g, or t
  misc_feature (541)..(541): n is a, c, g, or t
ggaagcaggggctgggggagcttgggccgcggcgggtgatgctaggcgcgtgggcgaggtggtagcctagatggagaaggagtttggggcgtgggcaagagaaagagtgagggtctaggggaatgctgggccccttcaatgttagatccggagttggattgggggggtcatntaggcctcctcccaacctccaagggtcctacagatgaggaaacaggttcagtgtgagctctggcagaggccccgaagagagggataggaaggggccaggagaaccagagctagttgtgaccatggaagccgaggggtcaacgcaagggccagacgttccaagggaaaggaatggactcatcanactcttaagatttgttaggacgcttgagtttccgagnattggggggaacaggattagtttggccctaagagttggtttggtatgtcaactcatgcacgtttgttggtaggagggtaanatctggttgggatagggtntgntggancctannttccaagtaatgaaaattcaattanttgcagacangccttg

SEQ ID NO: 534890 - DNA, 362 bp, Homo sapiens
gagacaatttcatgcttggttatctttaagctctctggaaaaaaaaaaaaaaaaaaaaaaaaaaaaaccagatggaaagacagggttgcgcgggggctaatgcctgaaatcccagcactttaggagggtgaggcggccagatcacctaaggtcaggagttaaagaccagcctggttaagggggggaacccgggtttactaaaaatataaaaattagctgggtgtgggggctggcgcctgaaatcctagctacttggaaggctgtggcaggagaatcgttggaaccctgaaggcgaaggttgcagtgagccaagattgcgccattgcactcaagcctgggtgacaggagtaagactttgtccc

SEQ ID NO: 534891 - DNA, 151 bp, Homo sapiens
  misc_feature (26)..(26): n is a, c, g, or t
  misc_feature (52)..(52): n is a, c, g, or t
  misc_feature (60)..(60): n is a, c, g, or t
  misc_feature (130)..(131): n is a, c, g, or t
ctcaaatgtcagcataagaatgctgnttcggcctttcgagaactattctgtntcaatttntggtataaatattcattttttaggatacaatagtaggaaactaattttttacctatcctgtgtccttacnnttgacaaaataagaatgcca

SEQ ID NO: 534892 - DNA, 331 bp, Homo sapiens
aagcagtaggtgctagttattgatacagggggattgtctagagtacagctcgagtggatcgcgcttgtgaacaggtcgtgcggaatgatgcgccgtgagtgggaataaacctggcgacagccagcgccaatggctcagcgattgccccgctcattggcaaacgcacttaccgcttgtactgcttcgccggtgccttcgagaatctgcaggatcaccgtgccggcctggttggccagctccacaccttgggcggcgcggtcgctggtggcgtccatgctgtcgatggcttggcgggtttcgtcctggatcatggcgatcatgcgccgcgcag

SEQ ID NO: 534893 - DNA, 1228 bp, Homo sapiens
ggcagcatgtcggcaacagcggctgctcgtaagcggggaaacgccggcctctggggccggggctggcgcgggggcctggcaagcggcggcgaaaggccgactctgctggggtgacagtgggcaaatccaacgggtggcggcaagactgacactgaggagactctccaggcgacctctgacgacgcgacgacgcctagactccaacggacacggcctgaggacggacggaggacggacggacgctgcgaggacacactggcagcaggaccaacgacagctgcgccttgggcgcaaggagcctctaacgccgtacgaacggcacgacgtaccgattgcagcgcacacgaccggaacgggaacgacacgggcgtgaacggggcccaccgaggggacatatgagagacgagaggacgaccaccagctggtgacgacgtgaggaagaccatataggcaagggcgacgagcactggtaagctatagagcgccagcagaccgattggggcaacggtgacagtagacgacgagacacagcatcggcgcgtggggcccaacacaaggaaagccacttcccaaggcgacaaccccaccaatgtgggacatgcacaagccgctaggaaacacagtgacggcacagatacagcacaaccggggagggatcgacaacaccaaggacgatcgtcacgtaagctcacaagcaaattggcgtgcacgggcgatgcggagtagcagagccaccgctaccggggacgtggagacccgctcccacaggcagccaagtgacggatagcgatgtcagttgcgacgctagccccccaacaacagcgcacccttgggcgcaagacaacagtcacaggtatccaacgcgttggagcaaaggccaagcatagagggcagagacaggcatgcggcaacagtggaaaaagggcactgggccaacagatggagcggcaggcatacacaggtccgcgaagaagctcaaacagagagaacacggagagtatagcgcccgaggaggagcaggacacacaggacacccacgacgggggaggccgccacaggaggaccagagaccaccaccggcaggacggagcgatgcgacaagtgagacccagaagtccgccgcataccccgagacgaggaggcaaaagcaggagacagccccagagagggagcccgaacaatgcgtgagaggaccaccacggagcacaaaggaccaacagagcagcca

SEQ ID NO: 534894 - DNA, 230 bp, Homo sapiens
cccgccgtcattggatccaggtgaggggtctcctatgtaaagggccttctggagccttccacagttaggaagagctcagacactggtggccgcacccccatcccctcaccaaactggcttctgaagtaaaagaagacagggcaaggtggttataaaccaaaccccatcttgtctagacttttttcttcctgtataataaatatgtgcatatacagtagaatatgtagtac

SEQ ID NO: 534895 - DNA, 759 bp, Homo sapiens
ccttgcgcgagaaacaaaaattacgttattttcgttgccccatacactaccttgatgggcgagcaagaaaaagttatacttttaaccatgacgggaaatcgtgcacatccacgctggctcagtgcttggcaaccagatcggtgccaagttctgggaggtgatcagtgatgagaccatggcatcgaccccaccggcacctaccacggtgggacgagcgatccgtgcagcgtggcactcgcatctctgtgtactacagagtgaatgcctctgcgttggtcccattatgttcctcgtgccatcctgtgctggatctagaacctgggaccctgcgactctgttcgctcaggtccttttggcccagatctttagaaccagaccaactttgtatttgcgtcagtctggtgcgcaggtatacagatctgcggcccgaaggcctactactacagcagggcgccgcatgctgtgtttgattctggtcctgggatgttggtaccgcagagcgagcgcctgaggagctgtcgatctcgcgctgcagggtcttccatgcgtggacccatcgtcactgggcgggggtgcgcagagctctggtacatgggcacctctccttatcagcaagatccgaggaagaataccctggaatcgctgtccctgaataccttcagtcgtggtgccttcagccacagtgtcttgaccccggggtcgagccctaaaatgcaccctcttcggccagtcagcggacaggatctgttggccctttgc

SEQ ID NO: 534896 - DNA, 875 bp, Homo sapiens
ctacgggcggcgcctgcggttcctcctggccccaaggcagcgctgcaggcgcctgcggtccctgctgaccctgtggcaccgctgccgacccctgctggcgtgggccagcccgtgtcactgtggccatgcccggtagggccatcctcaggacagcgcagccggccccgtgtggtcgctgctagcccagtgccagcggtaccatgcccccgcgggcactcctcaccctccgaccacgcctgactggccgcctagcttcctcccaggacagtgctgctgcccccgtgcgggccttcctagccccgtgtcagtacggccagccccgaaggtccctgctgggcagccagccgccccggtggtcgctgctggccccaggcagcccagcggttagtggaagccacagagcagaccgggccacgtcacgccttcactcctgggcccgggacggcgaggcgagcagaagcagccgctcatgggcccggagcagcctgcccacccaagcggcgctcatgggcccagagcagcctgccagcccctgcggcgctcatgggccccaacaagccctgaaacccagcgtcgctccccattcccgatcgccttcactcctggggcagcgggccaccctgcggctcttctggtgctcctgtgcagccgtggggtcctaatggatctggtgcggccgtaagccggtctcgctactgggcctgggcatcttgcggccctgcggtccggggaccgacctgttcccggatgcagaggcatctgtacctgagctgtgctgagcctccattggttcgccccggtgttgctggggcacggacaggatcctcgggaagttggaacgagctaaggggtttagaaggcaggggcaggggaag

SEQ ID NO: 534897 - DNA, 300 bp, Homo sapiens
tccccatcagtttctcaagacagcaggtagaagcggtccgtcctcctcgaacaactcaatcagctctacgtgacgttcctgtgtcccttggactggttcagcatatcctacctcccttaaaaccctgacttccgaatgtggcctggctgcttctcaattatcttgatggcttactcctagctggtgatcaggttgatcgcatggtctgtcacttcaggcatgaagctgcgctcccctcagcacactcttctctgcagcgtggttgaccgttttcaataccttgccgcgagagagctcgtg

SEQ ID NO: 534898 - DNA, 518 bp, Homo sapiens
  misc_feature (470)..(470): n is a, c, g, or t
  misc_feature (476)..(477): n is a, c, g, or t
caacttgggtcttgttgcaatagtctacatatgatgaaaaaacacctggtggtagttttcctcttctctgaaagcaatggctagcatttatggagtattactattgctaggcactgtacgaagcactgcgccaatgtgatcacatttaatactcatcacgacccttcaaggtagtgactattcttgctattatctttaggccagaaactgaagagaaacataagatgacttgctcactgttccctcaagtaaatagactctcatctggctgaccccaacgtgtctgctcctcacagtccttgcctgcctcttgtctgcatcaaatggtcttattctctgtagacataacccttggacaccccagaagagaaacggagttattaccacctcagctcagttctggcacacacccctaaagctttaggcagctttttaatgcatgacaactacgaataacaggacaaggcagnctttgnncccacatgtcagagatcctgtattattctttactgcatttg

SEQ ID NO: 534899 - DNA, 490 bp, Homo sapiens
  misc_feature (111)..(111): n is a, c, g, or t
gcttgccttagcccatctgaacccagtaaggaaaaaggtcaagagttagaacctatagagaaaactgatagctcccaatttatccccatgaaaaatagtaaagatgaagcnagcaaagaaaaaatactctgtgaagtaagaagtccgtatggaaagtcacctaggaagcccaagataacagagtgtgtttaataggcaaattatcccggcccggcccaggcgcagtggctctcaccctataatccccaaaactttgggaggtggaggcgggcagatcacttgagccccaggagttcgagatctgcctagccaacataatggaaccccgcctctataaagaaatacaaaaattagctggcatggtgttgtgtgcctatagtcccagctactctgagagagcgttgcttgaaccctagaggttgagattgcagtgagccaggatcacgccactgcactccagcctgggtgacagactgagaccctgtcttaa

SEQ ID NO: 534900 - DNA, 759 bp, Homo sapiens
  misc_feature (191)..(191): n is a, c, g, or t
  misc_feature (379)..(379): n is a, c, g, or t
  misc_feature (383)..(383): n is a, c, g, or t
  misc_feature (451)..(451): n is a, c, g, or t
  misc_feature (477)..(477): n is a, c, g, or t
acgcctttttcgggtggttggggggcgctaatgtcgttttattatgtcttacggaggagaacatactgtgatcacaccctgaactggtggacgcccttctgatacttatatgttcatgggtcgcaagtgagatccgcacggaccgcttttacgcaacctggtaacagttatgttaggaggggcgggcagtnactataatgccggtgacccgccacatcggcgactacctaatcctgggaatttacctacttagagaagtgactgatcaaatcgctctgccaggttggaacattagggggggagtcgtggagggtccaacttgccaacatatagcggatgtcaatgcctatgcgatatttgcaatcttaagtattcatgnaacnatgggggtaatcctcagtgaaggagcctttcttatacagcgggttcgctgatgcctttttctgttgcngaaatataggcgccctctaaggggcnttgttgctataaaggagtgcacataggcggccatactaataagtgtgcggcttaactcgcaggttgtacctacaaaaacgacctttttggcccaataatagaaaaacctaccggagattggggcttggggttatgggatcgtgcagggggtaaatgggatatctaaaaggggcccttatgaaaagcttaaaataaaaccttcttattttgggagaaatgggggaacccacccattgggcccctcttttcaagggaaggagaaccccctccccaatcactgcg

SEQ ID NO: 534901 - DNA, 427 bp, Homo sapiens
gcaaaaaatgtgattgaagagcatggtccttcaaaaaaggcaataaacggcccaactagtgcttctggcgatgacatttttaagctccagggtactccaggagaagaaaagattaatcccttaaaaaaagaaacccctcaaaaagcaccagtcctgaatggtgtttcataaactgaaaaagttcctagtttccagtttttttccattacatttccaatagggcttgtccaagcttcccaaaaatagaatatggatccccagtttttacatcgccctttcagttcccccctttggaattcaaaaaggggggggatcctgaagaaatcatatgttaaacatactttgcccccccctgtgttataaaatatatcatcaaatgtcccttgagaatagtatatgtaccattaaaaaaaagttgctggctata

SEQ ID NO: 534902 - DNA, 248 bp, Homo sapiens
acagagcaagagtccctctgcaaaataaaataaaatgcactcaaaattattaacaaaacagaacaggcaaagatgcttaacatcattagtcactagggagatgcaaatcaaaatcaatgagataaccactacacatctattagaatggtcaaaaaaattgacaacataaaatatgagcacggctgctgagcaccaggaattttcatgcattgttggctaggattgcaaatagtacagtgatcgaccaa

SEQ ID NO: 534903 - DNA, 228 bp, Homo sapiens
ttagccaggtgtggtgctgtgtgcctatagtcctagctatgggggtggctgaggtggcaaggattgcttgccgcgcaggaaggttcccggctgtggtgagcatgggatcaaggacatctgcacgtgtagtctagggtaacagcagtgagaccctggtctcaataacacaaaaccaaaaacgaacaaccattgatttttctacagttgtattcgcctctaggtggtact

SEQ ID NO: 534904 - DNA, 173 bp, Homo sapiens
gaagacgagagcacgtcttggatgccttcgacgcttcatttaaagatgacttggagggggttcccgtggtcattccttttcagaggaagaaaccctatgagtgcagtgagtgtgggcggatctttaagcacaagacagaccacattcgccatcagagggtccacacgggagag

SEQ ID NO: 534905 - DNA, 730 bp, Homo sapiens
ggcgagtaagtggcgtgctactaattggcctccagtcctaggagatgagagcgagattgtttcaatttaaaaaacataaaacttttcatagagatttgtcacacctagatgtatgagaacatttcgcatgttgcaattgttgagagacgtgcatccataaagaagcttaggatgtggccagtgcactgtgtctcacgcatgctggtcccagcacttggggaggccgtagccgcgccaaagagacatatggcccggtcgggagtccaaggagctatgcttgagccatcatggggaacttaccggacgtctactacgggagatgcaaaaactagggtgggaacggatggccgtgaaccttgtaatcccagctagcttgtggaaggttgaaggcacggaagcaaattgttgaacccagggtaacacgaaggttgagcccaagaatcatgccaacgtgaacttccccaagcccagggggacaaacacagccagtttggaggaactcctggttccttccaaaaaacatatcaaacacatccattgtgcaaacaaacaaaatttttttgggcccgccgctcgtgcccttggaaaaagaacttttctacaaccccatgttgtggtgggagcccctggcccccccaaggacgttgagggaacacatagttgcctacaagttggcctcgaagaggaaaccgctggatacgcgaaatacttgtgctggggatacacaccc

SEQ ID NO: 534906 - DNA, 553 bp, Homo sapiens
cacgctgcaccgtgtgttcagagttatgaacggcaagaatgggtggcaatggtggctcctggaaaagctcacccagcagagttccccttacgtcggggccttggttacttgtccctagggctatttatatttcataacatttttatataaatacacaggagaaatagaaaatataagatctgcggggttggggaagaaacgttgagggactcagcaggaagccagagctggagaggtccattcaggccaacttgagctcctccttgacccctgttaggcttctggcttctccctcctatggctttctcctcttcggggacttctttcttctcctcgtgggacttgctctattttgatcctctgttttgactctcttggctcagagtgaagttggcagagttcttgcggtcccccctctacctcctcttcagaatcggagaactcttcctcacaggccatccgtttgtcacaggagcagatcgagatgcgcgtttcaggggcgtcatcgtcctcatcggcactctcctcatgatagcgtcctccggaatcgcgt

SEQ ID NO: 534907 - DNA, 574 bp, Homo sapiens
gcacgaggcgaccaaaggccacaaataaatatgcactgtttttaaatttttttttcattaaaaaaatacgaataaattccttaaacacatacatcattttgcttcaaattttacgtttgtaagaaagaccatttgttgtcttaatacctatgaagcactacttataatcttaattaaatctaattcttttctttaactttttttgagcatcgcttctatcaattatgtgtatacatacatacatacatataaatatacgcgcaggctaagtagaaaacaacgcaagatagaattactttatttgtcattcatcaagcgcaataaaatctctctaggtgtgcagtattgcatttttacgttcttagaggcggctatccattcgggtccgtaagtaggctcacattgatcgaacatattgtagagatcaacagtatccttgcctaaccttgcatatgtcctaaatagccaaacccatgtatctccgtaacgcgagcactttttcagagctctttctaaccattttaatgatgtttcatattgcgcttctgcataaaaggatactccaatctccaaa

SEQ ID NO: 534908 - DNA, 335 bp, Homo sapiens
gtggtcacgccgtattccaacatttgggaagctgaggtgggtggatcacttgaggtcaggagttcgagagcggcctggccaacatggcaaaaccccatctctactaaaaaatataaaaattagccaggtgtggtggcgtgtgcctgtaatcccagctactcaggagggtgagacaggtgaatcgcttgaacccaggaggcagaggctgcagtgagccaagatcgtgccactgcaccccagcctaaagcgacacagcaagactctgtctcaaaaaaaaaataatgaaataaaataaaaaatactataatcaaaatctcagaaaaatataataaatt

SEQ ID NO: 534909 - DNA, 1237 bp, Homo sapiens
  misc_feature (806)..(806): n is a, c, g, or t
acactcctactcctcattgtacccattcgtagaatcgcaaggggattcctaatgcttagctgaacgaagaattctaggctatactacaacgtacgcaaaggcccgcaactgttggtatggcccctacaggtgctgactacaacaccttcgctgacgcctgtaaaagtcgtatccagcgacacaggagccccgttaataatcccgcctcatattttgaggccagtcacctctcatatatcaccggcactcgcaccgttaggctcgtcgacctatcgctttttcgtactagtgaatcgcccttcttcattagggcgttcgcgctggtgctcgtcctcagacctaggtctccagtacctttgattccggaagccaaaccgcaaagcgcctcaagcggcgaggtcattcaaactgcacatcctgactcgagggagtgccagctctcgaggaacattcataacatctcagcgcacctggaatccagagttggcagcattctggagttctaaggtaggcccccatatccagaatcatggactaatacaaacgttcgcacgcccctcagcccgagtaccagtttgcttagccttagacaagaccaattaagcgttagactgacattgcgttggccttgtatgaaggggcatcctcactagcccctctgtcactagagaaccataggaaggctaggtactggagttgtcactaccgtagtgcgggtccattggacgcgctttcgcgtcgaatgagctagtagaatgttaggtcctgcacaacactaatcgggagaatgaccccgaatgggcgangaaacaccaactctgtacggatcggctccgacccgtcaccgtgtgtgcccgcgtaccagaagatttacgatgcttgcagagtcctcgcaatactttttgaaagccttgagtgaaacgacagggaacactaatttcgcgacgcagtgacatactttagcgattaagcaccggaaactaccggacttactccatctgtaatatagttagcctacaaggaactagatcatagccaaattaaccaacgtcagtaatccctaagtgtgacgtagtaaaaagagaatcggtcacgtgcattcccactggaagcatctactcacaaacactaattcttggtcaagcgagaaggaacccttagggtatcatagaccactgccccctggatacccttaagtggggagaatccggagcagcagaggcactgagcacaccag

SEQ ID NO: 534910 - DNA, 168 bp, Homo sapiens
taatgtcggccattatccccgacgaaaggcccctattgtgaccgacaccaacacggcgccattcgacaccagcgccttgggctcgaccctcattgacggcggctgccgctttgggttgtgggcgcctcgcgcggagcgtgtcgagttggccctcgtggcggatgacgg

SEQ ID NO: 534911 - DNA, 153 bp, Homo sapiens
ggggggggggggggggggcccttttttggggggccccccccaagggggggcgcgccgatttttttttttccccccccctttttgggggggttggggggttttttttttttccccccccctttttttttttttaaaaaggccccccccccccga

SEQ ID NO: 534912 - DNA, 632 bp, Homo sapiens
gtacaactttcggcactctaagtatttgaggaacagcacaatatggaaaaggaagcctcacctaagcaaacgtgtttgctgtctcttccgggatgatggattagactcaaacaaatagagggcgtttccgtttctttcctgttggcacagcagcagcaggaggcattcccacaggtcctgaaataataacatatgcactgagatcaggcagagtcagttaactgtacaaggcaaaaaacaattacaggtacaaaaagtagcatttacttcctaatgtgttatcaataaatatagaaaattcctgataccataaatatatttcatgactgtcaacatgggtcatattttaccattaaaacttagaatgaacctttcaaaaaagtaaatgacttacacctccccaccacataccagcttgaattttatataatgttttacagttttgtttggccagcatgcccatactgttaagacaatactctcagaggtgctagatgaaactgcagcattgtgaagaatctaaaattaaaaaagttatagatttcaaatttcatttccatccctgtgcccttttttccattaccctaagacacttccacgttaagaaggcgaaataatcactaatcttgaac

SEQ ID NO: 534913 - DNA, 217 bp, Homo sapiens
cccgatgtattcacgtggtccgggtcatccacctccccgtcctcgttctggaactccgacatgctgtggacacacactgccacgatggaggccagcaccacgctcagggaggagactcgcaatgagcttggccgacaggctataggctgtgtttgccatccgaatccagatcttcttgcggagtttcccgaatcgcagcaccacgttgaagtccatg

SEQ ID NO: 534914 - DNA, 299 bp, Homo sapiens
atatgatggaattacccaagatcggtgcagaaggtaaatgattaagccaggattttaatctaagtctgattaaatccggtgctttcaaccactttgctgtactgccttttcaaatatttccccttgaaaaagtaatattgggctgttttataaatgcatattcttttttcttttcttttttttttggagatgggagtctcgcttggtcgcccaggcgggagtgcaggggcataatctctgctcaaggcaagttctccttccggggttcacgccatggtccggcctctatgtcattttcg

SEQ ID NO: 534915 - DNA, 186 bp, Homo sapiens
ttgagctcggtcccctgcccgactaatttttgtatttttagtagagacaggattccaccatgttggccgggctggtctggaactcctgacctcaagtgatctgcctcccaaagtgaggggattacaggcgcgagtcactgtgcccagcccctccccattcttttctatctcaacaaatactgccat

SEQ ID NO: 534916 - DNA, 514 bp, Homo sapiens
cacggattgccatctggcatgttgcagagatggtggagctagaaaagatgaaacacaagtcccttttcagttggtgcactgggtatggtccgtgtagatggatgcagatttgctgaaatgaaatgtcggtttagacgagatcataccggtaaagcaggaatgacaaagcttgcttttctggtatgtcctaggtgtatggtgcacttcactgttatattaatggccaatataagtaaatatcagataatatatgtatagtgtatcacaaagcttagaccttcaccttccagccaccccacagcgcttgatatctcagagtcagtcatgggtaatccatgtgtagtcccaaagcacataagctagcaagcagcaactattctaggagcactaccatcggttatcaacatgcaatgccacacacatagaactccaacatcaaatttcattgccacatgattgactgtagttaatttggtcacagaattctatggccttgatcttaattgcttccaaa

SEQ ID NO: 534917 - DNA, 484 bp, Homo sapiens
actctggataactcagaggccccatccaccgaataggggtatcattgtatgtgcccagaagcctaaactgagtaccaggtacgatcggactgttaagtcaagtccgcagaatgaggggacacggcttcgaacaggatgctctgttggaggagagatgcaagggtgtgtgtagccaggttgccagaatataccagaggaaagacacacaacgccagggtgggctatagagaaccctcgatgctgctccatactgggggcaggcggctacttcgtccagctgactttgggaatgtcgtaatgctccgtgagtgtgtccaggtgtctgttgaagtcctccactctctgcttgtgggttttggatgccttctttaggatcctttccatttgccgcttctcctgcattttctcgaaggccgcctgggccggggtccgcttgtccaggccgcgccgcttctcctcctcgttctttttgcttgttccgctg

SEQ ID NO: 534918 - DNA, 318 bp, Homo sapiens
gtcgacctctagacggactcccctttgtgggtcattgatgtgtcatatacttattcagttttctttgtttacaccaaaaatgtaagagtgtatacatatattgtgactttatatcttagcttttgcagttaaagtgtaacacatgctgcactgtgagcctttttaaaaccagaacgttctgtaaatcccaactcatacattctttcagcttcaccatctcaccttaaaatgacacccgatgtcgatatcttgaggaacaccgaggccgtagaagcaataaccgacgtcttaccagtttattccactgggtatgtatag

SEQ ID NO: 534919 - DNA, 363 bp, Homo sapiens
  misc_feature (52)..(52): n is a, c, g, or t
  misc_feature (60)..(60): n is a, c, g, or t
  misc_feature (72)..(72): n is a, c, g, or t
  misc_feature (148)..(148): n is a, c, g, or t
  misc_feature (305)..(305): n is a, c, g, or t
agtttcactcttgttgcccaggctggagtgcaatggcgtgatctcggctcantgcaatcngcaccttccggnttcaagcgattctcctgcctcagcctcccaagtagttgggattacaggcatgcgccaccatgcccggccaattttntatttttcgtacacacagggtttctccatgttggtcaggctggtctcaaactcccaacctcggtgatccgtccacctcggcctctcaaagtgctgggattataggcatgagccactgtgtccggccagctcaaacaattttaatgcttctttcaagnctattagaaacctttaattgcttcttaagtttctcccccaactatggaggaagcatat

SEQ ID NO: 534920 - DNA, 693 bp, Homo sapiens
  misc_feature (175)..(175): n is a, c, g, or t
ggagaagagggggaagagaggcagagacgacagatacggagaagggcgaccgtgctggtagccactgtgctaggacttgcagggttttggcaagctgaaatcgcctagtcagccgtgaagtaactctaagtccagatgggcgtggctggcacgaggaacagctcttgagctcaanaaagaatgcacagcatgagtcgacgcgtcaagatggaatgtgtgaggctctcaatgatgctgagtactgggaagggcgagtgaatatccttaagattcgtgcttcaagttaatcgtatctggtgatagaagccatagtaagcaaggagtgagatagtagtgttaagccgtatggagacttagactagtattgtgcttatccaaacggtggattacttgtttgaaccgtagtggagtgttgagcgtttcgttttcagtgaaggataagttactactcgtgtttacaattagctaattgttacaagtattttcattaccttaggtatgtggacatattagagggtttatatgtgagatatgcgagatagagttgtccttttcttaagtagctgtcatatggttaggaaggatagcctcaccttaagctaaatgacgaactgtagagtaagtttgtgagaagaaagctggaatctctgctaaagtctagttaattgcatgttgtgctgaagggaaaggagg

SEQ ID NO: 534921 - DNA, 599 bp, Homo sapiens
  misc_feature (151)..(151): n is a, c, g, or t
ctgctctatcatcggttgggaagcgcgggagcgcatgtaggataagtagaagacgtagggacgttgccttggtctgctgagggaaatccctgtttcgatgactgacggtgcgtgaggtattcgtcaacagacttaagatcacgcgccgggntggagaaaggaagtgtgctcgaacagatgcttcagtggaggtcctcgaaggtcagttatatggtatcgtaatcaaagcagagaagtcctattgaagagggcagtatttggcagtatgtacacaaacctgggaattcgaaatgggcgagggatgggcaagacaaagcgtggcaacttctatgtacctgcagaaacccaaatttgcgcgtttgtcatcagaaatcagagggtatccaattggacgttgaaggcccaaaagggttcgaaaaggggtgtgcgccagcttctttccgccttccgtcaaattcttcaagtggaaccctttgttgaagctcaacaagggcttcgattaaccatgctgaggatttgtagagccatattatttgcaatgggggttaccccaaaatctggaaagtcaggtaaattgaactaactcttacaaagcgtgg

SEQ ID NO: 534922 - DNA, 427 bp, Homo sapiens
cagaggaaatccagattgtcatttttacactctggaaagtacatatgtactgtatctaggctcaacgccatttcagctatgcagatcatatagatggaacagaggtgacacagaatgatatgatgatggctgacaaggctcttcggaatcctagcacatgttgcatcttctgagttaccccagtatcgtctgatttccatcccgggtgatgccaggaaaaagcaatgtcggtatctactagtaatccaaaggaaagagtcctggtattatcgacgaagactatcatgacagccaaagacttgtaggagaaagtacaaatcgtgctacattatattatactacgagagagttttatcatgaaatgctagaggaaagaaaggaaaagaagaaattctgtaaaacatatattgaagaccttgtgaaggaa

SEQ ID NO: 534923 - DNA, 109 bp, Homo sapiens
actcactcgctgaccttgctggagcctccccgggcacctcaggcatagaaaatgagctcaggggatctgccccaccctggaccccagtcccgttggtgctgtccgagga

SEQ ID NO: 534924 - DNA, 179 bp, Homo sapiens
gcttgtcaggagactaccaggcaatgaaactgactcttctgtagacctggatagagcaataaaacactgactgtgaatgatgtaaggaacacttactcctccctagaaggaaaagtcagcgaagataaaagcagagaatcccaatctcttctaaaaggtaaaaatgacacaaaataaaa

SEQ ID NO: 534925 - DNA, 254 bp, Homo sapiens
gatctagctacttgcgaagtgaaagtgggaggatcaccggagcccaggaggttgaactgcatttagctgtgtttgtgccacggcactcagcctgggcaacaggagtgagaccccatcttaaaacaggaaaaaaaaagttgaaagatgaaagtcttttttagggaggatgttaagtacagttcactagatggatcctagtttgagtctgatctctgggtggcctcaggaagctacatgcaaatcaggcagttaca

SEQ ID NO: 534926 - DNA, 123 bp, Homo sapiens
cagtatgcaatagtacaataatactggaccctacatctatcaggagtgatgatctctcaccatttatcttaccacttcgcaaagtgaaaacgatacacggccattcatagcagtcttgttgaa

SEQ ID NO: 534927 - DNA, 708 bp, Homo sapiens
  misc_feature (575)..(575): n is a, c, g, or t
cggacgcgtgggtccggacgcgtgggcgactcccttctttatggcgtcgctcctgtgctgtgggccgaagctggccgcctgcggcgatcgtcctcagcgcctggggagtgatcatgttgataatgctcggaatatttttcaatgtccattccgctgtgtggattgaggacgttcccttcagcggagaaagattttgagaatggcccccagaacatatacaagctttacgagcaagtcagctacaactgtttcatcgctggcaggcctttacctcctcctcggaggcttctctttctgccaagttcggctcaataagcgcaaggaatacatggtgcgctagggccccggcgcgtttccccgctccgagcccctcctctatttaaagactccctgcgagcctgtgtcactccaggtcgcgtccacatcccttgccgggctgccctcgtgtgggactagggtttcccgggcgagagactgaatcccttctcccattcttcttgggcagtcctggccgcccgtgtgaggagggctagaggctggcggggcttgtatccgtcatctcgcagccgcttcgncttgtgttcccgatgatctcaactataatgagaatcttggctctgctttccaagagattgaaattaccaagacacaaaggggattggaattaagacagggaaccagtaaaaggaactacttatacaagttggc

SEQ ID NO: 534928 - DNA, 281 bp, Homo sapiens
ccccgtgagcctcgctgtgcagtccctcgctctgggtgcacgggcaggaggtttggcggctgtgtgcactgcacagtgttctgggtcccctctctgagccttggtgtgtccatctggggaagccgggcacccctcatccctgagcagcggtgcatgcactgctggttcagctggactggggcgtgtggagtgcagagcttccggtgtcggggcccaggcagcattggaggaggacagagtgagtgccctggggctgttggctatgagacaacatgagctct

SEQ ID NO: 534929 - DNA, 606 bp, Homo sapiens
caggcataagcaccacactggctgaacatcagatatttaaacggtgtagcccagagtctagtggtaaatgttacttatattggcgactagtgatttctaatgtttctgggatatgctccctataaaatgaaatgttttcctggaacaatgctagattaggagttgcattccgtggccaagacatgacatcacaactaagtaatagacagtcaccagcaatgaattttgaaaagctacaagaatactattaacctatagtaagccattcttaaaatttccagaattatgttcccagtacctctattttctgaggctagaagaagcttacgaggcatctgatgatagattccccagagctggcatggatcccttagggaccctacgtaatctgactgtctgtccacctgactggattcttctaaaaacacggattgtcacttaatttcccctaccttattacgaactaacatcaggtgggcaccatcatagagcctctttatttataaacagaccatacttttgagtagacacactcttaactggagaccccgacgctgcttcaatacttgtcctcacgtgcttatcttgtcccgacttactacaacc

SEQ ID NO: 534930 - DNA, 385 bp, Homo sapiens
  misc_feature (145)..(145): n is a, c, g, or t
gctcgcgcgcctggatgcctatcatatagtaaaacccagcccatgacccctaacaggggccctctcagccctcctaatgacctccggcctagccatgtgatttcacttccactccataacggttcctcatactagggcctactanaccaacacactaaacatataccattgatggggcgattaacaggggaaagcacatcccagggcacacacaccacctttccaaagggctttgatacgggatatcccttttattccccagaggttttttctcggaggattttctagctttacactcagcagcccgccccagtagaagcacggcccacaggacaccagcaagcgggaggccatctaacaaatctttttggatagggttacacta

SEQ ID NO: 534931 - DNA, 483 bp, Homo sapiens
aggacgggcacatgaactcttgtaatcactgtgtcatagcatagtacgttagcagtggtctttgtgcatcgagtatgctagaccatcacctatatccagagcgagccatgatgctaggagggaaactggacctagcaatggaacctactgagccagctatccaggagacctgagctgtaatatgctggattacactaggataaatgaatatccacaaagtaccatttcaacatcatgtctcaaggactgattaaaaagcagatttgaacataccgatacttattaggaaaatagaaaagcttcccagaaacgggttgaagtagactttctatatagctgcttagatagaggaatatctcctggtacttgggcagtaactcctggaagaaccagatcggaccattccagaaaaactccaaactttcaggaagattactattaatgtgtagaacttgaacgttcactttctacacaattaaaaca

SEQ ID NO: 534932 - DNA, 393 bp, Homo sapiens
  misc_feature (36)..(36): n is a, c, g, or t
  misc_feature (45)..(45): n is a, c, g, or t
  misc_feature (362)..(362): n is a, c, g, or t
ttcagtatagtgtagatctactgtgtaattaatttnctgtttctncgaggagctgtgaaaccaaaggacatataaaactgctcttttctccctgtttctgcctgcagcttggtcctaaatgtgagacaattgtgaaaagtggaggacagagccacctggttaaatacagccccagctttctggtgagaggactgaaaccaagatgtgtcaagtaactagaatgtgcctggacagatactgtagaaagcaaaaccataaagttgttcatgagcttgtggacgcacctgccagctgtgaataagtggctctaatcccgaacaacttacctaaaaagagcctgagagcttgaactgtgcaatggnccacttttccagtcctcacttgaccactggg

SEQ ID NO: 534933 - DNA, 1013 bp, Homo sapiens
cagagcaagactctgtctctaaaaaaaaaaaaaaaaaaaaggagcatccttggtaccaagacagggggaaaagcaacttattttttcccggcccacccagggaaaaaacttccgtggttaacctttggatgttctttcctttagtagtttcgtctaatataaaagatgctgctcctcctagttatacccaccccacttcttaatctacatgctccctttgagagaattgaccttacgacacagtccttcaaaatcctccaggcctggtactggaatttactagctcacgcaccagcgcgatagtgaagacgtccagctacgcgtggtggaaccaattgggcgggttacattgggccccagagaatctgacctctaagcggcgctgaccgagatcaacctggcgtgctccccacgaaaggggacacccaagtcaccattcgagaagaaatttcgccattacattctccttgcctgggtcacacctgggggtcgaactaacgctgaccagcgcctttggcctttcaacttttggcatcgtgcgcagcgagcttgacgaagaggagtttctcctacacacagacaacagaaccgggactacatctcacagggaagatccccaagggacaaacgacgacttacatacttgccagtccccacactaaacagggcaccaattatgccggatttgggtgggaagaactgaattacttggccactccttaacggcgaaatatgggctggcccgtgggaactaaatgtgtaacgtgaaccttggtcttgcgacagggtgcattcaacgaaccccggggtgggtccatgccggcgggtctgccaaggcttcagcggacgactagggacaacaactctggtagttactggtaactcctcaggatgaaacacattttcagctcacggaagatacttagcaggttgctaccccagcccggagtatcattcctacaccgggggagttacctgagcacaggacagcggtgcaactcagacctttcgaa

SEQ ID NO: 534934 - DNA, 147 bp, Homo sapiens
agttctaaccagctactgtgcatctcctactcctttctgggcctgatcttccaacagtcggaaatggcgagggattttactcccgagcccgtggtggctgccatctggcgtcgcggtggctggaaggccggccaccacggacatcgt

SEQ ID NO: 534935 - DNA, 260 bp, Homo sapiens
atcacaaaagcggcaataaataaacactttaatggccaggatggataaatcccactcatgccttcaggatttactgtaaatgtatggcgttcctgttgtggctcagcagtaatgaaccaaactaggatccatgaagatgcgggtttgatccctggacttgctcaatgggttaagaatccagtgttggagttcctgtcgttgtgcggtggttaacgaatccgactaggaaccatgaggttgcgggttggtccccgcttttg

SEQ ID NO: 534936 - DNA, 642 bp, Homo sapiens
cgtttgacatctctgaagtgaagatggggtagaatccgacattgactcaggatatgaaggttcatcagtcaaaaatcggtgttctatgcataagatgtgtgttcaaagaaaggtgcaagtcataggactcatggtgggcggtgttgtcatagctgttgtcagggtcgtcaccttggtgatgctgaagaagaaacagtacacatccattcatcatggtgtggtggaggttgacgccgctgtcaccccagaggagcgccacctgtccaagatgcagcagaacggctacgaaaatccaacctacaagttctttgagcagatgcagaactagacccccgccacagcagcctctgaagttggacagcaaaaccattgcttcactacccatcggtgtccatttatagaataatgtgggaggaaacaaacccgttttatgatttactcattatcgccttttgacagctgtgctgtaacacaagtagatgcctgaacttgaattaatccacacatcagtaatgtattctatctctctttacatttgggtctctatactacattattaatgggtttagtgtactgtaaagaatttagctgtatcaaactagtgcatgaatagattctctcctgattatattcacatagccc

SEQ ID NO: 534937 - DNA, 165 bp, Homo sapiens
tgaatttgtgtaaggaacaaggctcttgcttgccctgcaggcaaaaaaaacctctgtgtgccagcctcttcagtgccttacggggacggagctcgaagtatcccttctcggtggcgtggtccttactcctggtgagcgtgagtggggatccatctagatgtcgac

SEQ ID NO: 534938 - DNA, 208 bp, Homo sapiens
  misc_feature (150)..(150): n is a, c, g, or t
  misc_feature (175)..(175): n is a, c, g, or t
  misc_feature (190)..(190): n is a, c, g, or t
cagtatccaaaggagctataccaaaatctaaccaagtaaattttgggattttgcctctttgtgctttaaagtaccagggatttctgtctctatgggataggtcttgggagaatgttaagtaatgggatgaaactttttaaaataatttgntaaattttaccctaaggtagggacngtagtccttactgcnaatccaaataatttactg

SEQ ID NO: 534939 - DNA, 642 bp, Homo sapiens
  misc_feature (305)..(307): n is a, c, g, or t
tgctatgccatggagtaaggggccctgtgagggccattctccccaccgcggtgggggtttaggggagtctccggaaaactcttttaaagtgttgtgccccctcaatctgaccccgggatatggcctcttgtgtcggggttgggcccctgggtttccccccccggttcgggggttttgaggctctacccccccggttgccccagttctctggggtgggggttttaccaacccccccggggttttggggggtttcccgggggggtgttctcccaatagggccccgccttttttttttttctttttcnnnttttccccccccgggggggggcgcggattttcccatttaaaaattttttttggggggggcccccccccccggtaaaagcggggcccccctatttttttttttccaggccccccaaggagggaaaacgggggggccccctttagttttttttttgggtttccctaaaaaaaaattggtttccctggttttttcccccaaggggggggccccgaatccttttttgttttttgcccccccccccccggttgggggggggttttttgtttttttcccccttttcccgggtccttttggggggggggttttctgggttttttttaaacccctttggttta

SEQ ID NO: 534940 - DNA, 274 bp, Homo sapiens
aacctaaccaggtgcgatcgcccttcagactcgccctgagctacctccagtcaacataaagctcggactcattctccaagcccaggtgtgatccgattcttccagtataccaagtcaagaacctgggatacagaaagccctctgtccttgagacaaggtagagggtctaactgagcttgttaacacaagccacctatagacagcaaaactaaaagatcaccctgtaacacacgcccactgaggcttcagaagctgtaaacatccacccctagac

SEQ ID NO: 534941 - DNA, 890 bp, Homo sapiens
  misc_feature (3)..(3): n is a, c, g, or t
  misc_feature (78)..(78): n is a, c, g, or t
  misc_feature (83)..(83): n is a, c, g, or t
  misc_feature (90)..(91): n is a, c, g, or t
  misc_feature (94)..(94): n is a, c, g, or t
  misc_feature (104)..(104): n is a, c, g, or t
  misc_feature (124)..(124): n is a, c, g, or t
  misc_feature (131)..(132): n is a, c, g, or t
  misc_feature (138)..(138): n is a, c, g, or t
  misc_feature (183)..(183): n is a, c, g, or t
  misc_feature (187)..(187): n is a, c, g, or t
  misc_feature (189)..(189): n is a, c, g, or t
  misc_feature (193)..(193): n is a, c, g, or t
  misc_feature (211)..(211): n is a, c, g, or t
  misc_feature (225)..(225): n is a, c, g, or t
  misc_feature (229)..(229): n is a, c, g, or t
  misc_feature (233)..(233): n is a, c, g, or t
  misc_feature (245)..(245): n is a, c, g, or t
  misc_feature (247)..(247): n is a, c, g, or t
  misc_feature (249)..(249): n is a, c, g, or t
  misc_feature (257)..(257): n is a, c, g, or t
  misc_feature (269)..(269): n is a, c, g, or t
  misc_feature (272)..(273): n is a, c, g, or t
  misc_feature (295)..(295): n is a, c, g, or t
  misc_feature (302)..(302): n is a, c, g, or t
  misc_feature (306)..(306): n is a, c, g, or t
  misc_feature (315)..(315): n is a, c, g, or t
  misc_feature (319)..(319): n is a, c, g, or t
  misc_feature (324)..(324): n is a, c, g, or t
  misc_feature (334)..(334): n is a, c, g, or t
  misc_feature (338)..(338): n is a, c, g, or t
  misc_feature (343)..(343): n is a, c, g, or t
  misc_feature (352)..(352): n is a, c, g, or t
  misc_feature (357)..(357): n is a, c, g, or t
  misc_feature (365)..(365): n is a, c, g, or t
  misc_feature (382)..(382): n is a, c, g, or t
  misc_feature (387)..(388): n is a, c, g, or t
  misc_feature (397)..(397): n is a, c, g, or t
  misc_feature (412)..(412): n is a, c, g, or t
  misc_feature (414)..(414): n is a, c, g, or t
  misc_feature (416)..(416): n is a, c, g, or t
  misc_feature (426)..(426): n is a, c, g, or t
  misc_feature (430)..(431): n is a, c, g, or t
  misc_feature (433)..(433): n is a, c, g, or t
  misc_feature (454)..(454): n is a, c, g, or t
  misc_feature (484)..(484): n is a, c, g, or t
  misc_feature (491)..(491): n is a, c, g, or t
  misc_feature (501)..(501): n is a, c, g, or t
  misc_feature (512)..(512): n is a, c, g, or t
  misc_feature (525)..(525): n is a, c, g, or t
  misc_feature (531)..(531): n is a, c, g, or t
  misc_feature (536)..(536): n is a, c, g, or t
  misc_feature (538)..(538): n is a, c, g, or t
  misc_feature (544)..(544): n is a, c, g, or t
  misc_feature (777)..(777): n is a, c, g, or t
  misc_feature (811)..(811): n is a, c, g, or t
  misc_feature (866)..(866): n is a, c, g, or t
ggntccgtccccgggggccttttttccccagttcccctctacaggctagctcatccctctgggtggtcattccccggntaaanttgaaannaangatgactgcnccacctccctagctcaaggnctccttnngggggngacgcgtgctttatcatcctcctgccacaactcaaatagtggttntttncnaganggtctgttcccacaaatnaggaccctaaagtnttantttncaaaacccaaantncnacaatttnccccacactacntanngttttacgtgaattgaaagttngcccttntgcntggttgtcnacantttcnagctcttgtntttnttttnctttttttnctttntttcttgntttttttttttcttggngggtnntggtttttngttggtctttgtttntnanttctttttgntggnnanttggtggccaaacagggctangtggctccctcttctttgtcatttttcacncctggtnatttttttgngggcagctggngtgctccccacgntatttntgctncngccttnccttcttgtctattccttgggcaggaacaagctccagccttcctccacatggctgaggtaatcagcacccctaccccaggggcatcttcccagcctacaaagcaggaaggagcctgtgcagaagttacattttaaaaccagattttcacctgaggcgtcaaccagatgtcacctctgcttaaaactccaactgcaaggctggcaagcagcacagaggaagtacagatccttcntgtgtcactccaggcccagaggaactgagaagcnacctgctgttccggcccttgggctgtttgggaaaagccagcagtcagagtgccanctcaagctctgattatcccctcct

SEQ ID NO: 534942 - DNA, 192 bp, Homo sapiens
ctgaactaagccaaggatgttttagcctaaggtctgtataagaactgatcagaggcttcgtttttgccatgcgtgtgggatgataaagttactgtcacgtttgacaggaagaacctgttgtatatgtgaccctaattatatgcgtgtcagaatatgtagatgaggcaaataaatgagagctcgtcattaaca

SEQ ID NO: 534943 - DNA, 112 bp, Homo sapiens
  misc_feature (66)..(66): n is a, c, g, or t
ccgacgaacacgaaaagaaaactttgagtagatcactatagtggggcgcctccagcgtccttttantagaccggaaacagaaccgagcgccgagtcttgagcgaggaagcgg

SEQ ID NO: 534944 - DNA, 289 bp, Homo sapiens
cgcaggcggccggtcgggcgtccgagacggcgcacgatgcctatccaggctgcaggtatataccacggtctacctgcttgcctactcacagcaggctgcccatgcccgactggtgctgaccactgatgcctaagagtctgcgtagccaggtcatacattgccaaggtcccatccagcgtgccaacagctgccagagtgcatcaaactgcataagcccctgtgacgccacccgcagtgtgactccctctcgtcccctttcgtcccagcgctgagtctgaccatgccacag

SEQ ID NO: 534945 - DNA, 806 bp, Homo sapiens
atcgcaccactgcactccagcctgggcaacagagcaagactccgtctcgaaaaaaaaaataaattttaaaaactacacattgggtacaatgtacactcctcgggtgatgggtgcaccaaaatctcaaaaatcactactaaggaacttatccatgtaaccaaacaccacctgttccccaagaactattgaaataagaaaaaagaaaaaaaaaaaatcactgattgcaggtcaccctaacagatataataatgaaaaagtctgagatgttgcgagaattaccaaaatgtgatgcagacacgaaatgagcatgtgctgttggaaaagtggaacagatagacttgctggagacagggttgccacaaagtttcaattggtaaaaaatggtgatatctatgaaatggcaataaagtgaagtccaataagaaatggcaaaaaaaaaaaaaaaaaaaaaaaaaaaaaaaaaaaaaaaaaaaaaaaaaaaaaaaaaaaaaaaaaaaaaaaaaaaaaaaaaaaaaaaaaaaaaaaagggggggggggaaaaaaatccgggggggggccccataaatgagccgcacccaccatttatgaaaaagagggggctccacaaaggagaggggttattaaaaaagagacgaaggggggggccgattaaaaaaccagggaggggggaaaaaagctttatagtggatacagtggagaagaaaccaactgtggggggggaaaaaatggagaaccacaaccagaaaaatttatgcgcggaagcaataaagggagtagaatggaaaccaagtttttcggggaaaatt

SEQ ID NO: 534946 - DNA, 303 bp, Homo sapiens
atcatttccagcgtatactgcttcagactaattgcgactctttctatcattgccttctaaagtgttcaataagagttctctcagacgagcatttcagagaacttgcattcatcagcagcaatatgtagagaagaatggtatcctgtgctgcacaataggacaggaaggaagaaaatatatttactgagttctaatgggttagcctgaatgttgcacagtttcttcacaaccgatgggggaataattcaacatggtgtccaacaacgttctaacgacgtgcttcatctcaactggttactatga

SEQ ID NO: 534947 - DNA, 322 bp, Homo sapiens
  misc_feature (23)..(23): n is a, c, g, or t
  misc_feature (30)..(30): n is a, c, g, or t
  misc_feature (58)..(58): n is a, c, g, or t
tccccaagagttcctgctgctgntgggggntgggcttccctaaatgtcattggacagnttgcccccccatccattcaggtttttggaggtccttttttcacccctggaaaaacaaatgatttgttaacaaaggactgcccacctccggaaattttgacctttgtttcctccgtcctgataaaaggtccaccccccagggccaggtcccagttatgtagacccccgcccccacctccaacattgcacccttttgccctgcccccctggtttcaccccctttacactcacatttttatcaaaaaaagcatgttttgttagggca

SEQ ID NO: 534948 - DNA, 145 bp, Homo sapiens
acagttcaaccacacctctagcttccttcactactgttgccagtgagcctccagttaaacttgagccaccccctgtagaatctgtgtcccaagctaccattgtcatgatgcctgcacctcccgcaccaccaatacagggtaccga

SEQ ID NO: 534949 - DNA, 252 bp, Homo sapiens
accaatgattgcgcagcagtgcgcgcaggtgctgtaacgttcgtcaccgcgtgtcgtgtgcagagataccgggtgattagctgttcaaggtgcaaagccagtcgaatcggtttgaatctatcgccattttatacagaacagtcggtacagcatctatacagcgaatgatagctcggcgtgatgcacgcagtactgccgcgtgagccttcagtctgccggtcgggctgtcggttatggtaactatagatgatt

SEQ ID NO: 534950 - DNA, 343 bp, Homo sapiens
  misc_feature (14)..(14): n is a, c, g, or t
cctttcccttctancagcaatctgtgtagagtattaccctactgcatacagccttaaattatttaagcatattttgctcatgcctataattccagcactttgggaggctgaggagggcagatcacctgaggtcagaagttcaagaccagcctggccaaaatggtgaaaccccgtctctactaaaaatacaaaaattagccaggtgtggtggtggccacctgtaatcccagctactggggaggctgaggcaggagaatttcttgaactcgggaggtggaggttgtagtgagccaagatctcaccactccactccagcctgggtgacagagtgaggctctatctc

SEQ ID NO: 534951 - DNA, 408 bp, Homo sapiens
gggctcggaccgttcttcatcatactaccaataagacaaagaaaaagaagttgggttgagtgtggtggctcatgcctgtaatcccagcacttagggaggctgaggcgggcggatcacctgaggtcaggagtttgagacaagcctggccaacatggcgaaaccccgtctactggccgggtgcggtggctcatgcctgtaatcccagcactttgggaggctgagacaggtggatcacgaggtcaggagattgagaccattctggctaacatggtgaaaccccaatctctactaaaaatacaaaaaattagctgggcatggtggcacgtgtctgtggtcccagctactcggtaggtatgatgaaggacgcgtccttcatcaatacctacctttcttacgtaacttttcttt

SEQ ID NO: 534952 - DNA, 302 bp, Homo sapiens
gcggcgcagggtcttgccgagctcggccctcgaggcggcgagaacatgggtgcgcagtttcttgtgtgaccctccggattcggcgcgcgtgctgtccccccgcgagtgatgggttttcgtgttttcacatacggtgggtttacggggttgttgggcagcgcagggggctccgccgctgtggccctcgtgctgattgctacttgggggccagcgtcttgggccagcagccgcttcctagaggaccaggtggacagtccttgaaaagttcggggcgcattcggcactttttgttctctggtgta

SEQ ID NO: 534953 - DNA, 396 bp, Homo sapiens
tatccatcaacagggttatgctctgagtgtttactcttcggatgtcagcactgtaaggtatgatcgaatccctgatctgggatctcattatgggtcatgtcactagatcctgcagtgctgagcagcagtctgagcttctcgaatataggtggcaacagcaggcccccaggtcagctggcatttatgacaggctctacattgggtcagacaatggagtatagccctggtcccagctctccaagcatgcagcaatctcgtcgccagtataaggcacgcaggtcagcagctttagttccttgtcagtcacacacagtcagccacgaccaggaccaggcctaaaccgcagaaatcgggtcagcacctcgcggttaagcaaggaggcttcgattgggtccg

SEQ ID NO: 534954 - DNA, 199 bp, Homo sapiens
aaggccttccaggacccctatcaggacctgggggccttcagtttttccaggaagtgcctggcccaacaaaggcaaaggattcttccaaagagaaaaacttcaaaaaaggcccccccttccccctccttaggcaactgtgggggcccctcctgtgtggctttgtatgactgttgtttaaatataaaaccctgccccctta

SEQ ID NO: 534955 - DNA, 191 bp, Homo sapiens
gacacggagtctggctctgtcaccgaggctgcagtgcagtggtgcgatctcggctcactgcagcctctgcctcccgggttccagctattcgcctgcctcagcctcccgagtaactgggattacaggcgcccgcccccaccacgcccagctatataccagtgttcttgccacaacccttctgtcgtcttctc

SEQ ID NO: 534956 - DNA, 909 bp, Homo sapiens
cacggacatgaaagagagagttccagattgtgcgcccgtgctagcatgagtggggtataatatgcagcgggtcaaaagttgttgttacatggtgcgcaatttatatgtcttcggcctggtgatgctaatgtcccttgggaaccacaagtccattgtgttgggcgccccgcccggaatctttctcgcgccccgcgggcaatgctttgtcagggcacgctttaacgttgctgtagaacaaagactcccggcgaataggggaacgtgatacttgtcgtggtctccgcaagcgctttcccttggaagttaccccgaggggtgtccaccccgggcaacaataaaagcatttgatgcgggtccccgctttcgcagagggcccttttttgtcctgtttaattaggggccgcttctgtccagaggccccctgttcatgccgcccctcgtggaacatgttaagtgcaatgagcttgtgtgtgaaaccacgttgtgggagttttaacggggtcagtgccccttcttggaaggattccgtgattgtgttgcgcgtccaatagtaatatggcacaacccgcggggctcccacaaatggaatatttatataagtacgcctgaaaagcacatacactcacgcccttgtttccgagtagaaaacctctcatccaccttgctacctgcattttatagaaatcacagcatcatggtaaacatgccaaatcagtaaccagcaaccctatagggttgtacccatcactttcggacacctgtgccttcttagttcccccactagtaatcaaaaaacactccttccaccctacctttaagggggaaatacacgttgtttagtcttacggtctaaatttggccggaaggcgctatcccaacaaaaggcgcaaaattttgtcaaacataaca

SEQ ID NO: 534957 - DNA, 641 bp, Homo sapiens
tttccaggttgtaaaccaaaccatgggaataataaatgttctagaactctctcagaaccctgtgttaatcctgagcatggggttattaggtatgtgcaaacttccacggtaacactatgagaagtctgatcccttgaccatagtggtcagtgtcctggtacgttgcctcatatcactctcaaggtttcatatgatccggcagacatcacatagtctgtagtaagtactcaacatgcatcatctatctggcttaaggaataatgcagtatcgccataggaagacctcagttttattactatgcaaagttcgccgccatcttatatcagatgctttagcaatgtagtgccaccaggacgagttggttatatcgcgctttctccattctgttaaagcatgtcaataaagctctgcattatattcacctcatccacggaggctatttgcagtcgctatgagtaagaatacgtgctccatgcatgatgagttccaccatgttctaaaggctcgtgttggtcacacatgtcggtcctcagggtcaagtccagctcacagctgttcagtgtcatgcaggaggagcggctatgtatggagagaggtccacatctcaatttacaccgagcgtcaccgtctatgaattaca

SEQ ID NO: 534958 - DNA, 464 bp, Homo sapiens
cgattttttttttaagaaaaaaaacaaaaacaaaaaaaacctcttaagctatttggtaatcctctccctccggggattctgtatctagattgtgaaagctgtcagagaatggagtcagggaaaaccgtgatgggaaagttctcactaataattgcctgatataaagaattagcacaaaagactgccaaaaccacaaccttgcacaaaggccacaaaagtacacaaaaaaatgcttcaaggacatttgcgcagcaactgcctgtccaaccttggactgaccatcccctttgttactgatctttgtacccaaggataattgtttcaaaacaacttacgtaatcctcctcgtttttccttttaaaccccttatcttcctttacctccctgaatacacctatagtttactatgacaccatattctacattgcaatgcccactttcaaataaatttgtcatgtttggca

SEQ ID NO: 534959 - DNA, 1016 bp, Homo sapiens
  misc_feature (525)..(525): n is a, c, g, or t
  misc_feature (534)..(534): n is a, c, g, or t
  misc_feature (643)..(643): n is a, c, g, or t
gccatccatgcagctgcacctatcgcagtcatgcaaccacgtcagctggccgtcaccagccggcaactacctgcaatatgggcaacaggccagcagccaatagatgaatggcttgtactatcgtaccgtgaatagaaattttatgatagacctaggtagaatcaagacctgtcaccctaagcggagagcccgtctttttggtgggcatcactctgtccgtcctcggacatcacttcgaggagagacacatgcaggacaacatagtctgcagacagactcatgagtagaaggcatagagcgcacagatctatcgcatctcatgaagggatcaacagggatttcggtcgttataatcctgaccttgagcaacactccgaaaacagcctgagctggcagtcattgctccaagaggtggaagtcgtgggacctaattgatgctcaactcacggggaaagaaagcagcactgtgcgatgatgcccgcgtatatgacgctggccagtagctgacatatccgcttgtacagnttgcgatanacccgtttgcctgcagtgtactgatggtccaacgtgaagcctgcctggcaaggagagcccttctacttggttcgttctgggggccacgggtgagcacgacggggagcgnagtcatgctcgtatttggtctgcgcatgggattctgaagcgggataagtggcacccctaccatgagaaaaatacgttgccaatttggttgcgaacgcctatcttccaagagtccacatggcccgatgggattggcatgcggaggaataggcttcgttgagaagcatgggattgaccaggttggaatggggcatccctatcccgtgcatgacacccgaccagttttgacatccgtttccttcgatggacttgttgcgacgcccacaatgggcaccgaaggattatggagtcaatgcaaggaagggaagtttcccaacgaaagaggactgggattattacaaaacaccctgaaacgaaggtttcgacatatgacc

SEQ ID NO: 534960 - DNA, 83 bp, Homo sapiens
  misc_feature (22)..(22): n is a, c, g, or t
ctagttctagatcgcgagcggncgccctttttttttttcctgtaaagtatttttttaataaaaaaagtctgatttgtcctttt

SEQ ID NO: 534961 - DNA, 481 bp, Homo sapiens
gggtcgtgcgttctcgaccgtgcgatgagtgtgcttcaggaggatgcctgctataactgcggtacgaggtggccacattgcaacggactgcactgcgtcccagagacgagcgagacgcaatgctgctacaactgtggcaaaccaggccctctggctcgtgactgcgaccatgcagctgacgcagccctgctacttcttgtggagacacttcggacaccattcaaaaagacctgcaccaaagtgaccgtgctctacggtgtggtgaacctggtcctgtagccactcaacgtgcagcacagccccgtgacagtccacttgttaccgctgtggcgagtcacgtggcaccttgcacgggacatgccaatttgacggctaacgcctacattattttcctttgtcgcccctcctttttctgattgctggtggtactacttttctctgaatcctcttcactggccaaacggttggcaactacgacggc

SEQ ID NO: 534962 - DNA, 190 bp, Homo sapiens
gcgagcacagagccttcgcctttgccgattcgacgacccgtccacacccggccgccaggtcaccagtggcatgatgatatcgccgggctcgtcgtcgacagagggctccggtcttgttgcaagggccggcttcgtcgggctgacgatgctcctcccggggtccggcttccacctccattcgtggggcgcc

SEQ ID NO: 534963 - DNA, 362 bp, Homo sapiens
  misc_feature (11)..(12): n is a, c, g, or t
  misc_feature (91)..(91): n is a, c, g, or t
actgatggaanntccggggtttacctgattatccagaaaattaggaccacgtggaaaaattagaggaaataagacggaaaacacttgaccnaggctcagcggctcatacctgtaatcccagcactctgggaggctgaggcgggtggatcactcgagcccagagttcaagactagcctgggaacatagtgaaaccccatttctataaaaaatacaaaaatcagccaggcgtgatggcatgtacctcgagccccagctgctcgagaggtaaagcagaaagatcgcttgagcccaggaggttgaggctgcaatgagccatgacttcagcctgcacttcagcctgggtgacagagccagaacctgt

SEQ ID NO: 534964 - DNA, 150 bp, Homo sapiens
agtacacacgtagcaaaacatgaacactgcatgcatggtagttctttcgacacaggtccaagcattacactgactacacagggatctatttataaatcaaggggcagagttctttctacggccactgatattctacacctataaacattg

SEQ ID NO: 534965 - DNA, 186 bp, Homo sapiens
  misc_feature (19)..(19): n is a, c, g, or t
  misc_feature (38)..(38): n is a, c, g, or t
  misc_feature (105)..(105): n is a, c, g, or t
  misc_feature (110)..(110): n is a, c, g, or t
  misc_feature (151)..(151): n is a, c, g, or t
gggggcccacttgcctgcnttacccacaactgctgggnccctggaaggaattagaatccccaactgagtatgtgcaaggtcgcgctggccagccgtcttcacgcntgtcnctgtgtttgtggactggattcacaaggtcatgagactgggntaggcccagccttgacgccatatgctttggggagg

SEQ ID NO: 534966 - DNA, 895 bp, Homo sapiens
gagggctctgggtattctggcggccctaagcttgagcgcgcttgtctgacaggatctgccagaattcggcaactctctccagtcctacatgggccactgcggggacaatggcggcccggactggggtccacaagacgcggggagagtcccagtaacccccggcgcaagaacccccattcacggtggctcttccctgacggtgtggtccctgccctcaaacttacaactctatcgaagagtgaggggctgctcttacgccctctcttggacctgggaacttggggtccacatggtggagggaccagacccgtaggatgggagcgcctaggctagggcaactgcttttagccgccatgcactgcgagcaattgggaggatggagaccgcggcctctctgctgtggtggccggggaggcgctggtgacacgcatgggcttccgccgtatacacgccgccgccgtcctgctggaatacggggttcccatccctgagcctcagaaacgcaggggcggccgggaggtggctcggctgagtccaggacagccacaacacgggttgcgagacagcccacgctcactcgccgcgcctgcccacaggtggggctcctggatcggtatcgccatcatgacgcagtgtcgcccaggtgagccgagccgccctccctgcggcggggccctgcccctccgggccggcagcccctcctgacgcccgttctttcgttgcagtggacatgttctgcaatggtgggcttcacccagatgaccatctgggcaaagggcaagcaccgcagctacctgaaggagttccgggactacccgcccatgcgatgccaatatcaccttctgctctggcgtacctgctgggctacctcaacccgtacattctgggagatggc

SEQ ID NO: 534967 - DNA, 121 bp, Homo sapiens
tgagaacaaagtactacgacaagatctaatatgaaagcatagatgcacatacgacctctgtcataatcatctccctacaaacagatagcacttctcggcacacgtccacacgaagaacgaa

SEQ ID NO: 534968 - DNA, 878 bp, Homo sapiens
  misc_feature (14)..(14): n is a, c, g, or t
  misc_feature (87)..(87): n is a, c, g, or t
  misc_feature (492)..(492): n is a, c, g, or t
  misc_feature (523)..(523): n is a, c, g, or t
  misc_feature (709)..(709): n is a, c, g, or t
  misc_feature (785)..(785): n is a, c, g, or t
  misc_feature (802)..(802): n is a, c, g, or t
  misc_feature (818)..(818): n is a, c, g, or t
  misc_feature (875)..(875): n is a, c, g, or t
aagcagatttgggngggaacatttagggtaaccacacttaatgcgttcttggtccagtgactatctcaaaacaggaaaagatttttnagtaagttgaccatttgggaaccacttggtatgtcaaggtcatctcgtagaaaagcccaagttcttatgttctctgaagagctctcaaaagcagtcacagtcccagggggctggtcctctaagaatcattttgggactcttcggagttcattcatcagccaaagggcaccagtgggcaaagccaaggggcctgactggtgggtggcggccaggggggttggggcatacttcagcggcgtgctggtgcccaagcccccctgtgtatacgccaaagcccgccgagtccctgctgccatcttggtccttctggggggggggattctccggggggggaagtagggccctgtgatggcagtggctgaagtggttcccagaatccggtggtccaactgcaccctggtgggnttctcaaaaacattcctcagggtgggggggngggtaaaggggtcctccggggtcccgggttctcccattttgggaaaggagttataaacaagcccagcatctagccctgccacaaaagcccctgagagggccgtaaggaacaccagacctgctgttccatgagcaaatcgtctcaactgtaggagttggtgggtttcaggcaacttgtgcggagggngtagcagtgacagtgaggtccacaagctggcacaataaagaaccagggctgatcccaggtgggcagcaaggcggtnctgactgacccgagggntgtcatgggagtctgntttttcttctagtccacttttcacctataccatcccacagaccctggaagcagacgnggc

SEQ ID NO: 534969 - DNA, 321 bp, Homo sapiens
tggtgctgagtatcggcaggttaaccgacagcttcgtgcgtaactgagccgtttggacgtaaatccggtttgggccggtcataggattctgcccgggcgccgtggcaagcgccgggttaccgatggccgacagctgtggcggctgcaacacctggacgctggcggtgatttgcgccacccccggcaagttgatgggaaaactggccaccaggccgttttgcttgttggccaattgcacgaacccctgaatcaggtcgaacacccgcatgttgaccgccagggcggcgacgctggcaccactctccaccgacaggacattga

SEQ ID NO: 534970 - DNA, 334 bp, Homo sapiens
tgctgggaccacaggcgtaagccaccgcgcccggccctccattcttcttaaaaatttcaccaggatggtcatatcccattctttggtaaaacttaaggtcttccaatttataacatgcattataccataaaaggtccaggacctctgtgtagagtgatgtcctggttggccggggactttcaccagttttagcacggaaagaccggtgtccggagaaacccctcagcctgggcaaagcagattgagtagtcactcaaggttcgtccagaattgtcacttctaagaatttatccaaaaagagtactttttttttaaaagacaaggtctggctcgg

SEQ ID NO: 534971 - DNA, 382 bp, Homo sapiens
  misc_feature (312)..(312): n is a, c, g, or t
  misc_feature (369)..(369): n is a, c, g, or t
  misc_feature (372)..(372): n is a, c, g, or t
aatcaatgcttctttcccttccttaaatgtctttcctttaaaattgacttccttccctaaagaaatgctcatgtcctccttgaacttaaaagcaatcctcaggccgggcgcgggtcgcacgcctgtaatccccagcactttgggaggccgaggcgggcggatcacgaggtcaggagatcgagaccatctggctagcacggtgaaaccccgtctctactaaaaaatacaaaaaattagccgggcgtggtgcgggcgcctgtagtcccagctactcgcaaggctgaggcaggagagtggcgtgaacctgggagncggagcttgcagtgagccgagaatgtgccgctgcactccagcctgggtgacagagcnaantccgtctcag

SEQ ID NO: 534972 - DNA, 481 bp, Homo sapiens
acatgttaattttattcctttttttattctttacagtaaccaaaagtatgtaatctacatccttccctagtgcttatctccaaaagttccattttgaaaaacaaggagatatatatatatatatatatatatatatatatatatatatatatatatatagtagaatatcacaggcagaggagggaagaacatctgggtggagacgtaggtctgaatggaaaggacagaaaagaaaaaaaaaggagtggcagattcctcctgttacaaaatactgagctctagttaaaaaaaaaaaaaaaaaaaaagatttaggggagctgtagatgttaatacttaaaaactacattaaggcataaacatcagatgatgtgatattttaactcaaaggtcactgtatataaaacttgagcccaaattgagtaattagtctatacaaaatattctagaaattgccatggtttgttgtctagatgagaaaaaa

SEQ ID NO: 534973 - DNA, 410 bp, Homo sapiens
ccgcccctctgccctgggaaccagtccaaggggctgtcagttgaatttgcctttttgctgttgtggttgtttccgttggttatttgttctccttttcaggaattatgaagctaaagacagttttgcgtcttggggggtggtggccaaagttctagctgcttagcactggtcccccaactagaattctccctggtcctcttttaaagctgcccttcgccatggaaggttgggcctccatgggggtgcgttccccgacagacggggcgcttggcccaaaccgcttcccttgaaaggcatcccctcgcgttttcagtgtcccctgaggcccggtgcatttcccgtgccccttgggtgctcttgacagggggagggtgcctttcttcattgtccgatccctttccctgaactga

SEQ ID NO: 534974 - DNA, 429 bp, Homo sapiens
gactagttctaattcttctgtgtactgtgcagtagagttagaaaaagagattagagaagaccttccagtgaatacctctaaaacccgtccaaaacaggaaaaagctttttccttgaagaccataagcacttagtgatccagccggaagtacttctgtcgaaaaatagcccagccttattcaaggactctttccacctggctactttctaccggagccatcttggtaatcttatcaaaagagtggattctggacaaggagctcttcccaaggtgccggccaatacatacaagagacagataaattccaagtcaaataccaagcaaaatagtggtggcctccttcacagaccaatgttcttggaaaacctagctgtggggaaattcttcccccaaaagcaaaattaacacaaaataacaaaacacaggggc

SEQ ID NO: 534975 - DNA, 1432 bp, Homo sapiens
gccgtggcgtcatgggcggcctcttctggcgctccgcgctgcgaggggctgcgctgcggcccgcgggccccgggcccgagcctgctagatgcgccacggctcgggagggccctcctggacccgggagacggacccatgagtggcggatgaagcccagatggcgatgcaaacggcgagaatcgatgagggacgatgatccagacgactatagagaaggacaggggcattcacgctggatggggatgacagatgcattgcagaggcaccagaggagcgtccattgcacgaagaaataccgaggaccatgcaggaagagaaagccccttcatacccatgacccctcatccgactaccatgcagctcttggggacctagatgagtggcacaatgggtacatggagaagaggtacaatagatcgataccgacgcacctcaaagggccaaaggaattggcacaacaaccgaacatcggatagaagagatgacacccaagagaaccccaataaggggggtgacaaatataagacagatccaacgagttcatgacagggcaagtgatcaaatcacaaagacacacagcaacacatccagatgacagaggagggcacacaagcgggagaggaatcgcaagaaatggaagagaatcgcaagcagacacagaagaagcaatggtatgagcattgagagcaaggaaattggggaaggagcacacagggaaaacatggaaatgaaaattctgaaacccacaagagcaatgaaggaggctacgaaaaacatttggacacttatatagacatacccgcacaaatacaaccacgcaataggctgagggacgcacaagtaagacgtaccaaaacaaggacaaaagaacacgaccaaaaggcaccaataaatcaccaagaaacatgaacctagattcccaaaaaaaaacaacattaaacatatcaccatagaaaaacacaacaataattagaccaccaagcacccaaaacacaagtcagaacaaataagaacacaaaccaaaattacaagatgacctaatcatgtacccaccaaacacaaaacacaacgaattaggacaccacaacactataaaggacacccaaaataccgaacacaaccaaataaagagataaaaaaggaaacaacaacacataatacaataaccatatacataattaaaggaacagcctaaacacaaccgaattgccaacacagtggtggacacaaatcatatcaatccccgacataaggaatacaatcagaactatgaaaatataaaagataaacaaaaacgaaattatagacccataacaaaaacaaaacaaaaaataatatccaaaacaaaaataaaaacagaactcctatgtggtaaagaacacatactaacacaaagacgaacaagtaactctactgatccataaatatacca

SEQ ID NO: 534976 - DNA, 818 bp, Homo sapiens
aggcctttaggccacccatgggcccccaccgggttggcctggtgtcttgggcgcccgcgtgttcccccccaggtttggcaacggcgcctggccacagtgggtccaccccgcccggccccgtcgagtgtccgcccgacgtttgggcccgcgcaacccaaggcgcctgcctcatttgccccgggcccctgcatcgggtcccatttcggcaccactctgtgcgctgccaccaccggttcggtaccccccccgaaaaggtgcgccgcccgtgcccccggcttccccctgtgagaggaggctcacgggtggcccggccatatcgcaccaagaatggtggccccggactccatcgcgccatatttcttgctggatacctctaggagcgctggtcacacaaggtcccaacgggaggtcccttgccagacaccaacagtgtccacgccggctcgcaaggtatgtcacaccgcgtccccagcacatctcatctcttgttctccccagggaatgccctctggcgcccccagaaagggagaccacgttttgctgaacgaacgtgagaacgtggcccacacccagcttgggcccggacccggtccatgcgcccgtcccggaacacgtttatcaaagaaaggatgaaagcatcttgggtccatccactgagggaagagaatgaatttcctaaagccttcctgctagtcctccgtatggcccgttgcgcctacgccccggcttttcggcatacgggccacaaagagcccagggagcccccagaccggatgttgtaaaagaaaaaattaagccctcctggggacgttggaatc

SEQ ID NO: 534977 - DNA, 199 bp, Homo sapiens
tcttggagagggggtctcatttttttgcccaggtgggggggttggggcaaaatttgggttaatggaaactttggcttccgggattaaggggattctcctgcctaagctttcggggggggggggattacgggtttgccccacattgccaggttatttttggtttttttactagagacggggtttcaccaaatgggggggg

SEQ ID NO: 534978 - DNA, 1398 bp, Homo sapiens
ggagagaactagtctcgagtttttgaatggtttattttcctacgtgaggaaagtgcaaattaaaccaagggtccgagcttcttcttccaatcggggggctccatatccgccacgggttgtaggtctgtcccaagtctgtccagctggactgggacgcgtaggacggcgacgctgtagaggacgcacgggagagttaacactagtggcccatgagtgcccaatagctatgccaagcgttgtaaagcatgacatatgcgctaaagggaaggggccgcagcataacggttgctcggaccaaaatgggagcatgaagaatcggatatggatgaaaaccacacgagcacgcatagagttgtacacccagaaggcacccagacatatgaatgagacctagtatcgaaggcgtcgaggcagacccagagactcgggcgtctagaacccaggaaagagacatgggacatctggtcagcctaggacgaaatctccacaaaacggtaatagaacggcgcccatttatataaaacctcggttcccacagagcgatccatcgtgttagaaggaagacagctagaatactgcaccgcgaacggcggaactaataaattcgcggagattatgggcacgatggaaacacaaagtattcacaccgccaggatttaacacatttacaagaacggagagtgtgcaccccaaaaagaggagagtagaaccacaccagcaacaatttgaagcgagcaacaatgttgaacagcgatacgcggggaccgtcgtagataagaaggtcacataccgaaacacagaaacgagcagaagaaaactagacccacaagccaagaaaacaacccccgagaaaaacagcagcaacagaaagaagacaccccacacagcgcaacgtatacaccacacaaccaagagcgagcgcaccagccgacataaaacacaggcgccccccaaagggaacaatcacagtgaaaacacaacaacccccagctggaacacagcaaggctacgaggaacaaaaaccgaccatacaacacccacacaaacaagccactacatcaacccaccaacccagcttgggaccctaccatgccagccgaacaacaccgctcacgcaactggagatgaatcgcttcactcagcaaccacatagatagggacgataattgaacacgcactactcttagtgtcccccagatgacaagagagacaagaacagatagcaccattgatgtacacaacaaatagaggtgaattagagcaactccccacatcatgagacactgtaacaatataaaatatataaaccagagacatcaccctcgaacctagagagcgatcacgaaccgctatacgagaactcagagttgcgacgtacatagctaaacatgatcgccc

SEQ ID NO: 534979 - DNA, 1027 bp, Homo sapiens
  misc_feature (365)..(365): n is a, c, g, or t
  misc_feature (390)..(390): n is a, c, g, or t
  misc_feature (398)..(398): n is a, c, g, or t
  misc_feature (552)..(552): n is a, c, g, or t
acccattggagctgcgtaggaagtgctacaggtgtgtcaggggagaggctgcccaggaggacaagaatgcttccaagtaaaaccccactcttagttccctgttgacataagggtctctaaaacccaaagaccttagttccctgttgacacaaaggtctctcaaaaccccaaagacctttcttttggcacacgggcattgattcgcacttatagtattggtgaaacaaaattggtactgggtgaggatggaggctgtaatgaagggtcttcttatccatgaaagcgcactgacgaggtccacattcgacacaagtgagctgtcgagtcctggaaccacctgcctgtcacttggccagcagaggccngccggaaacttcttcaggatccttntgccatgncccacagattctagggccacagcctggttaaagcagcctccaatctccagcttagggtcaaccatgccagcagtttggccctaaatgctctaaaccaagagaccacagtcatggcagaatagtcccagcggcctctccatgctgggtatgagtnagcatttttacactattttatgaaatcctcacaaataacacccaggaaggtctttttaatcccattatcaggaatgaggaaacccggcttcaggatggttgtgggattcacctgggggcatgaaggtcaggattagcaggcgctggtagcattttgcagagtagcagacagaggcggtaggtacccagcgccgtctgcaacgcgcctctggcttcatgcgctggctctgcatggcctttctgcctccttcccacctctctcccacacttgctggcctcgccacaccttttgtgggaagagcctggaggccccgccccagccttgccaacaccctcctgaggcctgcttggatgtgttttcacaaagttgtgttctaggaaagatgggatgctcttaaacttttactcccttaagagaaaggaagggtcagggtgagctggtgtgcagctcacgtgtctgttgggagggcggccgc

SEQ ID NO: 534980 - DNA, 266 bp, Homo sapiens
aggaagtgaacgagcatgattatagctcacagtagaccttgaacatccatgggctcgggcggtcctttcaccttagcctccagagtagctgggactataggtatgtcccaccaggcttggctatattttatttattatagagacatggtctccctgtactgcccaggctggtcttgaacccctgagctcaagtgatcctccttcttctgccccctgagtcgctgggactgtaggtgcatactatcacacctagctaattttcaatt

SEQ ID NO: 534981 - DNA, 231 bp, Homo sapiens
acaggttcagtgtgcgtgtgtagctgaacgaagtctccgtcaatggggctggttttcccgtggtacttattcagaccagtcgggataataccggagacatttgaggaccatgtccaataccacaggggggcctcctgtaaggcacatgggaggtgactggtgtttcttagacgagaagatcactgaagacaacttctgctttaatggctttacaaatgctggcaatattac

SEQ ID NO: 534982 - DNA, 446 bp, Homo sapiens
  misc_feature (3)..(3): n is a, c, g, or t
  misc_feature (31)..(31): n is a, c, g, or t
  misc_feature (35)..(35): n is a, c, g, or t
  misc_feature (40)..(41): n is a, c, g, or t
  misc_feature (47)..(47): n is a, c, g, or t
  misc_feature (170)..(170): n is a, c, g, or t
  misc_feature (186)..(186): n is a, c, g, or t
tanttgggggtgggggggggggaaatatctntcanacatnncccatnaacactggcatgagcatgggcatcataaaagggagcttccagattatagacaagggaagataggagggcaccattagaaactatccagaagaaggtggctgaaaagggctaaggggggggggncccccaatgaggcttngaggacaggggtgggtttggaaagaggggttccttttctggtggattctttaaagggttcaaagggggatttggtggatttgggggaggtggaggagctgaatattacgtggaggccctggataaagataagaaggatcactggagataatacctggaaggatcatagggggttcttaactctccaaaataagatttcttctctggagcctacttggctgggttatcccttacagaatattagggaagatttaatcaatt

SEQ ID NO: 534983 - DNA, 176 bp, Homo sapiens
  misc_feature (124)..(124): n is a, c, g, or t
  misc_feature (138)..(138): n is a, c, g, or t
  misc_feature (172)..(172): n is a, c, g, or t
tccataatgtgtgccatcagtgctcgagaacaagcaagacataagccagttcctcaggccactccagaaaagttgaatcattggattccctgtctaactgttttttttttccctatccccaggnagaaactgacattngtgtgtgtgtagtgtgtgtggaatgtgaagtatngtcg

SEQ ID NO: 534984 - DNA, 891 bp, Homo sapiens
  misc_feature (81)..(81): n is a, c, g, or t
  misc_feature (94)..(94): n is a, c, g, or t
  misc_feature (113)..(113): n is a, c, g, or t
  misc_feature (115)..(115): n is a, c, g, or t
  misc_feature (127)..(127): n is a, c, g, or t
  misc_feature (129)..(129): n is a, c, g, or t
  misc_feature (137)..(137): n is a, c, g, or t
  misc_feature (148)..(148): n is a, c, g, or t
  misc_feature (150)..(150): n is a, c, g, or t
  misc_feature (156)..(156): n is a, c, g, or t
gctcgggccctggaaagatggaggcagggagacagaggcggaagtgcagccctagaggtcctggtgaggtgcaggcatctnggaacctgtaggnctgcggaggaggcagaatncnagccaagatctngntggagtgntggggactctnanaagaangacaatgttggctctgaagcaaggttccaggggtagcggattccttgcaagaaaaatcctgggctcagggagggaacactgtgttaaggggttctcggaccccgtgtgggttttctcgaaagacagagagcggacagagggcattggcgaggcttaagggaacattggaagagagctgaagggccaccttacaggggagaactgtagagggccaatcaaatattgtgggcttcaacaaagggcctgattcagaattggaggaacgccaaggaggaaaaaggggaccacaaattcgggggaaaaggcttttgagacagcttcccaaggggccaaaggaaaaaatagttggcctatgggaggaacaacgcaaggagacagttccagacacatggtggcaaggatacaaaagaggaggaaggcttctggcagcaatcttggagggaggatttctggaagagggtgaaggggaagtgtaaggaaagggactaagacagggagctgtgagggcgtggttacaaagaaacttggaacgttgagaggaagggaggtcagaacaggagcgggaaaacggttgagaggtatcagacctcctcagcttgtgtataccctgggggaaacgtgttgtcctggaggcgagagtgggggagatattttcgaagtgaaccaagaggggtgaccaagaggaggtgtcggggacctgggggcagcctgtgtgtctaagggggacacggggta

SEQ ID NO: 534985 - DNA, 892 bp, Homo sapiens
ggaggagggggcatggcggatactgtgttgttgaagtttcttcagacggagatggtggctgagctgtgggctcacgacccgaacccaggccggggggacagaagatgagcctgtcggatcctggaagggtatggggttccgagtgggccaggctctagagcgagaggctgccccgggagacgctggccttcagggaggagctggactgtcctcaagttctggtggccacagacctgtgggtcggcgtgtcgtgccaaacagtcagatgtgactaggctgcgcaccaattcaccaggggaccgtacagtcctgcaatacaacagcttccacccatcctccgtcccgatggcgctctggcctgcagtattctgggaggaagcgaccccaagtggcctggccgttcgacctgcggctgcctgatgctgggctccatctatacccatgggctttgagagcgtggtcgccggctccgtgggagccctgcccgtctgtaagttgcccggtggtgattccgagactcctaaggcctgcctcgctcctgctgcgtccgtgacgtgttgcccctggccgtcaccggctcaggagacggtggggcggctgcatttgcggggtggtcttgggaatccctggcctaggggtcacaattgtggtcaggaagtgggtgtcaactagaagtggggggtgtcacgatgcaggagacatggcgtcccaaggtgcggtctaggactgtggtgggatccccgcatgcgaaggggtgctggccagtgcatgccaataaatgctgtgtctgtggaagaatccagtgtttgccacgaaccaaaaaaaaacctcgcggtccctgcggcgtcaaagaaaaccacttcaggctccacacagttacgaggaacggcaa

SEQ ID NO: 534986 - DNA, 1416 bp, Homo sapiens
ggggagtgaggagttgtgaggccggagtggagcccgcgctcggtggcggcgtgctggagtgcagctgcaccgatgttccctgctgatggatccatgacctgactggtggcccctgtgagcctgctgctgcctctcggtgtgtcctgtggtctggtgtggtgatgcccatgtgctcgcatgtgcctggcgggcgggcctggatgtggctgcatgtctccctcgcgtgtgaagacggaacggctggacggatgctgggaacctgctggctggctgctcgcggctggctgccatgcagcgggcggaatgtggcagttcctgtggcctgtggcctgctgcctcagcaagggcggcggtgatcccaagctgcagttctcaatggggccctgtgagtgtgcagggtgcgccgcacttgcgagaaattcaagtttgtcgcgcgtccggttgattgcccctgatgttgaggctgtgtgtgtgtgcccttggtgaccttcttgacccattagtgcagtggcaacttcccaccactggccagctgcccggacagacagggccggcctcttcgacgtgccccgaaggaacgggcatttcgtatccatccgggattttcaggcgagcagtgcaggtggctggacggttttgattagcggccttgatcgtgtgtgacccccgggtgaacaaaccttgaaagttgccccccccgtgccccccgggacttcccttcccgaaacgctgcatcggggcgacaagggttgcttcatccagagagatactttacggaggaaaacaaggggacaattggcggactccttccattgttttgggggacttggagaccagctggggcctggggcaagacagaacaagtcccttggtacaaaaaggtctggcacagggctggggcccaacgattccaggttgaacccaggccagatatccgcaaactttggatagggagttcttccaacagggttcgtcagagcaaccggggtcagaaacttttacaaccaaattgggtctcacggttccaaacccgctactctcgcgactctgtcttggagcacggccactaggggacacaacgaactctcggtgaccgattccttggagcgggcaataaacctttaaccgactttgagtaaccccaaaagcggtacctcagatcacttacgggaatgatgggaaccgtggcggccggaaacgcgcgaaacggcattcgcgaaggaacggactcggccacgagaagcatggcaccacggcacatttatcaagggaaccggtggacacatgagggcgaagccaataatccaccgacactgatcgaccccatcatgcagtggcccgtcccgagtcgcctgaaccccaggaataaccaggcgcgaaagggtgcgctcttgcaccgaattgtgacacgacagt

SEQ ID NO: 534987 - DNA, 117 bp, Homo sapiens
cacctgttacattcgtgtccacgaggagctgcggaagctggggctgtatgttgaaacccgggatggcgctgactatgagggctggtgcgtggccaggctcagctggttacccgtgca

SEQ ID NO: 534988 - DNA, 338 bp, Homo sapiens
taccccaaagcaagccataaaatctaggaagactatctgaccctctcttctcctccctgaagacccttacatgacaagtgtcatgccctatgcccagaggaagaaatgctacacagagagaccaagaaaaatctgaacacacaggactttttggaattcccctcaagttattatcattacatcatgccttttttggccagtcaaaattttaaaaagctttccattctttctcggaccttagctttaggattttcaattttccctgggtctctgggtcttcatttctgagcgctcccatttgatgtaaaattttgattaaataaattttttcttgatta

SEQ ID NO: 534989 - DNA, 748 bp, Homo sapiens
tgggtgaaagagtctcactctaccccaggcgggagtgcaggggcgctatctcggctcatggcaacctccacctccggggtcctgaattcaattcaatttcccgtgccattagccctcctgtgagttagcgtgggattacagccggcgcaccaccagtgcccaagctaattgtggtatttatagatagagacgggatttcaccattattgggccaagcgggtcttgaactccgtgacctggtgatctgcccaccttcagcctcccaaaggtgcggggatacataggggtgtaagccacccggcctgggcctagttttaaagtttttcataagctaaatacagtgttaccttgtgtaagaaaactggccaaccgtggtttccaggagtgtgctgcaccatttggcattccataccaagcaggtgtcgtgaaagcctccagtgtgccccaaattccgtggtcaaccacgtgggatattgcatccctttagggttatacacattataaccatttgagatagcgggtgttgagggataatatctccagggtataaactttacattcccctaattaattacaggacgttgaacaatttccaggcggtataatttcccatcgttttaaatcctcattccgggaaaagtgtcggtacgaggctttaggccatagtgtctaaatggactttggttccactggagaattccacgagtccttaaccatatcgggagtataaactctgtggtcagaattg

SEQ ID NO: 534990 - DNA, 1324 bp, Homo sapiens
gttattccccctaataaagcatattttactttggtgcttattttatcctccttgcagtctaataaaaaaatctggacaatcaaaccttaaaatagctacactctgccctctgataatgtagcatatacataaaaatttggacgtatttacatcctctttcaagatgagcttatatgacacaagttattatttagctagatacatgactaatactgcactttacagtatctcacagactctgcaaatatgtcaacatacaatatttctatattcccagcaaattgctactatacaggttcgaacgtcttattaagggcatcaaaaattaacatctactcctaatgcacgcctaaaatgtatacaaaatactatactaagaacgaactgacacaattactcatcggttgatatatatactctaacataacgggacatactataatgacactgtgtaactgtgacggagcagaaaccatgatgaacgaatccaaattcaagcgacaacgccaatctatatcacacatagggctcacaaatatactccaatcccttgactcagaagactacaactacgtaaaacacgtcataaaaaaacaaagtacactccaacaaattatcgatacacgtagtatcacgaggcgccgaaagccacatcctacacaacattagagggcaacgcaatgaactgtgagtttcaaacgacttacaacccaaccaccttcaattaccaagaatccacactaacattaccatgacaaaagactaagacacaacccatgcacaatagcaccatataataagagaacaatgtatacaataaacagttatcctgaacaaaaaaatacaatacacggaaaagaaaaaagagcgcacgaagacaaactacaaaacagaaaaacaataaaaacaaacagcagataaaaagaaaccgacaatatacagaacacaagaacaaacgcaaaaacacacatgtaacacaaaccaaataagcaaccacaaaacgcacaaacaaaacaatcaaaaaagctataaagttaacacagaacagcaaataaataaaagcaaacctgataacagaaatacaatcactacgagtactgaagatagcagagaggaaatggacaatgactagaacaacatgagttaaaagaacgaacaaagaagcaaagagcaaggagacctcagaacacctaacgacatcaccataaatcaacagataaaaacaacaacatagcagaacaaaggaaaaagagaagataaacaaaagaaagtaatatacaaaaacaaagatactgatatctctgtcttttttaccggctgcaga

SEQ ID NO: 534991 - DNA, 616 bp, Homo sapiens
  misc_feature (34)..(34): n is a, c, g, or t
  misc_feature (51)..(51): n is a, c, g, or t
  misc_feature (56)..(56): n is a, c, g, or t
  misc_feature (68)..(68): n is a, c, g, or t
  misc_feature (153)..(153): n is a, c, g, or t
  misc_feature (245)..(245): n is a, c, g, or t
  misc_feature (363)..(363): n is a, c, g, or t
  misc_feature (418)..(418): n is a, c, g, or t
  misc_feature (438)..(438): n is a, c, g, or t
agaagcaagagggacttctgcggagcctgcagantgagcacggcctctctngatgnacttcggcctcnacactgcgaggaacacacctgggtgctcaacgccctcagtctgtggtgctttctcagaagcagccgcaggaaaccaatccagcgngtcgccctgatcatcaacatggacgagagggaagcaaggacctgtcgcctcaggacactgtcaacacttaactgtggtttgaatgtttgtgnccctccaaaattcacgttgaaacttaatccccagtgcaacagtactgaggagtgaggaggccgtaatgctcgtgctccggggagggattagagcctcatatattatattattttattntgagatgagatttgtattatttatttatttatttttttgagacagagtctcactnttgtcgcccaggctggagtncagtggcgtgatcttggctcacagcaacctccacctgctgggttcaagcaattctcctgcctcagcctctcaagtagctgggattacaggtcctgccaccacgcccggctaacttttttgtacttttagtagagacgggggtttcaccatgttgtccagactggtctcgaactcttga

SEQ ID NO: 534992 - DNA, 556 bp, Homo sapiens
ccctcccaaattttaaaaaaagaaaacccaaaaaaaaggggcaaaagttaaaaaaaaacttttttttttaaaaccggggggtggtctcccccccccaaaaaaaaaaacaccgcacaaagccctgccaactcacttttttttccttaaaaaaaagggggggcggccatctttttaaatcgcaggtttaaacccaaaggcgtttttccttcccacaacaaattttacccccttccggaaaaaaagactttcttataccacagaggcattctctctgaatccacccccctctctacaaaggcgggcaacccccccccaatatgcgcaaatctcccggccccaaaataatgctgcgctccccggacaaaaaaaaaaaaaacctcccccaaattccgccactctggcaacacatgagaaaaaatgtttactctccgtgacacatatagttctcccctcaacaacaatcataaatcattctttatattttcccgccctccataaatcaacaatacaccccactcttcttaccacacgtaaaataccctctacaatcttcccg

SEQ ID NO: 534993 - DNA, 1935 bp, Homo sapiens
  misc_feature (1394)..(1394): n is a, c, g, or t
  misc_feature (1446)..(1446): n is a, c, g, or t
  misc_feature (1763)..(1763): n is a, c, g, or t
ccgtctcctcggcggtctgtggttggtggtatcggtctactctctcttctgtctctgttgagtggtggtctctctctcctgtcggatcttgttatttctttatttagtgtctgcgtgcggagcgttgtacttctgttttcttccgtcgggttctgtttgtgttcgtattatataggattttggtggcggtctttatagaatatttcttctccctatctggtgtttcgttcgtgcctcctgcccttcgtcgtctttgttgcgggatgttttttctttccttgctgcccgggggggtcccccccagggcagtagatacttagttccccccctgttctccttggtgagggaagttggcgtctggcttttataggtcctcttctctcgtctgtgaaggctttcctacagggggtgttttttaaacgtgctcttctggggggggtctcccatcgccaagcttctttatatgtgtcggcagtatttttcctcccccgccactctgcggattgaggtagttgtgtcgccgcgggttgtttgtgttgccgcccccgtggttccacaccggaagggtgttgtgtaaagacacgtcccccgccgagccgttggggtgtagtataagggggacgacccacccttgttgtgggggcttccacccttgttttgtgtaacatttgtgggacgactttagatgggtggacacgttcccgccgttcgtatgtggccgcctcattgtttaatctttgtggatttaggggggacccttctagtccgcttggttctctttaatgttctctttggtggaaagtgcccccccgctcctgtggtgtgttgcaaaccccaggaagggttcctcacaaaccctctattttaggggccgccccccttgtgggccgctaagatttggtgtccttcatgagccgcccttgtggtagtcaccgcctcctgatccctccgttatttacgcctcggtctcaactagggtggtgttctccaagaccccccttcagacctctcctccagagaggcgccctcttttttaggtcgagtgtctctccgcagaacacacaacatgaatggcctctcgggggaacactgttctctcttctcagagcgttctttctcctctcttctttgctctcagaagagatgttctcccgctgtacactcctctttttagagagaggatagatggggtgttacacccacaccactgggacaacccaggagtgctctttcctggcggggtgaaattctttgtgagaaagagtagatagagtataggggggttatagagctcagatatagcgcactcccgagcgctgttgttacgatgtacatttagaatagagggagacgctctcttggtgggtgtatgagataccccccctggggtgagntctctctccccaccaccgtggacatttagagtgtggcacacaggatgagacnttctctatatagatgagaggcccccgtcttgttatcaccggcttgtagacggctagaggtgttatatagagcacaacatctctgcgcgctgtggcacgcacccacatagagggtctctgttgtctgggacacccagagacacatatattctcttgtagactctatagagggaattaggtctccacaacacagtccagagatatagagtggagagccccacacccgtgcttatccaggagagttataacacttttggacaagagggtaccaaagttctctctaacgtggatctccatccagagtctcatggtagactnagacctggtaggagaccttgccaacatgttattagaccagccagacgtgccccatatagtcccatgtggaagataaccaaactgggttttgggttttttttccccctccgcgtttaaagtttaagggtaaaggattttaaccccttattttaattaaaccttggtttccaga

SEQ ID NO: 534994 - DNA, 962 bp, Homo sapiens
ggtttcgacagcgtgggtggcggcgctgagtcgggtccccccgcgcggacggagaagccgaccgcactacaggtacctgaaggagttcaggaacggagcgagctgcaccccatggtttgtcatagcacaagtgcgcgcgagtcatcggccgttcactcgtgtgttccactggcacattcctcaatcagcggcgccgcaggccgcactcgcgcaggcgcgactggtggcctttcctaactacaggaacccgcggactgtgtactgctcctaaagtacaacggaatgcctaggcggctggtgtggcccgacggacgacgagtgtcccttactctggcatcgcggacgacgggggacgacagagatggctagagtaccagctggcgttactacaaatagcaggaacctgtcggtcctctagacagacgcacgtggccgttgcgtgaggaatgggttgcactggtgccttcgcgcacgggcccctggacctgcggacgccgtgtgtgacgtcagggagctgcaggcccaggaaggcttgtagaagggccaggtgggcggcgggtaaggggtcccggatctgcaggctgtggtcttggccagcagggcatgattgagaagatcctgagtggaggagccgccggtggcaagatgccaacgttcagtgctgggcaggctacaaggacggagtcagtagcccgaagacgtcacagccttgttgccgccagggttatgacgtgccatcactaccacaatagccgggtacaggtggtgcaaacccccggcggttccagtacaaggtccatggccctgccccgacgtgaagcacgggatgagtggggggggcacccctgactgcgaaggcggaacctgtgccagtttgccacccggacgacgggtcggccgagaccaaagggccgatggcgaatggaaaccggtttcagcgctttggcttgccttaaacgtga

SEQ ID NO: 534995 - DNA, 527 bp, Homo sapiens
  misc_feature (318)..(318): n is a, c, g, or t
taggctgtgggggttgcagtgagctgagattgtgccactgcactccagcctgggcaacagagcgagactccgtctcaaaaacaaacaaaccccaaattggattaagtctctcttggcttaacaccttccaaagacttcccatcacacttgacaaaaaatccacagtctccacaatgccctggaaggctctctgtggtccggctccagcccgcctctcagatgccatctcaggctgctccctgtcactcattaggatcaagacacaggaacttctttctctgcctctggacatgaagctgcccctacctcgggttattngtagctgctgttccttcttggaatctgcttcctccagactttccactctcctctcagttcagacgccacctctccagaggggccttccccgctccccacccactcagtgtctgcacctgcacacctgagcatgctggagaaaaagttctcaatcatgtgtgaccgtggcctcaggcgggccctcaggctgcctgtgacgccactacagc

SEQ ID NO: 534996 - DNA, 124 bp, Homo sapiens
  misc_feature (87)..(87): n is a, c, g, or t
aatcctgtcctcagaaccgggagacacggcactgtatctcgcgacagcaccagccggccggcccagcattttggtgatgggactcgnctctccatcctagaggacctgaacaaggtgttcccac

SEQ ID NO: 534997 - DNA, 181 bp, Homo sapiens
tttttttttctattcacacaccaaatactattttttccaaaccctcaaatgtccagtcatgctatcccaaactttccaatggccccatccccaagcttggtgttccccgacacattgctttggacttagtaattaccccccctttttttcctttcaataaaatgtccatttccttgataca

SEQ ID NO: 534998 - DNA, 204 bp, Homo sapiens
  misc_feature (52)..(52): n is a, c, g, or t
  misc_feature (109)..(109): n is a, c, g, or t
  misc_feature (175)..(175): n is a, c, g, or t
  misc_feature (198)..(198): n is a, c, g, or t
ggtggaccgaagtgggaccgctggcgttataagcgagtcatgtttgctccanggtattacctcaacgatgcagggtagactcgagtctatactgtctgaagacatttgnagcccgatgggtacaagcagtaccgtgatcatgcccattccgtggcgtcggattcatcacccgagnagtgaccaacagctactcatcgnacgagc

SEQ ID NO: 534999 - DNA, 445 bp, Homo sapiens
tgggtgaggtaagctgacacagtcagggcggggctgccagtgtgcgagaacacaagcccgctggatggtgctgcaccctgggtccctgctgccctctctggtacttcaaacatgcctcaggttggggatgccttcttccattcccagacagcagtgtgagggtgcagggaccaagatgtcaagctggccgggagtcgagtggccgcgacccctttcaccggttatgacgactttttggtgttctggctcggcctggaaaaggcagagcctagagagaaaaaggtggtggacagaccagggtggtcttcaagctggcccagtgagagtaggcccccgcacgcaagctcaccactcccaggggcctttcaggtcttttaactcagaaatttatcattatgtgatttgtgtaaataatgagctgggcaataaaagggatttaaagcaa

SEQ ID NO: 535000 - DNA, 145 bp, Homo sapiens
ccctgggagaagatgggccaataaatacatgtttcaaatgtcggctcatgcctgtagtcccagtactttgggaggctgaggtgggaggatcactggaggccaggagtttgagaacagcctggccgatgtagcaagaccccatctc

SEQ ID NO: 535001 - DNA, 909 bp, Homo sapiens
  misc_feature (889)..(889): n is a, c, g, or t
ttggttaagatactttgacaggggttttccgtttcatacaactgaaagtatcctgacttaaacaccttttgaggttctgccccaagcctttattgattttctcctcttgaatcaccaccagcatttctgcatttctcttagtaccacgttttttctattccccacacccaccaccccctctcttccctagctgtttctgtctcaaacaatacagggaaacattttagggtgtctgacagatcacacccacccctttctcagaccttctcaaccacaaggtgctctcccacctccagcgaggtttgtacttcacagttgatggggtcccggtagattcaggctgggcaacctgagagtctgtctcagtaacaaagggaaccctgcgcccagctgaagtgcaggcaatgtttacccgaaagctgggggtgggtccgcatttccaggaggaagccaagactctccctcatcctctgcagaaagaggaaggaagcgtaaacagagaaaaacagtagcagagtctgacagcgtgggtgctgtgtatggttgtgcattttgtgctctgaaaggctccgatccctgctaaaggcgtgcttctagattaagaggctctgtcttgaggtctatggttgtagattgatcatcactcatcgatttggcttagatatttgagtgggactcaattctaatgagacgtgataaacaaagcttctcgtgatcttatgatgagcactaaacatttatacatgttgataactaattggtagtcatgagtagaattggtgtggtttctgagacggctttaaaaagctgttgcgtgcatcctcggccataagattctcgaaaagctctatataatcggcttgatattaactctaaatcgcgtgcttgntaggacctgggtggtgtacg

SEQ ID NO: 535002 - DNA, 783 bp, Homo sapiens
caggagaatcgcttgggccctggaggcggaggttgcagtgggccaagatcacgctactgtgctctgttgcttaggctggagtgcagttgggcaatgatggctcactgcagcctcgacctcctggacgcaagccatcctcctattttagcctccgtagtagctgggaccgcaggcacacgccaccctgcctggctaatttttactttaatgtgtagagctgaagtcttgctattttgtccaggctggtctcaaactcctggcctcgggcgatctgcctgccttggcctcccgaagtgctgggatcacaggcatgagccacggtgtctggcctctgcagttattcttattctttgcttctctcctggagacctgcttcttgcccttccccattcatgcatagagaccacagggtgtgggctgagtccccaggctccccacctcaccccactctacccttgacttccattcctctttggtttaagcagaactctcaatcttggcactgctgacatttggggctggatcatttcctggttggtgggggctgtcctgtattgtaggagtgtggagctggaaccatggtctccaccccatgtggtcctggggagggatccccttcccccccagggcatgaacaacactaatgttctccagacattgccaggcacgtctctgcgggaattaactcttcctgtctgaacttttccactcgggtcctgtctctctctctggtaatatcctggcgggcgggtcgcctgacccccctggggcggggggggtccc

SEQ ID NO: 535003 - DNA, 188 bp, Homo sapiens
  misc_feature (185)..(185): n is a, c, g, or t
ccattctccagctattcctaggcaaaggagcctcatggctaaggcaagcctcaaagccagccccttcctccaaccttatctttgagtagctccagaggccttggttccaggcttttaggttcatccttcagttgggggggaaccgtaggacccaacttggagcctttggagggagatgagagccnttt

SEQ ID NO: 535004 - DNA, 402 bp, Homo sapiens
  misc_feature (402)..(402): n is a, c, g, or t
aggcagagtctcactcatcattctgctcaccgatggcgaccccactgtgtaggagactaaccccaggagcattcagagtaacgagcgggaagctgtacgtgaccgtgacagactgttctggctgggctacggcatcgacgtcagctatgccttcctggagaagctggcactggacaatggcgagctggcccgacgcatccatgaggactcagactctgacctgcagctacaggacttataccaggaagtggtcaagccactgctgacagcagtgaccttggagtgcccaagcaatgccagggaggagggcactcagaacaacttccggctcctctgcatgggctcagagatggtgtaggctgaggctccaggaccgctagtctgatgagctcacagccacgn

SEQ ID NO: 535005 - DNA, 192 bp, Homo sapiens
cacactactggccatctgatctataaacggtgcatcgacaaagaaccattgaaaatttgagaaggaggctgctgagatggaaagggctccttcaagatgcctgggcttggaaaactaaactgagcgtgaacgtgggatcacattgatatctccggtggaaattttagaccacagcactatgtgactatcatg

SEQ ID NO: 535006 - DNA, 151 bp, Homo sapiens
ttaactctttgcgacaggtttcagtcccgttacccaggctggagtgcaatgacgcaatcttgtgcacagtggcaactccgcctcccaggctcaaggaattttcctgcttcagcctactcaggtagctagggctatagagtgcccgcacacc

SEQ ID NO: 535007 - DNA, 179 bp, Homo sapiens
ggtgggcagccttggactcccctgggggtgtcccactcttcttccctctaaactgccccacctctacttatccccccgcgcctccaggtccccaccacgggtatgagcttaatctgctctaggagtgtgtgcgtctgttcccctctcctttggagcatagattatctcctgcaaaatcg

SEQ ID NO: 535008 - DNA, 825 bp, Homo sapiens
ggagctggtcggagaaaagattgtgactagagttggcagagtggtgtgacaggtgggtcggaagaacatgagtggtaggcaagatgtagggtgtgtgggagataggtggcagggggacttgtaatagtagcaaggtgtagtttggcggaagtagttgaatgatgcagaggcaagggatgaagactgcaggtaatgggtctggagggtagtgagccggacgttgtgtgtgtagtaagaaagcgtaagtaaggtagacgggattgggtttggaagagtgtgctgtgtggtgaggacttggggagcttttgaggaggctatgagagatgcggtaatgttgttcgaggagaagcacaggggaccgtggatatccgtggccgttgatgtactgtgtcttgttccttcgaattgcgctgaaggggaatgtaagtacatggttgcaggaagtcaagcaaaagcagaataacaggtgttatttgctactgagatggtgatgtgccaatggcagtgcaggttggactgtgtttgagcccccgccatatgtgcttagagttaggtggccaagtctgcgtctcagacttgacctctccagtgagatgaaaaatcctgttcatttgggcagatggaaatggcaccacagagagtgccccctgctgtgtagagaaatatggccgtgtctatcctgaggtagggtgggagaagaggagaaagacagggggatggtggggagagagagagaaagagagatgtgagaatctccgaggccaagccaccagggaaaaaggacgagagcacatcggataggaaaacccttttccaaaaaaaaaa

SEQ ID NO: 535009 - DNA, 178 bp, Homo sapiens
cacgagggaggagagcgtgtgtctcactgtgggcatcacggacgcacgtgcacatcacgaacccctcctccgtatcacagagatcccgtcgcccaatcaaatgcaccatcggacgaagaagaaacaccacaggaatcccatctcttggatcggagaagccgtcgagactgtctggcaa

SEQ ID NO: 535010 - DNA, 908 bp, Homo sapiens
gccgccgagcggctgtgctcatccagcagcactaccgctcctaccgccgcaggcccggcctccccaccggacttcggccaccctgcctgcccgcaacaaaggctcctttctcaccaagaagcaggaccaggcagcccggaagatcatgagattcctgcggcgctgccgacacaggatgagggaactgaagcagaaccaggagctgggaaggggtttcccaacgggattggccaattgaccttggccacggcttttttcaccacctggggggcgcctcgtgcagtcttaacgagggagagggctttcttggggcaggggagcccctgtcggcagctttcctgttcacctttgttggagccctctgtaggcctcctccctcctccccagccttgtcccaaccctctcctcgtccctcctggtcgtgccccgtctcttttggtcctggctccagaaaaccgcgccccaatactgcatcttccgctgtgacctccggagccctgctggccctgtccccagtcctcctgctgacccgatcggcccctcctgattgccttatttatttgttcgacgcgtctctgaatgtatccgcctcggttccaccatgtcttcgtggcacgccctcgtgtttcagggtgaccgtgtcccacccgactccgcatgttttggtctgtttcctccctctctggccctgtttaacccatcaaccgattctggcaatgactcaggcggaggggaaggtggtgtacataggaacgcgtgggagtcggccgtccccgagggagggtttgttcatactgtcacataagagatagtgagaaccattaaggccggggagggtgagggggtgggatcaaagcggggcccgcggccagggctcaatggcagcgcggacgcagcgtaattgccgc

SEQ ID NO: 535011 - DNA, 178 bp, Homo sapiens
  misc_feature (34)..(34): n is a, c, g, or t
gaagctgattgaagcctcacatctcatcacagcnacgtctgcatgtctctcctctataatgtgtgaacacgtgattgcagtgctcatactcgctgtctccggatgccaaccacagcgccagcatacagctttgtgttcagaaattaaggatattgatcgaggactccgatcagaactt

SEQ ID NO: 535012 - DNA, 97 bp, Homo sapiens
taaacgcgggtcgccatgctcctgcccggcactcccggtgggagcatggggtgcttggttgtttccttcctaataaaataaacgcgggtcgccatga

SEQ ID NO: 535013 - DNA, 680 bp, Homo sapiens
gctggtggctgggggccagctgggcgagctgcacaacggtacacagtatcgtgaggtccgccagttgcctgctcagtggctctggccaccaccttgttgccgcttctacttcctcactcgtgtttacttccgagtaccttgaggatgttctggaagagtctgacatatggacctgccccggtagcctggtgatcatcaagtcccgtgcctctgggatctctccagatatggtcgcatgctcaatggagagcatacgcgggagaacctggagcgggtgtttgtgcgcatgtgaccaggtatggcctagacatcctggccatgctggttgtggaacatggcgatgccccgtcggggaacgtatcactgggggtttgctcctgccagagctccagcccctgggaggctccctgcggggggatgtggttgaagggaacttctacagtgctacgcgggccggggaccagtgctttgatgtcctataactccactttcacttccggtcgatggagtacagcgaccgtgcatcggtgatggtgtccagctgtgaccagcatgcacaccggcacgtctcacaactgttctgacccatgtggctgacgcctgggcgtgagctgccccagcgtggttatccccctgacccgtggattgaggactgggcgcagatgatcatccgttcagga

SEQ ID NO: 535014 - DNA, 236 bp, Homo sapiens
tgactcgacgctcggtacccttatcggaaagcttctagatcgtaccgtcagcctggttgttcaagggttcattgaacatcttctgagttcaggctcattcttgcggataccaacagcaacgccgcgaccagaatgccacccttgaagtacggaccggtcatgacgatgtcttcatatgccggcttcttggctgcatcggagaggtaagccagcgaggcaacaaccagatggggatc

SEQ ID NO: 535015 - DNA, 201 bp, Homo sapiens
  misc_feature (132)..(132): n is a, c, g, or t
tgactctaaggatccccgactgcatcgaatgccgcgaatccggatgcggagatgggcgccgcgaggtgtccagtgcggtaacgcgacgatcccggagaagcctggtggtagcccctggggaggagtactctntttcttttgtgaagtggcagtggcgcccttggaattgggttctgcccctgagagatggggccctggtgc

SEQ ID NO: 535016 - DNA, 139 bp, Homo sapiens
  misc_feature (26)..(26): n is a, c, g, or t
  misc_feature (94)..(94): n is a, c, g, or t
  misc_feature (123)..(123): n is a, c, g, or t
  misc_feature (128)..(128): n is a, c, g, or t
gtgaacactattgaaacttccgcttntttgctaaaaaataggcaagttgaatagtaatcaaaaaaacataaggaaagattttagttcaaaaatngattggcctcctttcgtctaccctggacnttcancaatcaattgt

SEQ ID NO: 535017 - DNA, 587 bp, Homo sapiens
ttaaatacaatcctaagttatcccgctggtagctgtggtctcgctggaccacttgcggcaggctgtgcatgaatggggacatggagatctcccatggcatctgtcgcatcgctgtggccctgggcaagaaccattcccggtccttgttggaccaggtagagcactggcagagtttcctggcactcgtcaacataattatgtcctgcacaggcatccctagccattatcctgtcaatgagaccaccagctccctaaccatcaccttctggtacacactgcaggatgatattctatcctttgaggcagagaagcaggctgtataccagcaggtgtaccggccagtctacttccagctgatggatatgcttctgcacaaggcccagttcccttctgatgaggaatatggattctggtcctcagacgagaaggagcagttccgaatttacagggtgtacatctcagacacgctcatgtatgtcctatgaaatgctgggggccgagctgctcagcaacctctatgacaagctgggtcgttggctcaccagctcagagtgagccctactcctggcagcacacagaaggccctc

SEQ ID NO: 535018 - DNA, 364 bp, Homo sapiens
gtagacacgatttgacagtggacagttcccatgagtaacataaggcacaagggtccaaggacttcacttacattcacaataggcatcagaaaatataacacgagagctataactgaaaagaagagtttcaaaatggaaaacattagggctcagctttaacaccaattctaataactagacacattatttctataaaaatctatcatttacaaaagcatacaggagttcccgttgtggctcaccgataacaaacctgacaagtatccatgaggatgcaggtttgatccctggcctcactcagtgggttaaggatccagtgttgccatgagctgtggtgtaggttgcaggcaaggctcaaatctgg

SEQ ID NO: 535019 - DNA, 228 bp, Homo sapiens
gtttgaatatcttaatagccatgcatcctcttgaatctgcggtaaggcttcgaaacattccacggctcaccaatatcttctttgtgtctcttacgttttctcgcgggaaaattggttttgtctgcccaccatagccacactataagccccataaggaaaaaggactgtgtctggggccatcctcatatagatccagcctgcagtgcatgccttgcttggtgactcggc

SEQ ID NO: 535020 - DNA, 151 bp, Homo sapiens
gtgttccttttctggattgccctcccttctgctcaatggtgggagggggttttttttagttttttttggttggggtttttagggtttttatggaaacaacttttttttggtgttctatgtgtatatccccgtgggcctgttggggagatgg

SEQ ID NO: 535021 - DNA, 1555 bp, Homo sapiens
ggagtctcgagctattcttcgtatcgttacgccggcgggttcgcgcccttctcgcgcctcggggctgcgaggctggggaaggggttaggagggggctgttgatcgccgcgtattaagttagcgctacggggcggccatgtcgagccaggcgcaggtcagcagcagccatagtagtcaggcagctagcagcggccgggcaccggcaggggcatgcaggcaggcaagcagtaggactctcataggccggccccatgggcacgtgccatgtgcaaccagcagcatgtataggccaaagagggcaacgtcagcatcgcaacacatgcacagttagcaacagggcccagcacaagaaagcaaacatgccccagatgcgtcaatccatcgccatcgtggcacacttgcacagcatgcacacacatagggttgcacaacatggctagtcaacccagacaaccgggcacacagctgcacctgcaagcacctgcacacgcatgccatcagtcgcatccgcgtgcaccaagcggcatgcactgcatagcacagcaatagcatggtcccatggtcccacatcatcacgggcagcaccaatttgccaccacaccgggagcaagcccaaccccacccacggccgactagcgggcacagctacctcggggccccacccaacgccacacccaatggctcaacagagaactttacacacacactccccacaaggcacaccgcggagcagcaaaagcacgcagcagcattacgggcacaacaacacacacaagcggcccaccaccagccagggccacacaaaaggggcacgcgcacaacaaccaggccagcacacagcacaccacatgagggaacacgaccaactaccacacacgcgcgcaggcactagcagccgaatacactcaaaagaagagcgaacccaactcatcagtcggcagtctcccgtcaagacaggaaaaacgacaaaagaagactcgcaaaattgacggaccgcgacacaaaaacagcgcacgcggaccgccgacgagcgcacaacccacaccaaaccctggaccacaacacatcgaacgaccaaagtacacacagcggcacggaactaacaacagcatggaccacagcacaataacaccagtggcgacaacagcacgcgcactccaagacagcggcagcctgacacgaacaagaccagcaaagcacgcacgagcggacccagacacgacagaaccaagccggcgcgcaagcccacagctggacgcaacgcgagagtcttcgatctcagccaccgacatagacagacgcccagtcacctatacgcagaacacgaaacgacgacaagcaacacgacgacacacgaggacaagccacacacgccacgggcagaacacaagccagcagcgaggcacacacacgcacacgcacaagcaacacagcagaacacgcgccaccccgcgacgcacacacatcacagcacaagatcacgaagcgagacagacaatcaaccccagcgcgcacacacaacacagtctacacccagcaacgaccgcgctgtcgc

SEQ ID NO: 535022 - DNA, 190 bp, Homo sapiens
aaaccctaataacgataggcaatagtttcaataattacgagcataggaattaatggggcgggtgtccttgtggtagaaagtgggctagtgatgttttggttttataggcggaatcctgtgcaatacgagttgctagatcatacgggggattgctactacccacggtttataggactagtttgtgtaggtg

SEQ ID NO: 535023 - DNA, 1654 bp, Homo sapiens
cgttgtagctgcgttcgtttgctcctgaccatcgggctgctgtgtctcttgatagacgatctctcctcgtaggctttgttgctgcccgaccacccagcttcatcctcatgaattgcggcgatccacttcacaacgacgggtttcaacaacaggggtgtcgcttagatatgaatgttcttcggcccaccacaagtgtcttttcccctcgactagaccaccctggctggaagatttttttgcgaacacaccgttttgcctttgtcttctgttgcattaagaaggggggacacgaccacattttctgagaggagaacctcttttgggtgtggtgataatagtaaaaagaccctgttggctcgtcgagatttcactcacgaagtcgccgcccgggccccccccgtgtttgtgtaccgccacgggtagatcatagagggagggagaataagggggggggaccaacaataaccgttgaaacaaccgggcgttgtcgcgagaagaagcacagaacggccttgtgatcccccccccccgcgagaagcctgtatatccccccgacccagaagcattgtgccggcccacagggaaatggttgttttccgcagcaggaaatagcaacaccgcggccacgaaggtctacacagtgttagagcccacatggcaccaaaagggcggagcacaagagatgttttctgtgggagaacccctccggggagagtttttgataaaaaagggggggacccacctcttgtgaaagggaaatttgccccctttccgcgccaccagtcgctcaatttctcctttgaggaaagtggggcgcgcccccacaccacaaagggccccaaaaaccccacagagtcgttgtggtcttctttgggccaacagagaggaaaagtcgtgtttcacttctcacacaggccccctcgtataaaaagggtgtgttttgggagaactctccccccacataaaaagcgccacctctgtaggatccacagcgagatatattatggggtgtttttcccccgctcgtgtcttgagaagaatgtggagcaccctcgtaggagatcgagatatatctcacaacaggcacaccatcttctcatatctcaccgcagagagagattgtgatatgtgagatattctctctcccctgtgtgcgcacacagcccacactctctctgtgagatgatgacacacccacacaggagagagattattgaggagaaaaactctcctgggtgcgcctctctcttgtgtggagaggagaaaccataaccacactgtctccccttgagagtggtgctcccacagctcattggagtccacgagaagagcctttataattaataataatttgtcactccccaatataagctctaaaatataggagaaaggtttcttcacaccacaggagattaccacgggggatagctaacctcaacacacgcctgtgaaataatatatgcccttataatcactttttattaattataaactctgtataaataagaagaataaatccactcttttttaaaaatgttttcccccacaaccactaaaaccctcaatataccacagtttgtttctaagtaaccacacaaacactgagagaaagaaagtttaagtagctgtgaaattaaatgacctccccagacca

SEQ ID NO: 535024 - DNA, 263 bp, Homo sapiens
  misc_feature (196)..(196): n is a, c, g, or t
agggctaccttagagaagtgaccattctcagctcagccatcatgggaaactaatcctgttgctggtgatttgttcagtagtggacatgacacatgtgggaggttggtgaggctggggtcccagtggcttttagaaaaatttctccttgatcttaagaaaagagatgcagagagaaaagatccttgggatatttgtntgctgctctgggtgtgacctaccggggcctgtggccagcccatacttggcaaccccaggggggcaaa

SEQ ID NO: 535025 - DNA, 1074 bp, Homo sapiens
agcggatcccgcgggccgggaagccgggaggagcggaggtcacgcttcggagctcgtcccgtcccttgctcgttcggtctccatgacttgggatgggcggctagctgcggttcgtgcgctcgttgctacagaagtctcaggctctgggcgcggacctgggacgccaggactgacccatgtatgagtcgcccgcacgctcagcaaagagctggcgaagggagctagtatagcctgaactaaaggacatcaaggtgtgcgaagacccagctgcgtgagacgaatgcgattggctcgagtgagcatgatccagctagttatcgtggtactatcatcagatggcagaagctcaatgcgtgcactccacggtggatcatccgagcatagaaggctatgtttcgaacctcgggcctgccgcaatcacggttggaccgagacatcgagtgatcgcatcgagtcgacacgagttgcgatcgtcgtggaagcattggaccaacgcgaaaaaacgctacgaaagtggtcgtggtcggcgaaccgcttgtagaccatcgatctagtcgccttgaatggagggcttcaagtcgattggaaaggaggtttcagaaagggttggaatagggaaaggcatcgctgggggattcaaagttcgcagggaaatgggagacaggttgatcgcaggggaaaccaataccatagccaagtcggggtggggatggtgtagctttcgcggagcgggagccacagcgattcggatttgtcggccaaaagaaaaggaatccaccaatctggccgcttgagaattgccgcccctgggtggcttttgggggaactcgggaaggtctccatattcgagtggaatttttgaggccaagggggccaacaggcagcgctaagtggtgtggaagtatgccttagagttaagcaaatggggagaccaattggggcaagggtaacaggttgcggatccagtgaagacagagggattggcggggaccacgtttgttgcggagacatattgggtgtgcgttacaaaggtccacgaaggacaaggaattgggtcgaaggtggagattggag

SEQ ID NO: 535026 - DNA, 1012 bp, Homo sapiens
tccggtgggggcggccagatgccgcttggggcctgaccacatgggtgccaccgctggtgcccccagccggagtttggggtgattttgccccagaccccgggggggtttgctgtcctggtgtttcgggccccctcttgccatgttggggtgcccgacctcggccctgatgggggttgtctctaaccggcggttctttctcctcgacgaagtgtgcgtgtgtctcaactctgttgtgcctcgcacactctggggggtttatatttttggagggatgatttttggtgggtgttggtgggcccccccccggccccaatgggggtccgacccccctctcgctcttgtgctatggcccctctcgcgcgggatgagtcgttgggggagtataacgcccctctctttcggggaagaaagagagattgtgtgcccctctgtgaagctgttgatattctcgagtatttcaccccccctcgcgagttttgtagaggacactctcgggtggacttgatttttttgggccccctgggtagttggagaggtttgcacctcggtgtcccccctgcgggtgttgtataacgcgtgtccacgcgggctcgaggtgtgttttctcggggaattgtctttcttagagagagctcggggccagagaacccagctttgtgtgttgtgtcttggccggggttcttgtgtccgaggtgttgggaaagtgcccgagacctcttgggggaccccgctttgcactcttttgtgtaactgggaggtgctcttgggccccgaacacccgtgggctgtgaccttgcgtttgaggtggagaaccggtttgccatttacagccctgtatagagtattctattttgtaatgttaagtaaggttttttgtgtacacgccgattgtcgagttcttttgaaaagatgacacaccaattttggttttttactgttatgtcgggcaacctttggccccccccacccgtccttgttgttaagggaaaattaaagtgctccccgttaaaaa

SEQ ID NO: 535027 - DNA, 109 bp, Homo sapiens
  misc_feature (3)..(3): n is a, c, g, or t
  misc_feature (70)..(70): n is a, c, g, or t
ctntcctgaatatcacactagtttccccatttctctggctgctgtgtgatggtgttttggaagggagcangccagagaaactctgtaaaacaaacaccagatcttatca

SEQ ID NO: 535028 - DNA, 260 bp, Homo sapiens
tattgcaggtggtgaatatgcaaggcggtacactacgcaggggacagcgtcagaaatcctctgttgatgggagctggagcgtgtagagtgcttgattgttgtggtctcgaaatggtgtgctataaagataaaggtgaggggaagacaaagcacaccatgtgtccactgttctggtctgatagaggaaatgcagagcccttgtagtgtattagataagcaagggcactgtgatacagtggtgagtgaaaggagagtgtggt

SEQ ID NO: 535029 - DNA, 413 bp, Homo sapiens
atctgtgtttacgcaggggcctttcttgccctgcctgcatactactacatacacttcatggaaatcagtgtggattccatacacacagggcatcccggatgcggggaaatcgctgtgagttctgttcgcacaggggtgtcacacaggtgggggtcattaacgctatattgttgcatactatttttcatatgccttacaatattttctggaacgttattaaaacgaaagcattttattgccaaaataaatctatgttgttacttctgcattagcagtagaaaaataatgtagcaaaaatatatattgtacagtacaaaattatagtatatatatatattttgccaataaatgaaaatagattgaggagaaagaagcacatttgttatagcacaaacttacaacaaaacccactg

SEQ ID NO: 535030 - DNA, 832 bp, Homo sapiens
  misc_feature (4)..(4): n is a, c, g, or t
  misc_feature (153)..(153): n is a, c, g, or t
  misc_feature (155)..(155): n is a, c, g, or t
  misc_feature (277)..(277): n is a, c, g, or t
  misc_feature (382)..(382): n is a, c, g, or t
  misc_feature (459)..(459): n is a, c, g, or t
  misc_feature (464)..(464): n is a, c, g, or t
  misc_feature (575)..(575): n is a, c, g, or t
  misc_feature (824)..(824): n is a, c, g, or t
ggcnggaaagaggaggcaggaaagggagacaacagaaaccggggcagtggggagatgagacatggagtaaggtttcttccccgcccacaaggttgtaggcagagcacagtgaacggggacgtgtcttagatgacaagactgtcctcccttaanancagaaagaacaggcagatgtgtggaaaggtttgcgtgtgtcaggaaaggaaggcattatcctcgacatcaatgggcaacagattgctctgggatagacaaccgggaaagccatacacctganactagactggttggctcttccacaacaggattctcacgcctgcgctctatgagtgaaaaccaaagcacttagcgtagagtggcccatgacgaagtctcaattaangtgagctgggctggttactgaaggcatggcatgaagacaaggggccgctcatttgtcaccaactgtctatgactgtnaaaanggaagatggcaaaaatctctaatatgaggaagataagccaaaagcacccatcagcctgaagagctttgatgctgggatacagagcccagctccttgcttcccatgccagcngcagcctgtacagcagcctgacctttaagcatacagggatgtcacacctaaggctgttccctagtacacctctgaacaactaagtccgcatctcatccgtgtcacatatcccagaatcccaaagtggtctccccaacttatctatgtcctctggtcctccttatgttaattgttcttattaataaagcacaggctttgccccgcctgctttagagtcacacagagagatggttaacacgctggtgccgntggcccca

SEQ ID NO: 535031 - DNA, 116 bp, Homo sapiens
tttgacatggatgttagaattctttattattacttatcttattaacgccactttaatgctgcagaaaattcaaatcacccttgatacccacttctttctcccacccaaatctgatc

SEQ ID NO: 535032 - DNA, 892 bp, Homo sapiens
acatacgtgtgcatgtgtctttatattagaatgattgatcattttgtcagtatatacccagtaatgggatggctgggtcaaatgtattcctagtagtagatccttgatgaatcagacacacgtgtcttccacaatggttgaaataatttatactcccagcaagagtgtaagagcattcttatttctccacgtcttctcgagaagtatcttggtggcattctctggaatttgaatgtggttcctgaatttgaatgttggcctgccttgctagatggggaagtactcctgtataatatcctgcagagtgtgttccaacttggttccattctccccgtcactttcaggtacgaccagtcggacgtagatttggtcttttcaggccgtagtcccagtatttcttggaggcttgtgtgtttctttttattctttgtttgctctaagctcctcttcatgcttcatttgcagttcatttcatcttccgtcgctgatcccctttcttcaggttgatcacatcggttactgaggcttgtgtattcatcatgtagttctggtgcgtggttttcagctcctcatgtccttttaggcccttatctgcctggttattctagttagacattcgtctaaatttttttccaggttttaacttcttgacatgggttcgaactactctctagcgctgaattagtttgattgcctgaagattcctctctcactgtccaagtccttccctgaacgttgtgccttgctgggagggcgctcttgaggaggtggaccggggttaaaatcggtctggcgtgtccccggtgggtttcctgcctggaggggaaaagcggtggccctctcgtggcctctagacccccggggtggcgccattgctgcgccaaggggttcg

SEQ ID NO: 535033 - DNA, 817 bp, Homo sapiens
  misc_feature (5)..(5): n is a, c, g, or t
  misc_feature (71)..(71): n is a, c, g, or t
  misc_feature (73)..(73): n is a, c, g, or t
  misc_feature (76)..(76): n is a, c, g, or t
  misc_feature (90)..(90): n is a, c, g, or t
  misc_feature (92)..(92): n is a, c, g, or t
  misc_feature (94)..(94): n is a, c, g, or t
  misc_feature (99)..(99): n is a, c, g, or t
  misc_feature (101)..(101): n is a, c, g, or t
  misc_feature (112)..(112): n is a, c, g, or t
  misc_feature (161)..(161): n is a, c, g, or t
  misc_feature (180)..(180): n is a, c, g, or t
  misc_feature (192)..(192): n is a, c, g, or t
  misc_feature (196)..(196): n is a, c, g, or t
  misc_feature (204)..(204): n is a, c, g, or t
  misc_feature (209)..(209): n is a, c, g, or t
  misc_feature (286)..(286): n is a, c, g, or t
  misc_feature (301)..(302): n is a, c, g, or t
  misc_feature (308)..(308): n is a, c, g, or t
  misc_feature (311)..(311): n is a, c, g, or t
  misc_feature (313)..(313): n is a, c, g, or t
  misc_feature (322)..(322): n is a, c, g, or t
  misc_feature (326)..(326): n is a, c, g, or t
  misc_feature (346)..(347): n is a, c, g, or t
  misc_feature (381)..(381): n is a, c, g, or t
  misc_feature (397)..(397): n is a, c, g, or t
  misc_feature (442)..(442): n is a, c, g, or t
  misc_feature (445)..(445): n is a, c, g, or t
  misc_feature (478)..(478): n is a, c, g, or t
  misc_feature (511)..(511): n is a, c, g, or t
  misc_feature (520)..(520): n is a, c, g, or t
  misc_feature (548)..(548): n is a, c, g, or t
  misc_feature (552)..(552): n is a, c, g, or t
  misc_feature (565)..(565): n is a, c, g, or t
  misc_feature (570)..(570): n is a, c, g, or t
  misc_feature (575)..(575): n is a, c, g, or t
  misc_feature (581)..(581): n is a, c, g, or t
  misc_feature (587)..(587): n is a, c, g, or t
  misc_feature (589)..(589): n is a, c, g, or t
  misc_feature (591)..(593): n is a, c, g, or t
  misc_feature (605)..(605): n is a, c, g, or t
  misc_feature (629)..(629): n is a, c, g, or t
  misc_feature (632)..(632): n is a, c, g, or t
  misc_feature (637)..(637): n is a, c, g, or t
  misc_feature (651)..(651): n is a, c, g, or t
  misc_feature (657)..(657): n is a, c, g, or t
  misc_feature (736)..(736): n is a, c, g, or t
  misc_feature (757)..(757): n is a, c, g, or t
  misc_feature (792)..(792): n is a, c, g, or t
tttgngtgggaggcacgtaagaccgctctgagcgcacgggggcgctcacctcactggctcgttcgcgttcnangancagatccggggtanangnaaaananctccgggccangggctgcccgtcgccgccgtcggggagtcagcccgccagacccgccagnccttcagcccgccagccancgcttcgcgtgncccngtccggtncccgntccagaccaacaccattcgtctcggcttgcactgtaaacactcagttagctagaagcacgactctacttcaggtttncttcaggaatagacnngccagncantntcgcgcagnagtnagtccagcgttcattcggtnncaagtcgtcgggtccagttaatcctagcaagaangaagattgagggaaanatcccggagaaaatgcgttgcttcaagttcacaagttcatgattngcncatagcgaccacaggaattttcccagggtgttngtcgcgtagcgagccaatctcggtagcaatttncgttagttnccatcagcattaacccaataattcaggnttantgacggtagacanagttngtacnttatcnaaaaantnannnccagttcggggnctcttgactatttcaacaagtcgnagnaaggngtagagttattccnttactngggaatgcaaattacttgggtcagatttcaatttttcaaaatttaaaccctttacaggaggaacaatgttacctcccanggagttccagtagaatctccnttggctaaactcagggacctacatgttttcagaangcatggaagagggaaggggatttga

SEQ ID NO: 535034 - DNA, 131 bp, Homo sapiens
agagtgaaactgcacccccctccaaaaaaaataaagtacagtttaaaaaaattaaagtacagtttaaaaaaagaaaagccacttgaagtaaaacatttaagcagggaatactgatgatgtgtattacttac

SEQ ID NO: 535035 - DNA, 217 bp, Homo sapiens
  misc_feature (151)..(151): n is a, c, g, or t
  misc_feature (213)..(213): n is a, c, g, or t
  misc_feature (215)..(215): n is a, c, g, or t
gatccaagaaccctctcttggggtctgaatcatacccctttcgggttacagcctatcacagcatttttaatcctatgcacttaacacttctgtatagaaaaagaacatcacactagaattttgatgacaatagatgacaatatgatgaatnttattatatgaagtgttaaacttattagagcagatatggtactaaaaataaaatcccacctncnct

SEQ ID NO: 535036 - DNA, 228 bp, Homo sapiens
ttagtttatcatctttacaagaatgctaatcctgtcctcaacctagattattttatatacatatatatagtacatgaaactcttggggtcagatgcttttaggaggccatcatgcaagccagtcatttatgtcactgctacacaacactcctaacttgactgtggctattgtaatacataggcccccctattgtaatatattggggtgccaagacactttatcttccc

SEQ ID NO: 535037 - DNA, 110 bp, Homo sapiens
catccccgaccagccccaaggttgttattatatctcacacagaaatatctggccgtgtccacggccgtcactgaagtcagcctcagggacaataggttcttggccgtgtc

SEQ ID NO: 535038 - DNA, 165 bp, Homo sapiens
gcggacgccagattgcaggaagtaacattctttgattgttcataatatacgaagttacctataacacggtgcagtaacacagctagttcctctgtatgttatggtagaacggatttgtaatataaagttaacaggaaaaaatgctcagttctgatacggttttga

SEQ ID NO: 535039 - DNA, 257 bp, Homo sapiens
  misc_feature (214)..(214): n is a, c, g, or t
ggcatctaacctcactgttcttattatttcgaattagccatactccctattccgctactaactactcatacatctcctattaaaaaacttcctaccactcaccctagcattacttatattgcatttctccattcctcattacacatctccagtcattccccggctgcataccaggtaccgcttgcaaatccaagtcagggttaccgaagctcgnatttcgctaatcctggatcctcaactgctttcctgatgtttac

SEQ ID NO: 535040 - DNA, 177 bp, Homo sapiens
aaggagtcatgacttccagaactagcaggagtgattaaacggttattggcgagatggtggggtacaagtttctttcagcagatccagggattatcagctcaatgatcttgcttcatattatcctaaatgatctggttagattatcccagcttaactacattccactcagcaagttgt

SEQ ID NO: 535041 - DNA, 613 bp, Homo sapiens
  misc_feature (172)..(172): n is a, c, g, or t
  misc_feature (285)..(285): n is a, c, g, or t
  misc_feature (320)..(320): n is a, c, g, or t
  misc_feature (448)..(448): n is a, c, g, or t
  misc_feature (473)..(473): n is a, c, g, or t
  misc_feature (503)..(503): n is a, c, g, or t
  misc_feature (508)..(508): n is a, c, g, or t
  misc_feature (517)..(517): n is a, c, g, or t
  misc_feature (523)..(523): n is a, c, g, or t
  misc_feature (585)..(585): n is a, c, g, or t
  misc_feature (607)..(607): n is a, c, g, or t
ccggaacacgtttctgcgacccggggctctggccagcactgtgttctgcgtttggtctcatacctgcgtctaccttccatctgtgtccagcggccccggctccagcccagccagcactctgcagggtcacacgcaccgtgtccccacccaggacagcagacacccgccagantgtgcgcgcccagtgactgcaccccggccctcatcacccaccggcactgattggggcaccgcctggcccagcctccaccagggacccctcctcatgaactctggagccctganaagaaaagggcagccccccaccttgtcaccctcanggcttccccttctgtcctcattcttaaaaactgcttctcccaaacataacgcgttagccatgaaagaatccgaaccctgggtccgaatggaccgcctgcggtctgcatcaacctctgggaaaccacancaatgatgccaactgggcacgtcangactccccacacacccacacgatgccacangtccnggggctgtncctgantaaggaacctcccattgccttcctggccccggataaaaaaaggaagttattttggggctacnaaaccggccccacacctggctnaaatca

SEQ ID NO: 535042 - DNA, 217 bp, Homo sapiens
tgtgaacgagtagaggagtcctccagcgccagaaggttaagaagcagggtcggagtgagtgagatctcgagaggagtgaaagtgagtgagaccaagtgcaccaaagaaagagcaaaaatgaggaactccctcgtgccatagtctccctccgatctggatagcttggacgggtggagccttaatgatgatggcagcagcgaccctagggatatcgacc

SEQ ID NO: 535043 - DNA, 271 bp, Homo sapiens
cgcgtgacacgccgaagatccatacattttctttcaaatcccttataagtatctggtgattttttcggatggttggggggttttggtttttgtttttgagacagcctctcgctctgttgtccaggctggagtgcaagaacctatctaaaaaaaaaaccaaaaaaaaaaccaagggccaaaaaaaagaaaaggacctttttggggggggggggaaaatgccagagggaaaaagataatcctagaacccaggaaatcgggacttaaagctgaa

SEQ ID NO: 535044 - DNA, 314 bp, Homo sapiens
cgagactgggtgaagggatgttccggtcgtgatgggtaatgggctgtcgcagtgtgagcagatgacgggatgttccatgtgatgggtgaagggctgttccatgtgacgggtgagcttgtgactgggtgactgggctgtaccgtgtgactgggtgaagggatgtcctgtgtgacgggtgacatgtgatggctgacgggatgtaccgtgtcatgggtgagatgtggccagtgatgggatgttctgtgtgctgggctgttccgtgtgacgggtgatcggatgtcccgtgtccgcaggtgacaggatgttcggtgtga

SEQ ID NO: 535045 - DNA, 1486 bp, Homo sapiens
tgcctggtggcacggcgggatcctccacagagaggaggggaccaattctggacagacagatgttgggagggatacagaggagatgccacttcgtcactcaccactaccagccagcctcagaaggccccagagggggggtggctgaccacggcattggagcgacaccttgacactgtagcaataggcaggggtgccctgccacaacccatccaggccagaacacaagctgaccatgcgtcagggggcctagaggatggaggttcttagcgtatccttgggcttccaggagccagccctggcctctggcccacttccgccacagtgggtcttgtgtgcataagagccccatgttgacgaagcctcgagcgctaggttcacagaaaagccatgtccattgacaccctgcgctagcttcgggccagggacgcaagattgacaccaaggacaacacaagaccaccctttcccagtggaatactggttagccacgcggcgaactcttcccattacacacctacccttggtgaccattcctagtggtagataatcagagcgtctaatcaacaggggcggagcgcaagttcacaagcaacggagttcccccgaaggcgtatcgggtaaacaccacacagaccgatatacacgaaaagcctgacccgtgcccgcaacatccactacagcattctcctaccccacatcagcaagaggaggcaccgaacacggacccttatccggcacgccggttatcgacacgagcaatctcacatagtatgaaacacaaaactgcggaggcagcaccttacaatagagagagacctagacgttgtaagatgcgcgtacctaactacacactatgtacacaaaccaccattcataacccacaaccatctcctatcacagtcatggcaaccacacacccactccagcaccaccatgcgacagcaatcttactacatcaaaacaagaacccacacaaccacatcacaacatacacttaacacaacatacatagacaaacaaaaaaaaactaacagacacacattacaacagaccacatagcaatccacaacacaaccccaataacaggagactaaacacgtctcaacacaacccacgcaataacatgcaccccgacaccaccacaaactctcactgatcataaaacgcaaatcgaacatagacacaactcctacacaccaaccacactacgcaccaacacacacacatacccacacacaaacgccacaaaaagcatacacaaaacaaccaccacgaccaactacagactaatccaaacaatcacagaccaacacaacgacaacaccccaataacacatccatacaacacacaataacctcataacacaccatcacacgcaatacgacagcagacaaacaaacgaccactacacaagcaataaatctagatcgaacaccacataaagatacaccaaaacataactcacagaaaacatacataaatcaat

SEQ ID NO: 535046 - DNA, 1843 bp, Homo sapiens
  misc_feature (542)..(542): n is a, c, g, or t
  misc_feature (832)..(832): n is a, c, g, or t
agctcctacaattttcttaggatattctgggaaagatgagcggagactgcccgccttgtcaaatctagtgtctttttttcagtcctcacactgcttgacctatgtataacctcctatacttccctctttgcatactcctctgggttttctgtggtagtcaagattcctccctgagatttatttcccatgagtcttgacccctcccctcagttggtgctatttccccctacccgccctccgatgatcttatcagagcccacaggttcagttttctttcatgctacctgaatgtcctgataaactggctcgctctcttctttaccttccataatggcattaccatttaccacgccacccaagatacttactaggaacctcaaagtattgtattctttttctccatcacactcatacttaatcatcaagtccttttgagcttgtctcctcttgaatatgtcccttcttaattccctgctgccttcttagtaaaggccttcattcttttttgcctagtaataatcttttccatatgttccagttanaataccatgttctccctattccttattacatagctagcattccttgaaaaaaaacaattctctcaggcctccatacctttagcatgttacccactctgcctctgctcttctggaactagaacactcatccttgaaggctgggcttctgtatgaaggttggtcctgcctccttacttgaggtgaagctttgtacatgcctgtattacggacatcctcttatttaagtgtttgtctctttcgtcattgggactccagcacccagcatagtccctagtatactagttggtgcngaataaatagtagctattattagaaaaggaagggtgaaattgagcatgggagttagtaaaatgtatatggaaatgatttttaaagggaaaggtaatgattttctggcaggaaaagcagcaatgacaagattacttaagtcttgtgaaataacacttctcttccttgacctgctgcttcccttttttaccacacacacacgcacacataccacagccctttgagactgaaagcagctctattgagaatagtagtgtcaactgtattatgtagaaattctaaagtttttgggattatttcatagccctgaccttgctacttctctccactttatgtggcaggtttaatctcaggtctccctcatacacttctcagcctcagcacctaaccctcacacaacactccagtattgatgcagtcaatcttgtataacattttttgaatgtccaatgtgcaaagcacgatgttggaaattatacagaggtgaataagacaaaaactcttgctctcaaagatgtcagtctttttctttgcaaggataacacatgtagagtaaaatgcataaaggggactaattttaaatgtacagcttaattaatttttatgtatgttaacacccatgtcaccaccatgtttaggacatttccagcacccctgaaatttccttcatgccccttcccagtctgtacctacacctctaaatctattttcaatcttaatggccttttaaataactgggcttctcacaaccatagtgaacagaaacagctgggttgtcaacgtctaacctaatacttcaggaaaactcatgatggtttccatgttaagagagacatggagcagggcactggcatggtggatggatcacgcctgtaatcccagcactttgggaggccgaggtagggggattgcttgagcccaggagttcaagactagcctgggtaatataaggaaaacctgtctctgcaaaaaaaaaaaaacaaaagaggttcacccccattggaaaacttccc

SEQ ID NO: 535047 - DNA, 663 bp, Homo sapiens
  misc_feature (40)..(40): n is a, c, g, or t
  misc_feature (42)..(42): n is a, c, g, or t
  misc_feature (44)..(44): n is a, c, g, or t
  misc_feature (49)..(49): n is a, c, g, or t
  misc_feature (521)..(521): n is a, c, g, or t
ggatgatacacaactgccatcacctcagttcccactacgntngnaccangggaacttctacatccatgatctcatctactgtgagtacaggtatccctacctcacaaccaacaaccatcactccctcatccgtgggcatcagtggttcattacctatgatgacagacctcacctcagtgtacacagtctctagcatgtctgcaaggccaacaactgtcattccctcatctcccactgtccagaatacagaaatctcaatctctgttagcatgacgtctgctaccactcccagtggaggaccaacttttacaagtactgagaacactccaacaagggccctcctgacaagctttccaatgacacattcattctcttcttctatgtctgaaagtagtgctgggaccactcacacagagagtatctcctcacctcgaggcaccaccagtacactccacacaacagttgaatccaccccatcacccactaccaccacctcatttaccacatccacaatgatgganccaccttcatccactgtatcaactacaggcagaggtcagaccacctttcccagctctacagccacattcccctgagaccactacactgactctacaactgacatttctacagtatctgccccgcgagccggttcagacgctc

SEQ ID NO: 535048 - DNA, 639 bp, Homo sapiens
aggttaatatcttattctagttataactggcatttctccagtgacaaataatatcaaacattttttgaatgtccaatgtgcaaagcacgatgttggaaattatacagaggtgaataagacaaaaactcttgctctcaaagatgtcagtctttttctttgcaaggataacacatgtagagtaaaatgcataaaggggactaattttaaatgtacagcttaattaatttttatgtatgttaacacccatgtcaccaccatgtttaggacatttccagcacccctgaaatttccttcatgccccttcccagtctgtacctacacctctaaatctattttcaatcttaatggccttttaaataactgggcttctcacaaccatagtgaacagaaacagctgggttgtcaacgtctaacctaatacttcaggaaaactcatgatggtttccatgttaagagagacatggagcagggcactggcatggtggatggatcacgcctgtaatcccagcactttgggaggccgaggtagggggattgcttgagcccaggagttcaagactagcctgggtaatataaggaaaacctgtctctgcaaaaaaaaaaaaacaaaagaggttcacccccattggaaaacttccc

SEQ ID NO: 535049 - DNA, 323 bp, Homo sapiens
  misc_feature (181)..(181): n is a, c, g, or t
atctagaggatcctgggtgatgggtgtcagggttgtactctgtgtggagtgtactggtgggaccactcacacagagagtatctcctcacctcgaggcaccaccagtacactccacacaacagttgaatccaccccatcacccactaccaccacctcatttaccacatccacaatgatgganccaccttcatccactgtatcaactacaggcagaggtcagaccacctttcccagctctacagccacattcccctgagaccactacactgactctacaactgacatttctacagtatctgccccgcgagccggttcagacgctc

SEQ ID NO: 535050 - DNA, 447 bp, Homo sapiens
gcttttcataatctgttacattaaaatccattggtctatcttgcattttaaatggattttttcctatgcatgatttcgtaatatcaccacgttggtgacttaaaaaattttggttcactcagttgtgtgggtcttcaaaacgttgtcatgtttcattgtacaataacaaaaaatctgtctgggcacggtcgctcatgcctgtaatccccatattttgggaggctgagttgaggattgcttgagggcaggagttcaagactagcctggacaacatagttgagacctcattcaagaacaaaataaattagccagatatgtttctccatgctggtagtcctggctatctggaatgctgaagtggaagaactgcttcagcctaggagctcaacgctgtagtgagctatgctcgcacccacctgaactccaggccgcgtcaccgagagaccc

SEQ ID NO: 535051 - DNA, 284 bp, Homo sapiens
tctcttttgatagggttgtcggaaactgctatattctcctatgtgggtaattgaggagtatgctaagatttgcgtagctgggtttggttaatccaactcaactgcctgctatgatggataagattgagagagtgaggagaaggcttacgtttagtgagggagagatttggtatatgattgagatgggggctagtttttgtcatgtgagaagaagcaggccggatgtcagagggggtgcttgcctatctaaagacgagggtacccagctccaattccgaaatcat

SEQ ID NO: 535052 - DNA, 436 bp, Homo sapiens
gcggcctggtgccaaaatgttggggactgctgtgctttaaaatctgccatgaatctgaacgcctctattatatatgctccctatagactttgcttcctaccgtcttacgttctgccttataagcatctgactttgcacccctctgtccttgttagtatgctacgctggtgacattgaccaaattgaacacacattaattataagcttagttggtgatgacctcaacggaataacgtgacatacagtattgtgacaatacttcttgcatgtatctgcaggtggagttgtaaacctggtggtcccgagatggtctaaattccatcttcctatgtatctccttatattaatagtggtaacattagtggtggtgattcagcatatcaatgcctcttctcatggcaacaacaaacgttttccttctgaatcaccattaacc

SEQ ID NO: 535053 - DNA, 780 bp, Homo sapiens
cggcacccgaggaacacgattctccgaccgaagcgtcccagccgagtagtggaagaggaggaaactaaaacatttaaatgacctgggtgtgacagatgtgttgtgtgaagcttgtgaccagttgggatggacaaaacccaccaagatccagattgaagctattcctttggccgttacaaggtcgtgatatcgattgggcttgcgagaaactggctcttggaaagacaaggcgccgtttgcttttgcccgattctaagatcgcactgcatggtagaatccccagcagtcagttctgtcttgctcctagtttctgtaccgccgctctcggtgagctggccttttcagatctcagagtcagtttgaagccctggggtcctctattggagtgcagagtgctgatgattgtaggtggaattgattcaatgtctcaatctttggcccttgcaaaatggaccacagtatacataataggcaagcatccgtggtcgactggattgaccatcttggaaaatacgaataggtttcaacgttgagagctctcaaatacttggtcatgggatgaagccgaccgaattactgaatatggattttcgagacagaggttgacaagatcctcaaagtgattcctcgagatcggaaaacattcctcttctctgccaccatgaccaagaaggttcaaaaacttcagcgagcagctctgaagaatcctgtgaaatgtgccgtttcctctaaataccagacagttgaaaaattacagcaatattatatttttattccctc

SEQ ID NO: 535054 - DNA, 458 bp, Homo sapiens
aaggggtctcgttctattgcccaggctggagtgcagtggaatgatcttggctgaatgcaatgtctgcctcctgggttcaagtaattctcctgcctcagcttcccaagtacctgggattacaggcacgtgccaccacacctggctaatttttttattttcagtagagatggagtttcactatgttggccgggctgatcttgaacttctgacctcagttgatccaccggccttggcttcccaaagtgctgggattacaggtatgagccactatgccttgccaatttttaggaaaaatattaggaaacaaaaatattaaatgactgggcccagtggctcacacctgtaatcccagcactttcggaggccgaggtaggaggatagtttgagcccagaagtttgagaccagcctgggcaatgtagcaagacctcgtctcttcaactgataaaaaatttagaga

SEQ ID NO: 535055 - DNA, 277 bp, Homo sapiens
attgcactctagcctgggcaacagagcgagactccatctcaaaaaaaaagaaaagaaaagaaaaaagttgggcagaggatttaaatagccatttcttcaatgaagatatataaatggccaataagcacatgaaaagatgctcaccttcattagttattgaagaaatgcaaatcagaaccacacctaattgaatggcaataataataaggaaaaggagaataagtattggcacagatggaaattagaaccctaatgcattgctggtaggaatggaaaa

SEQ ID NO: 535056 - DNA, 301 bp, Homo sapiens
cctcaagatctttaccctgaaacagttctgttgaatttcaccctggcaatgtaaactgatagcttattttcacagatgtgggacaggaagtcatccctctgctcacctgagacaattgcatatccgattgcttcctgtgccctattgtttatgtaaaaatgcagatacactgagacagactaaactttttttttctttttcttttttttttttttttttttttgagtcagagtctcaccctgtcacccaggctggagtgcaggtggtgcaatctcagctcactgcaacccttgccttccag

SEQ ID NO: 535057 - DNA, 203 bp, Homo sapiens
tattagacactgtcgagcgttgcgggggcgcttccaccctgagcggatgatatctcacgacaccttccgagcgtccgctcactccccttccacccgtcatctccacccttctgcagatgataatatcaagacacctgctccgagcgtctgcgggggccgcttccaccctcagtcggatgataatctcaagataccttccgagt

SEQ ID NO: 535058 - DNA, 207 bp, Homo sapiens
ggatcccccgcgccggtttgcgctcccccacagctgcacccacaaacgcacagcacacacacgcacacacattgcacacacagcacacaaacgcacggcacacacacgcacacacatgcacacacagcacacacgcaaacgcacagcacacacaaacgcacagcacacacgcacacacagcacacacacgagcgctacaccgggcgg

SEQ ID NO: 535059 - DNA, 270 bp, Homo sapiens
tcctaccacgtctgcaggtccgctcttctctgtgtctccttcttgactgcttcatgttggcctcagtgtcatgcacaccttgtgctttgagcccagcaggtccttgagcatggatctttgcgacatgtgcaccctccgcagtggggggcgcttgaacttgtcccgcagatacaatagcttctggttcatgtactccagctccttgctggtgttctggagcctcacctccatgtcgtacttctcctcttcagacgcatagatacatggcgt

SEQ ID NO: 535060 - DNA, 330 bp, Homo sapiens
ggggcccaaatttttttttttgaaggaatgggccaaatcaaaaaacttaagggggtgttttgggcccactttttaaaaagggaaaggaaaccccaacatgcctgccctgccttggggacccgggaagtcacccccccggtttggggaaattaaccccagggttaactttcattatcactggctcccaaggggggcttgtcaaaaaaatattccccccaaccaaattcgggcgctcccattttgcccaagttggtcacgtggtcacccaattttttgaagggtttcacccgctcattcagggaatgggtctcaatgaaagcaccccaatgg

SEQ ID NO: 535061 - DNA, 648 bp, Homo sapiens
ggcgggggccccaaatttgtgtgggtgggtgccatagtgaaatgccaaggccaatggcctggtggatggtgtgtgggggtggctggagtgaggctgcagagtggtgtgtgagtcccaaattgtggtagtggcatggtgaattccagggatgctgtgcctgacatggtgatggtggagctggctttgtccccatctatcccctctcctgtgtgggtgagccagtgtgcactgtcagaggatgtgagctggctgaagtttggctcagcatgcaggctggcattgctgatgcagcaggaggagcgtgccaaagcagcatgggagatcattctgctgaatggaacatgagctcttggagcagcagaatgctgggcagcttgtgttacttggagcaggaactgacatgcaggagattgccaagatgggcaccccagtccctcggcccccacaagacatgggccagattggtgtgctgcactcctctgggtcctcgagtagctagctaccatgtgaggcccagttgggcccccactaccaacagttttgcccattgggagcccctggttccctggctcgtgtgtccacgacagtccctggcagatgagcacagaggaggatgtatgatcctactgtgtgtcccaaaatccccag

SEQ ID NO: 535062 - DNA, 367 bp, Homo sapiens
ctcgaggccaagttcttgtcgcgacccaagaagcggcttcgcgcttccgccacggcgcgcacgacattggcgggcgcggtgccaccgatgttcttgcgggcgttgaccgacgcttcgaccgtcagcacgcgatagacgctgcgatcgatcttgggctcgatcgcctgcatctcggcgagcgcgagcttgtcgagatcgacgcccttgtcggcggcgatgccgaccagccgcccggtgacgtgatgggcctggcggaacggcaggccgaccttgcgcaccagccagtcggcaagatcggtcgccaccgagtagtcggccgaagcgacggcgcgcatgcgctcggggttggcctttaggtcgcgcacca

SEQ ID NO: 535063 - DNA, 174 bp, Homo sapiens
agtctatacatggtttaacacatgaattaccacataagccagcacatccactcccagatgtatttcccccactgaactgaaactatgcctacaaacttacacataaatgataacagtagcattataatagtcacaaaggtggaagcacaccaaatgtcccctagttgatataac

SEQ ID NO: 535064 - DNA, 130 bp, Homo sapiens
tttttgggtgaaatgaaaaaaaatgcagtgtgacagtggcagcctctagccctcagcttcccccggaatcagatggatcctccccgattacgtgaataaaatgatggaacccaaaatccctgtcccttta

SEQ ID NO: 535065 - DNA, 93 bp, Homo sapiens
cctaggaaggagttttagagactgaggcagggcaggacataatggattgagaaacaggctatgccataaaaaaaaagtcgacgcggccgcgaa

SEQ ID NO: 535066 - DNA, 892 bp, Homo sapiens
atctgtgtttacactggacgacttcatggatcgcttgggtgtactggaggctggatacagccgtccgaggcagcggagtcgattacacgtgcctgtcgtcacctacgaagcttgatgtctacctcctacctgggcatctaccgggcacaatcgctggcacctctgccccattctctatgagagccgtttccagcttgggggtagtgcccgtggctcccgagttgcttgaccgtgccaagcaacgtggaactgaccgtagaggggccaaattggggagacttgccacactccacccctccatgctggtggttggatcctcctgtcttcctccttgtcccatgaaggccaaccccccagctctggggactcctaggtcgacttgggaactaccgtgcatcttcagtccccttgaacttctgccctctgtgtcagggctgactacaagcccgcatcaggtctgggggggctccggttgccctgagggatgagccttcagcctccctttgtaatgctgctcctctcgcactgcccagacagccatgagttggagtgcagacagctagaaggagagaccttcttgtgaacgctcatccccccgctataactccccttccatcctgacattctccccttctttcacttacaccgctcagggagagagaaaaacttgaaatgctttccagcgcttcttggaagccgtacatggtccaggggatagggggcccacatggctgaagcatgccatgtttgaggggaagggtaggttgagcctacttaattccctggcagaaggggatggcaggacatggactgaggttgcaatacctgcaagttacacagctgtacccatgacgcagttcttgtatttgaattgtgctggtcggcatcagaa

SEQ ID NO: 535067 - DNA, 529 bp, Homo sapiens
  misc_feature (38)..(38): n is a, c, g, or t
  misc_feature (62)..(62): n is a, c, g, or t
  misc_feature (68)..(68): n is a, c, g, or t
  misc_feature (77)..(77): n is a, c, g, or t
  misc_feature (91)..(91): n is a, c, g, or t
  misc_feature (96)..(96): n is a, c, g, or t
  misc_feature (104)..(104): n is a, c, g, or t
  misc_feature (109)..(109): n is a, c, g, or t
  misc_feature (116)..(116): n is a, c, g, or t
  misc_feature (131)..(131): n is a, c, g, or t
  misc_feature (149)..(149): n is a, c, g, or t
  misc_feature (157)..(157): n is a, c, g, or t
  misc_feature (160)..(160): n is a, c, g, or t
  misc_feature (163)..(163): n is a, c, g, or t
  misc_feature (453)..(453): n is a, c, g, or t
  misc_feature (456)..(456): n is a, c, g, or t
  misc_feature (522)..(522): n is a, c, g, or t
aaaacctcaccccaaatcaaaaacatccaaaaaactgnaggttccaaaaaagttcaccagcnatcttnatttcctcnataaaaaaaggggnaaggnagccaagnagggnaaggggnagtccctggggtggngggcatgtctcacccccnagcccggntgnagnacaatcccctccccttaaatagctgccaccaaatggggcaagcccagggctatagcatttaaaaactcccacatcccattttatcaaaaccaaagagaaaaaaaaatttcccttttcccccaaaacccaaatatatatatattttttttcttaaaaaaaccaaaactttgaaggcattaagcgttaaagtgaatctagaacaagggaatgtgaaattccctccttccttcccccttcctgtggggttcattggtgcatccccagcagagggaccggccccaaggggatgncanaagggaagtactaaaggtagataaggtcgggtggtctccccagccaatcagcagccagtgtgggtnttagtag

SEQ ID NO: 535068 - DNA, 118 bp, Homo sapiens
cagcgcactagcctcatggatagaaaacaagtgtaatttctattttagagaaaatcagattttataagacaccagacttgaaaacttcttgccagtgagatatttttgactataaata

SEQ ID NO: 535069 - DNA, 949 bp, Homo sapiens
tgccccaaaaaaggggcgttttaaaaaaaaaaggggggggccaacccgcgggaaaggcctaaaaaaaggggaaaaaatagtgcggaaccccccggggggtgggccccccggggggggtattcacaaaaactcccgaagcctgttgtagtatccccccacccaggcgccaaagcggtgggcgtcgtgcccacaccccgagcccacgaagaagtcccccaaagaggtggacgacacctgaggggtggggaaaaaacaccccccgcggggcggtgatgctcacacaaaaagcggccaacagcgtgcgggagaagccttcccccaaaggtgctgaacgacgcacacacggagcattgggggcaaccggtggtcggccccacagaggcttcgtgtgtatgaggaaggagttgtctcccccgcgcgaaaatatattccacaacagcgggtcgttcgccaccgaagccaccgtgggtttcccccgcgaaaagcgccgcatgactgatccatccacaacgctgtgcacgagaggaacaaagtgcgatcccgtcttctcgtgggaaaaaaaccccccccaaaggcgccccacagaataaccattatggtcgaccggcggccagggaaaccagggtggtcctcctctaaaatgactaatgcggcggcactgcacccccagatagaggcaccccgtgtgtgtgggccatacaacaacaccacccgcgggccgcccccccggagggataatcacccacacagacgtagtataagccccaacaccacgggccccaaaggactggacaaacaataaccccccgtggcacagaggagtacgcgagtagcccagccaggttcccggtgtgccccaaagaggcgtcccatgaaagagtctcctcggccccaattccaccacctccaggcgaccaccgggggatgcctcaacaagctgactcgtccc

SEQ ID NO: 535070 - DNA, 1201 bp, Homo sapiens
ggacgcgctgggtctgcctccgggattgcacgaagagtccgagtcatttctcagaaggtttggataggtgggccttagaggagacgccgccgagcaccgccaagacactggaaaacacacccctctctgtctgcctgggagcagccacggacaatcggcacttctctgagtgaagctgaggagaaggctgtaaatctgcccaaacaccagccttgaagtcattctattcgtcatgcaggaagtgcacggctgctggcaggcgcaggtgaacacccacaaggcagcagatggcatctggcctgggccccgcctaagcagcaagctccacctcctaggccaggaccctgtgggatgcagccactagaccaccatggacggatcccacagcgcagccctgaagctgcagccagctgcactcccacaagtagctccagcgccgtcagcgaggcctccttctccatacaaggaacaacctgattggcgccctcttggcgatcttcgggcacctcgtggtcagcctggcacttaacctccagcaagtactgccacatccgcctggccagcgcttccaaggaatccccgggcctatttcaagaccaagacatggtggctgggacatgtccctagatggcttctgggctgcaactgggttgtgtacgacttcctacgcattcagcgctgcttgtcaactcatccgtggcccgatccaagccgcaagaaactgcgcacggctacaggcacatccatacagaacatacaccattcatacaggcgacaagaggaaacacgaaacacaacagaacaccacaagacccggccacagaaggctcgagacaggacagcgaaggacacacacggccgcaaccagagcacaccacagaggcagacagccccacagggacacatgaaccgagaccaccaccagcagacccgacacagtagagcacaaaaggacgactgcaactgccaacagctcgcaacaccactccaggcgcacaactcacccccagcggaagcaacgacaggcacggagccgagaacccacaggcacaaaacagagcagagccaaaggaaacgaaacagagacagccgccggctaagcagaggacgcgctagcaatcccgaccacagcaggggagccacagcacccccagacgacccccactaaacccgaagtaagaagacacaaacgagacaccgc

SEQ ID NO: 535071 - DNA, 626 bp, Homo sapiens
cggctactgcgtacacgtggcggtgttgcgtggggactccctgaagagcagagcggcagggcgcccggaagtcgtgagtcgagtcttcccggcgctaatccactgccgggttggaggctgctgacgcaggtcggggcccaggtgctgggtcgactcggggacggctgggtgctgccctggtgccccgggggaacagcagacacacatcgtaggcttgttagttaggatggtctgtcagtggaaaagagtgagtacacctggtggagatgagctatctttctgaagaaaactgtcccattcattaagcagtaggtctcgtgatgacagataaagcccaattagcaagtaaactgtgtcctctgaaagatgaaccatggacctatacatccttgggaaccaggttcctttagaggttgcgtcttattgccgtgaagctgggcatgatgcctttatggaccacaggcatggtcaagagcatgtggtcacagttacttcaggtacacagactgtcatgtcttaaagatatacgtcaggaggaaaactgtaatggaaaaatggcaaccctgtctgtaggaggaaaaactgtatcacgtattcgttaaagctacatccatattggaatttac

SEQ ID NO: 535072 - DNA, 121 bp, Homo sapiens
ggatcccatgggatgtggtgaggaacacatagactcaaaagtaataggtgaaggatacctctaccaaggcaaaaggaaaacagaagaaggagaggctgcaatcctaggtacctgacaaaga

SEQ ID NO: 535073 - DNA, 924 bp, Homo sapiens
catgaaaagattgggtattctccatggtaattggaaattcactcactctgcgtgatggtttctcaaacgcaaatgtgtccagtgtgcttctctaatggaagtatgaggagatgtttctgctgcatttacaaaactggcaggatcagcccagaggccgggcgcggtggctcgcgtctgtaatcccagcactttgggaggccgagggggggcggatcacttgaggtcaggggttcgagaccagcctgagtgacatggagaaaccccgcgtctattaaaaatagaaaattcgccgggcatggtggcgcatgtctgtaatcccagctactcgcgggaggctgaggcaggagaatcgcttgaacccgggaggtggaggttgcggtgagcggagatcgtaccattgcattccagcctgggcaataagagtgaaactctgtctcagaaaaaaaaaaaacccggagtctctcaaaattgtaggttaatatggttcacatgtggtccacggtttgaaaacttatgggggggggagtataaagtagaataagagattccttggtcataggtcatatggtatcgggaacaatctttgagggtgagacgtggattgatcctgatcgatagggggattccatatcgtgattgggaagttggctgtggggttagaaagttcttacagtcaattggcgaatattaataggccagacagtgggggaaggcaaaggtggacttgagtttgacatggaaagagtgttaggggccagattggtgtaccggtactctataccaggattgcaggtaccttgaagaaagggggtgatgaagagcagtgtgacacgcaggttaagagtataagggaaggtgggaaggacagataataaggaggggaaacacggaagtcagtggttctgtcgcgtctcggctctgttg

SEQ ID NO: 535074 - DNA, 215 bp, Homo sapiens
tatgccaacatgtggtatgcacctgtggtcctatgctacttggtggctgaagtagggggctcgcttgagactgaaaggttgaggctgcagaaagccttgatacgccactgcactccatcctgggtaaaatgagcaatgactctgtctccaaaaaaaaaaattattccaccaaacaaccctttttttttggttagaaaaggggtctttgtggccca

SEQ ID NO: 535075 - DNA, 778 bp, Homo sapiens
gtgctaattaaaaaaaaaataaaattttaaaaaaacctgtagtttcattacctttttgaataatgtcatacaaaaaatgtatttgtttttttggtgctgtgagaatttgatgttggtagattaataatcatttggtttagaattacaaaatagtttttaaatatggtctgagaaaagccaaagttaatgcaacctagtggaaactgtaagaccatttgagtatgttgttttatgtgatgcattggatttggtggttgatggaatttgagccaaaaaaaaaaatacgcaggctttcctatttctacaacttggatggtacttatgcttttggtcccagtgggaactttttatactgggagattaaaaaacaaaattgggaaatttttggtgggctggctctgggtggggcccctgacaatgactggatttcaagttggatcccgggtgatggatggatgattgatagcaacgaaagtcgctttctttgagaatctaacaactttgtggcttgatttctttttccccttgtgcttatttctagcattagaaattcgggtcttaaaataaccagcgggaagttccccttttctcttctggtatggggcggtcccccctaggtcattccactttcgcacgtcctcgtccttttagtggtaatgtcttcgtaacccttggggtggctctcggggtcaaccaagtctcggttctcggcctctggactaccggtcttgcaacagccttctcgccgttttggggccgttgggcgtccttaccttta

SEQ ID NO: 535076 - DNA, 576 bp, Homo sapiens
agcagaagtggtctggctctcgtgcttctgaatcccttccgggctctggtctatcttgtctcttagctgagggcctacagtcatctagagtaaaagggatggttaaaaaaaaaaaaaaaggcaatcggaggcaaaattgccagaggagaaacattaaccatgtaattggaatttaaaatgctcatggaatatggaaactacagtgctgacccatgtgagcagggtcacttgcaagggtcctgaaacgcacctgtctggccaggagtttctaaaaatatctctggtatcttctgtactagaccttaggtgatgccgactgtgggctgggaattatccagctcccctttcccatatggagccttaaggtttagtgtatcctgatagggggatccctaggccttccctccaggtctcttctttctttctgagtgaagatgaggcccaggatgtcgtcctggcttgagtgccaagagaccatggcccttttcattgcctattctcttccccctgatcccaaccattgtttgcaaagttggcctggtgatcccattggtggagctgtcagcaacgcaggtg

SEQ ID NO: 535077 - DNA, 498 bp, Homo sapiens
atcaaggacaagaccggcaagacgctcgccagcggcatttcgaaggaaggcgacgcgcgtgatctgaccggcacgccaccgttcaaggtcgtcttcggcaatgcagaagccgttgaatcgctggccgtgggtggcgcgaccgtcgatctgcagaagtacgcccgcaatcgcgtggcacgggccacgttgccctgaaccgtcttgtaattggcgcggtgcctgtaggcagtgcgccctgtctgatcatggaaatctccacacctctcgattgcgctccagccttggtgggcccgctgccgcgccggaactcgcgcgccgcgcaaatccgctggggtgatcgtgttgtgcacgtcggtggcgacgcgccggtctgcgtgcaatcgatgacgaataccgacacgtcggacgccatcggtaccgcaatccaggtaaaggaactggcgcgagccggctctgagttggtgcgcatcacagtggataccccggctgctgcggccg

SEQ ID NO: 535078 - DNA, 913 bp, Homo sapiens
  misc_feature (27)..(27): n is a, c, g, or t
  misc_feature (298)..(298): n is a, c, g, or t
  misc_feature (456)..(457): n is a, c, g, or t
  misc_feature (496)..(496): n is a, c, g, or t
  misc_feature (647)..(647): n is a, c, g, or t
  misc_feature (703)..(703): n is a, c, g, or t
  misc_feature (723)..(723): n is a, c, g, or t
ggaagaggccatgagtgtatcactaanaaaagtatcaggaataaaggaagaaattaaagagcctgaaaatattaatgcagctcttcaagaaacagaagctccttatatatctattgcatgtgatttaattaaagaaacaaagctttctgctgaaccagctccggatttctctgattattcagaaatggcaaaagttgaacagccagtgcctgatcattctgagctagttgaagattcctcacctgattctgaaccagttgacttatttagtgatgattcaatacctgacgttccacanaaacaagatgaaactgtgatgcttgtgaaagaaagtctcactgagacttcatttgagtcaatgatagaatatgaaaataaggaaaaactcagtgctttgccacctgagggaggaaagccatactttgaaaatctttaagctcagcttagattacacannagataccctgttacctgatgaaggttcaacattgagcanaaaggagaaaacttctttgcagatggaggagctcagtactgcagttattcaaatgatgactaattatttctaaggaagcacaggatagagaaactggaacgtcttcagatcatctccactgaattatagatgagtccctacaatgatcagntctaaactgatcattttctaaatagccaaggatatactgactatgagtatgcacanaagtgaaattgtaatgcccngatggagcttggcattgctttgcagattgcccatgaccttctttgagacatacaccaaagtgagagaaaatcagtttacagacttcttaatgtgctgctataaagggtttaatgctccaagtttgtttgccttagcagattgaggtagtaaccaatctgtaaaactggaaaactcttctccaataaaggg

SEQ ID NO: 535079 - DNA, 159 bp, Homo sapiens
ggagaaccccatttcactaccttggcccacccagaaccaaacttttagcccaaacactcttttcaccccaatttgaacggtattaggcgttaggaacctagggtaaaaccctgggcccccatattaattttttttatgttacccaccaacagccccaaa

SEQ ID NO: 535080 - DNA, 223 bp, Homo sapiens
ctgcctcagcttcccaaagtgctaggattacgggtgtgagccattgtgcctggccaaaactttatttctcatagaattacaatatatcagcagctttggaaaggaaggataatcagcaaaacaaaattttcttacagaatttagagggacgggtggatcggtctacagaggggtaccacctgggtcacaattggaaaagaatcctgtgaatgatataagacgg

SEQ ID NO: 535081 - DNA, 202 bp, Homo sapiens
ggccacctcaaattatctttgcatcatttgtttacttcgtcactgccagtatctctgtgacgatctggaatcttctccctccatccctgctgtatctactgcccctagcccgtgaaaagggctcaggactacttttaaaagaaagcaaggaaggaaagaagagaggagggtgtgtcgttgagcacctactatgcggtaaaag

SEQ ID NO: 535082 - DNA, 611 bp, Homo sapiens
tagcttggtgtctgcccaaatggctgcccagttttgtgcttgaaacccgggccctggtggtgtagacacctgtaggaatcttctggtctgcaggttgcaaaaaccgtgagaaaaacatagtatctgggctggataacaccgtctctcatggcacagtccctcatggcttcccttagctaggggagggagttccccaactccttgggcttcccaggtgaggtggtgccccatgctgcttctgctcaccctcggtgggctgcacccactttctaaccagtcccaatgagatgagaagggtaccgcagttgaaaatgcagaaatcacctgccttctgcattggtctctctgggagctgttcctttttggccatcttgccagatcccatgaataaggacttttatagctaaagaggagaagtcagtacctggcttgagagcttcaaaggacaggctgactctcttgtcagaggctaatgtaagttggtgatatatagttaaagctgatgttcattaaacaattttgaggatcctagggcccttaagagttaattagatatcctctcactgtgctctgtaaatagaacagtagagggtggatgttagtacatttgc

SEQ ID NO: 535083 - DNA, 387 bp, Homo sapiens
tgtttgtcacccaggctgaacgtagtgcacaatctcggtcactgcaactctaccacccgggttcaagtgattctcctgcctcagcctcccaagtagctgggattacaggcatgtggcaccacaccttgctaatttttgtatttattggtagagacggagttttaccactgttggccagactggttctcgaactcctgaccaggtggtcctcccgtcttggcctcccaaaagtgctgggattacaaggatgtgccaagcctcaaaatttctaatctcatattagacttctcttccagttttcttcattattggaacccgggaattgcttgccggggttaccgagcttcgaaattcggtaatccatgggtcataggcttgttttccttg

SEQ ID NO: 535084 - DNA, 1131 bp, Homo sapiens
tggaaactatggctcttaatttccatgtggataattcaaacaaagtcataagtagtcttggtccaatttttttttataaaaaacaaaaaaccctcaaataaaaaatctggggcttaaaagaaactctatcacaggagcccgtggtgggaggattcctagttttataccatgagcaaatagaatgcagaattctctctgaaagcaggtgtctcacgaaaggcaaatggtctaatgagaaaggaggggcctagataacccccaaggctccaccaacggtgatctctcagcgcgggtgcggtgagctccaccaggcgctctagggcatcatcggcgctgacataggacaccacaatacacgcctagccccggcgcgcccacttgacaaacacacaaaacctggcacgaaacagagaacaccaggcacaggggtacacgaaaaaaaaaaatggcaggaacaaccgcaacaacaacaggccaaaaccacaacgcgaccaccaaaaaaaaaaatcaccgggagcaatcaagacacatagcaaaaaaacataaaacaccacccaaaacagcgagaacaaagccaacaagcgggcggtcaaaccggaggagataagaacgggagatacaaacatagagtaagatcacgcaaaaaatacgcacaacaggaagcacagcgccgaaacttcaacaccagaaaaagacactaatgggaggacactaggagggcggaagacacgcccgacgaaatttaactttaggcaccccaccaacagcaccatctcaacgaaagaccacaaaagttgaataaatagaaagcagaaaaataaagaaaatgattcaacagatcaagaaacaaaaaagtgtaatatactgagcaggaaaactagtaaaggtcattatatatcgatccaaagtagagcaaaacactagggtaagacatacgaccaagccgcacatgaaagaatcagcccacacacaagcgacatcacaacaaaaccaatacaagcgatataaaaacattaaagtaaacaacaccatacaacacggatgacacaccagacagcaacaaaatgaagccaacaaatagatccacactcacacaaaccaaagaaacagaacctatacatgaatacacgc

SEQ ID NO: 535085 - DNA, 142 bp, Homo sapiens
  misc_feature (118)..(118): n is a, c, g, or t
aatccttttgcctaagcctcccaaggtactgtgattagtgtcatgagcaaccacacctggcctaaaagatcattgatttagttttgagtaagattttaggtgattaaataatggtatngtggtgtttggaatatctgatata

SEQ ID NO: 535086 - DNA, 756 bp, Homo sapiens
agctgaagacggaggcagctccacacttgtgaactaaaatcatattctaagaactcagccacgtcagggtatccaccatggtgctgggtcctgaacagaagatgtcagatgacagatgtatctggagatcatggggagtctgccagtcttggataagctatcaaagcgccgtggcctagtagtaatcgcctctcgttatcacgagtcgcccgtggggactcagaggagtacttcgccacttacgtttaagtgagaagatctccattcctgaggaggagtactcttgtgtgagctttcgtaaacatctgggctttcaccggaccaggttcttcttatgagcagtgcctaccatgggatccgaggaaagtgttgaagtccgatttgcagtctggaggcagtggctggatttaagttgcgtctggatccgttctgttggccacccttgtggggctgctgctccagcgggctgtgcagctcagactgggagtggttactgggctgcatcttgctgaagtatgtcacgcgtcagtatcccaagggtcccacgagtcatcctgtggcgtgatggtggagttggctatcatcggtctcagacatgcaaagaagtcattggctcagccattgctatcaatcttctgtctgtaggaagaattcctctgtggggtggcgtctcatccaccttgcagataccttggtttctctattggacaaatatggttgcggaagctagagcattttgggtttctctcgctatta

SEQ ID NO: 535087 - DNA, 166 bp, Homo sapiens
tcgggcccacgtatgttaatgtgaaaacatcagcctcatctgccctcatctgcctgcgcattggacatggagatggtccagcagcacctgagctgtgccctgtggcacctttttccatgtgtcttctctcatgctgcatgagcttctggccacatgtgatcttgaa

SEQ ID NO: 535088 - DNA, 269 bp, Homo sapiens
agaatttcggcacgaggaatttccaatcatccccagaaagtttccattttgcccctttgtacttagccccaactccctgcccccagccagcctaagctcacacggaaccacctaaatctgctttctgatcttgataggtataggttgccttttatataattacatataggtgggatgatagatatatggtcttttgtgttggtcttttgtaaaagacttttcctgatttagcagtattttccttatgttgctgacataaagggggttat

SEQ ID NO: 535089 - DNA, 1040 bp, Homo sapiens
taaaagagagaaaaaccccgggaaacgagggggggggggggagggagaagagggagagaaaagggggggagaggggtggtgaaaacaacagggggtggtgtggcgcgcggggagaaaggagggtgtggaagtgtgggtgaggaggggggggtggggaggaacgcccccgcagagggggggggtggcaaaaagagaaaaagaggggatataataagggggtgcgtacaacaaagagagagggggcacccgcggaagaagagagagagaaagagagaaaatttggcacacacaagaaacaacgggggcgcaccctcacacacaaaagagagagcctctccacacaggaggagaaacagagggggggtgcgagcacgggcgcgggtgtcaacgcgcgaggggtcacaaacaacccccacacacaaacacacaccaaagagagcgcggggaaacacagacagcccggcgcacgcgctcgcggagagagagagaggagaaatacaagagagcgccccacgcgcggcgagagggtcggcctcgcgcacacccgggcgactgcgcagcgcccgcgcgaacaacacaacaccgagagagcgcgaggggcgtgtgaaccacgcgcgcggggggggagaacaccaatatacaaacaaacagacacgcacgagcgcgccgcgcgagtgacaacaaccacacagagggggggggcgcgacaacagcagcgaccaaaacacagcgatgacggaaaaagagggggagcaaaaacaaacacatccgcgcggcgcacgccaccagcaccccacaacacccccccaccgcatgacgaggcaggaaaaaatctaccaccacccgcacgcgaggggcgcaaccacagcaaagaacagagcaggggtggagaccccacacacaacacaaaaaagagagcgcgaccagcaaaccccctcctccggaaagcagcagagagaagacacaacccaccagcgcgtgggccgctggccaaccacagcagaaaacccaccaccctccccccccgacgagaggggaaa

SEQ ID NO: 535090 - DNA, 217 bp, Homo sapiens
gtgacagtgttgcgttcatttctgcattagcagttagacacttggtattgatctgttgggctcacagatttgtttctttcccaacatcatcataagttcatgccatcctttcctcagcacactgtgcacgtaatgccgagcctctgcatccctggttcccaatcagtcttcgcattgtctccttgtagtgacctctactgccgtgtaagacaacagt

SEQ ID NO: 535091 - DNA, 251 bp, Homo sapiens
ggcggtttatttgaaaataccaatttggccggcgcgtggcttacacctgtatcccaggactttgggaggccgaggtgggcagatcacctgaggacaggagtttgagatcagcctgaccaacatggtgaaaccccatctctactaaaaatagaaaattagctgggcatggatcaagatgagcctgggcaacatagcgagatctggtctctacaaaaaatttaaaaacgttagtcagatgttgtggcacatgc

SEQ ID NO: 535092 - DNA, 111 bp, Homo sapiens
tggtgatctagacatcccataatcggaccgttcgaggaactcatcgtgggcacctggaagcaggaggacatagtgtcaggtcggctctgctcacgtgtcatttgtctcttt

SEQ ID NO: 535093 - DNA, 969 bp, Homo sapiens
agcggcctgggcgacagagcgagactccgtctcaaaaaaaaaaaaaaaaaaaagattgacagcctcactgctcaggggccaggataacagcccattttacagatggctttgggctttgcccaaggttcaccaacccttcttgaaactgaggcgttccccaaacccaatgccgggaagctggttggaggaaagtggggaaagggtttccccgcttctccacgtgggggttggaggttgggagaaaacgcattttcaggggtgtttggacattttaacaaaccagttattgcaaattcacattgcaaattcgcattgcaaattcaccacccattttctttaagccctcgacagcgctggcattgttctgaaactaataatgtgggaccctgtcccttgatgatgaccgtgggtcgggaggtgcacggccttttccctttccctccgctctttccctttccctttccctttccctttcccattctgttctccctttcctttcgccccctttccttttccttcttcccttcccttattctttccattttttcctcttcttcctttcacattcatttgtccaagaacctcccgtggcctgagataaccttaagtttgcaaaagttggcttccctgcagcccatttcccaggttggggaaactgaggcatgggcctaaggtcccacagccacaccgaggaaagcagcccccactgattgtccccatgccccaaagtgcatggccctcggtaacccacagagcggacacatgacagttggctggagttgtcaaagctgcttgaggaagctccagggcctgaataaggcttgaaagcgcccagggcgaactattggtggaattgtcttggccttgaattacaggctgcagaattggggattctgcagaaaggtccacacggacatcttcctggtcccccaagttgttttacctcctgataccccatcaattgtttct

SEQ ID NO: 535094 - DNA, 286 bp, Homo sapiens
attcccaggttcacaccattctcctgcctcagcctcccaagtagctgggaccacaggcgcccaccaacacatctggctactttttttgtattttttaagtagagacagggttttgccaggtttgccaggctggtcttgaactcctgacctcaaacgatccgcccacattggcctcccaaagtgctgggattataggcatgagccactgtgcctggcccaccatgattctttgaatagaatggctacatcaagcaaactgacatatgcattacctcctgtacttact

SEQ ID NO: 535095 - DNA, 377 bp, Homo sapiens
  misc_feature (376)..(376): n is a, c, g, or t
gaattcatgggatggggctaagagaaagccatgtgcctagccgggcgtggtgactcacacttgtaatcccagcactttgggagggccgatcacttgaagcctggagttcgagttcagcctggccaacatggtgaaaccccgtgtccactaaaaatacaaaaattagccaggcgtgcacacacctgtaatcccagctacttgggacgctgaggcacaagaattgcttgaactggggaggcggaggttgcggtgagccaagatcatgccactgcactcgagcctgggcaacagagtgagaacctgtctcaaatacataaaaatacattgtgtcataacgatttgtgaaaagttcctactttaagagagcttacatgtna

SEQ ID NO: 535096 - DNA, 133 bp, Homo sapiens
gtcactccaacccttaaaattagagctcggcacgaatttaacggtcaccgtagggcaatagctcgttaactggtacattcaaggagagacagcgaagcacgcacacgtaagcccgagcggcgtacttctcgat

SEQ ID NO: 535097 - DNA, 374 bp, Homo sapiens
  misc_feature (61)..(61): n is a, c, g, or t
  misc_feature (131)..(131): n is a, c, g, or t
ttttttttttgtccaaggtttatcaaattaattgattttggggggcaagataaaaattttnatttgattaactttctctattggtttttgttttcaatttcatttatttcttcttttatctttataatgtncttacatctgcttggtttgggctgggcacaggggctcatgcctgtaatcccagtactttgggaggccaaggtgggcagatcacttgagaccaggagtttgagaccagcctggccaacatggcgaaaccccgtctctgctagaaatatagaaattggccaggtgtggtggccagcacctgtgatcctagctactcgagaggctgaggcaggagaatggcgtgaacccgggagggcagagcttgc

SEQ ID NO: 535098 - DNA, 510 bp, Homo sapiens
agggaattgaacgaagatgacagtacagattgtgatgatgatgttcaaagagaaagaaatggagtgattcagcacacaggcgcagcagcttctcttacagcttcctctggaagtctgatggggttgcttatcattgatggaggtatagttgaatattcatgacattgccaaaatggagtaatatccttgcgactgtcatgtcgtagcaacagtaaacagtgatcaatgttgaatctgtgaatggtttaccgtttactgtgatgtgctactgtgaatatatgtctttaattactgctggttctctttggatgacactgtgtaaatatgttgttacataattgtactagtagtaatagaatgttacccgacattttgtagtggagaaacatgaagaatacaaaaagaaatagaaaatatcaaatggtaaataagtaatacaataaaatgaataggtacatataaatgatacaacaagggaagaaggtggaacatattgtatataagtgacaa

SEQ ID NO: 535099 - DNA, 395 bp, Homo sapiens
cgtaatgctgccatggagatctgcatgaatgtgctcgatgacagggcggaccttgccaagtatatctgtgagaatcacgattctatctccagtaaactgaaggaatgctgtgaaaaacctctgatggaaaaatgccactgcaatgtcgaagtgttgatgagatgcctgctgactagccttcattagctgctgagactgatgaaagtaaggatgtttgcgcaaactatgctgaggcataggatgacttactgggcatgcatttgtatgaatatgctagagggcatgctgagtactctgacgcgctgctgctgagacttgccaagacatatgagaccactctagagaagagctgtgccgatgcagatcctcatgtgctatgccagagtgattgtgtt

SEQ ID NO: 535100 - DNA, 451 bp, Homo sapiens
ctggttacattggtgttctcacatactctctgcgaagtttgtgtgttctcagtgtacacctgctcctcagcgggggaccaatggccatggcccaccacctgcccttcagtgtccaagcaggggacatgcaccctataagtaaccatggaggtgacccatacacatgacaaccaccccgaatgaccatcatcatggaagcctgctgctgactagagatatgcccccagggaggacaagggaagagtggatgctggaaagacaggacaggggacaatcaccagggaaagacttcattcttcggaggacattgaacctggggctgggtctctagtggagccgctgatacttctcctgtatccaactgttctaactctatgggctatctccattttcagctctatctttacctggccttctcattgctggttccttcaagcctcctctctattct

SEQ ID NO: 535101 - DNA, 103 bp, Homo sapiens
caatttgcaacctgaagactttgcaacttatcactgtcaacagactgagaatgccccgaacacctttggccaggggaccaacctgcacatcaaacgaactgtg

SEQ ID NO: 535102 - DNA, 235 bp, Homo sapiens
tgtatacacagctccgtggcacgcataagtcaagctagtgtgtgtctcctttatccagacaagactcctcaggctgctgaacaggtcttagtatatcctaagcgtactcccaagctgggacctgcttgtgcgtaccaggtatctgccaaatggctgctggaacaaaacagaggccggtccaagtggaggagattccggttaataagtgacttcgtggagaaagtctaacatacag

SEQ ID NO: 535103 - DNA, 437 bp, Homo sapiens
  misc_feature (14)..(14): n is a, c, g, or t
  misc_feature (149)..(149): n is a, c, g, or t
cctttaaattttcnataggtccatttgccttccttccttagtccacatcctacaggtaaatatttttaaatcaatgatcttttccctcagtataatcagtggttcctatatgactttaaagaatgagctgttttggcctgggccgtggntgtcacgcctgtgatcccagcactttgggaggccgaggcgggcagatcacgaggtcaagagatcgagaccatcctggccaacatggtgaaaccccatctctactaaaaatataaaaattagctgggcgtggtggtgcatgcctgtaactccagctactggtaagtctgaggcaggagaatcacttaaacctgggaggcggaggttgcagtgagccaagatcgcaccactgcactccagcctggcaacaggatgagactctgtctaaacaaacaaacaaaaaaaaaaaa

SEQ ID NO: 535104 - DNA, 134 bp, Homo sapiens
taaaaaaaaaaaaaagatgggaacagagtctaaagaaaattgattaatgggaggtatgattgggggattggagcccagaatttaggttaacattctggcaaagtggttggccaaaaccttcatggaaatttcag

SEQ ID NO: 535105 - DNA, 666 bp, Homo sapiens
atccctcttaccgaatggtgcctatgcagatagtcggaccaggcatgcttgaaagcaggcgggggcctagccctactagtctcaatctccaacagcatatggccgtagactacgtacaatagaccgtaaacctagcgtccattgctaaaactgaatcgtacccagacaataatatcagtaccactgacatgacttcgcaaaaaacagataattggaatcaaacaaaaatcgacgcccaggaggagtaattattcagcatcagtcgccgtctacataatctttgaagcgaaaatcaagagacaactacttgagggtgagccccgaccgtcatgcctcccgacgccacaaaaaaagcccccgtacctaatgataacgacatgagctctaccgtacgaaaacatggaaggacaacgcggaatatacacagtgagacagggcagcaagggaatctgagccgggcgagaaaacgccgacgcatgcggaaggataccatgacacgggagacgtggcaaagcagagtcatgaagacagaaatcccaccgacgtcagacgcagcggaaacgcgatcaggaggtcacgcatccacgagggcgcaacgcaaaacgagtggcaaaggccagagaacaagggagagaacataacgggcccactcagcgagggcagaga

SEQ ID NO: 535106 - DNA, 451 bp, Homo sapiens
  misc_feature (166)..(166): n is a, c, g, or t
  misc_feature (222)..(222): n is a, c, g, or t
  misc_feature (300)..(300): n is a, c, g, or t
aaggttttagagtagtgtagtctaagtagagggtggggtatctttttcttgtcgtaagaagtttattttcatggaagtctagtaaagtaatatgatttagtctagtactttttgcctcaggacttatggctttgatgtgctttccatttgggctctctttttctcntgtgaccttaagaactttgtctggtggctttgctggaacattgtcactgtttttantgtcatgcagggagcccagcattgtggctaggatggcagagacttctttgtcatcatggagaagtgccagcaggggantgggaaaagcactctacccagacctcacctcccttccaccttttgcccatgaacaagatgcagtggccctaggggttccactagtgtctgctttcctttattattgcactgtgtgaggtttttttgtaaatccttgtattcctattttttt

SEQ ID NO: 535107 - DNA, 1301 bp, Homo sapiens
  misc_feature (119)..(119): n is a, c, g, or t
ggggtagcaactggatacccggtcgctagcttcaaacgggcacgtatcctacaaatagtccggagcatatgaactgttactgcctcaattgaccgcgaaggagggatcgatctcttatngattccctagagaaagaaagcataacactcgttatgatgagtagggtaacaactgcatagacatttcctacgcattcgcgaaactacgatgacgcatgctgatcagaatggacaaaagatgagtagagcagtctaattatcaactaagacactccatacaatgcatgagcaacacgtcgagaacgaaacgacatgttctagtctagtggcaacgccttccggatgtgtctaagtctcgaaccaatcaggagacaatgcccttcgacttagagtggaaccagggtgttaaactaatcccgttaccaaggggagatctctgggcccaaaatgcgtgactcgctgggctgcgagattataccgcattggcatagcactacaatgcgtcgatcacgacaatccaacacgatggtcatgggagccagggtaatcacggacgcttgggcacaaggctgtatcaacaatatggttcaataacttggcacggccgaggatacacatcaccctgaagggccaggctgcgacacaggggcgtatacgtacggtagaggtcaaaccattggagtaccccatagtaaggattaggaggggaacgccaggtacttgcaaactagcgggtacgcaccagtaccggattagcagaacaatggcataaaccgataacccaatattggacgcctatgtaggtaaaataacgaagcacattggcgtccaggttgcaggagccagctgaccgggcgcgcgaatcgaaactaggcagcacatacgccaacggtgagcaaaggaacaccccaataagggggcaagagcctcaaacaccaacactgaggtcgaatttggacaaggatgcaggttgaagcacttgactgagagactcccgaggcaaggctaccctagcggaccaaagccgaatgagccatggcacttttacacagcagatggacagcgacacgcaagggagaaagcgtcgcaaggggccaggaaacccccgagaaccatcctgaaagcgagagacaccctggcaaaggaagaattcggaacacaacggccaaaaaggcgaaagacagcgcctaacacgacacgaaatgggcagcacgagaaagaaaccgcgaggacaacacggagagaggacaaagtatagcgccaaggggagaacagacacgcgggcgagacacatatcgctca

SEQ ID NO: 535108 - DNA, 137 bp, Homo sapiens
tacttttccaagattatacgtggaagatgagatctatgaccaaatcaaagaacatcatgtggtgtcctatacctgcatgaagatggtttggaatagcttgcaaaagtgctaagatagacctaaggactttttcagaa

SEQ ID NO: 535109 - DNA, 258 bp, Homo sapiens
ccccctttgggcccccggggccccccccccttttggcccccttcggctcccccggggccccccgggccccccccccggggggggtttttcccccccggccccccccggggggccccccctttttttcccccccccttgggctttcccccggcccccctttgggggctttttcccccccgggggggctttcggcgggggcttttccccccccccgccccccccccccccccccccggggcccccccccccccccccccc

SEQ ID NO: 535110 - DNA, 1022 bp, Homo sapiens
  misc_feature (1022)..(1022): n is a, c, g, or t
gcaactgaaaatggtggctgttgtaggacggttgcccccgagctgtcggttgcccgacatgtgagtgccattccttgtggcatttctgtcactgctgccctcaggcctgctgctgtggaatgaacgagcttgacaaattgatcgtgttcgtggtaaccagcttaagtacataattcatcagtaaaacagtttgctcatggccaatagcactcttgcttgggaagtctcaagattgccaccacgtatttaagagggtacagccgcagtcaattgtgaggaggtacaaagaccgtaaatgcctcttattgtactgtcaggggggagattattctcgtgcttttcttctatcccattttggattcatcttttgttgtgtccatacagggaaatcggtgcttttgacctgacgaacgtctgaaagctgaaattgtaaactgactagtggaaacctggttgactctatgtgcgcagtcttcagctgtgactatcccattgtatatctcaatcagtgcctggtattacattacatccaggacacggaatggggttttggtgccaactggaacatcgggctcttgttgagcacttagttaagcagattcccgcgatgtacgttgttgctgtagaaaggtcggtctgacactaacgaggtctcttcataaattgaccccagtggtgtcatcaggcttttgagcgtcagcgtctccgacgtgcgctcgagctgggggagaaaaccttccgctgggtcgctggcgttccaggcttgttgccctccttgggatcctgccaggaactggcgcggatccctatgattaggcacggccactgggccagaggtttccgagggtgacactgtgtccctttgtttgccttcacttgggggaacgactggccggttcattcaaagggttgtgtacgggcccccttttttcatccccctgtgttggggcgccaggggcgcaactttgcgtgggggcaatagacattggcgtttcttagcgcgttggtcgacaacttattgn

SEQ ID NO: 535111 - DNA, 820 bp, Homo sapiens
gcggagacggagtgtgtgagtcatgaggctttcttaggtggacatgtccatatgaattacaatgtcctttaggctgggcgtggtgcatggctgtgatctcagcaggcttggagaggctgaggcagttgaagatcactgtgtaggccaggcgttggagagcagccgtgggcaagggtgggcaagaagccgtgtgtcgtctacaagaagaagaagaagcgtctgccatcatggatgtatctcgcagaagctaatggcagccttggccttaaacctttcgaaaactgctggtgtaaagacaactcgaagaatgtgtcggctcacccatgagcatgtcctgtgccctggccatggtctacatggggcgcaaggggaaacagcgctgcacagatggcccagaatactcttcttcgcattaaaagtgggcggtcgcgatggagacgatccgaccaggggcttccagactcttctccaccgaagtgaacaagagtgggcacgcaagtacttgcttaagggtggccaagaggctctttggggaaaagtctggtgaatttcctctcatcttgtcagcagattcgcgtgcctagaaaagttctaaccaaggcagagatcggaggagcttgactattatcaagggccgtagagaagtccagaaaacacatagacacctgggtagctgaaaagacagaaggtaaaattgcggagtggctctctccgggctcagtggcatccatcgacaaggctggatactggtgaatgcctgtctatttccagagcgaaactgggatcgaacagttgacacggacgaccaccgaggagcaga

SEQ ID NO: 535112 - DNA, 96 bp, Homo sapiens
  misc_feature (3)..(3): n is a, c, g, or t
  misc_feature (28)..(28): n is a, c, g, or t
aanttcaagttcttaacgaatgtacggnggacatgagcacctccagcctgtactaagtgccattggaataataaatttgataaggtggcgaaaaaa

SEQ ID NO: 535113 - DNA, 518 bp, Homo sapiens
tcttgatgatcaaacattgaattgacactggttgaaattaggctaatcatcagtcctattactgtaaacattcaaccctgttgacaatcccgtccccgaacttgaaccagcaaccatttcacatggataaccatgattatgttaagaaatacatccaacaatatggatgaaaagccagtttattaattatgcattgtaaaaatagtatacaatgaagaaaatattagcttatttgtgattacttattacgtgttcatgacctagggacaccttaatattggaaaacaggttaaagtgtcacttggagatgaaaacttgatcaaaggaaaatattagcttatttgtgattacttaccatgtgttcatgacctagggacaccttaatattggaaaacaggttaaagtgtcactgggagatgaaaacttgatcaaagggagaagtcactgccctcttgcccttacctctcaatgcccatttttacctaaacaataaactagcctgtgagtgacacccaaaa

SEQ ID NO: 535114 - DNA, 301 bp, Homo sapiens
ttgggcgagagcaacctgcactgccactgtgccctcctgcctcctctgcctcttcctctctcctctgccaacgacatctaagccacagaactgaagaggctgccaagaaacgcacagcatcaactggagaagtgagaaaaatctctctgtggggccaggcgcggtggctcacgcctgtacttgctcacgcctgcactttgggaggctgagatgggtggatcacctgaggtcaggagttcaagaccagcctggccaacacggtgaaaccccatctctactaaaaatacaaaaaagtagctgg

SEQ ID NO: 535115 - DNA, 881 bp, Homo sapiens
  misc_feature (629)..(629): n is a, c, g, or t
gtgccttgtataatggtctgacactactgattatggtctctcatttcactcttcagttgttcctgttatttatgaacggtatcaggcatcagatagatcattatctagtgacttgcaaatgagaatgttatcagatgctatggctaaaatccacacgtaaaacaatccctggattgacagcagcacagctgacagtgataacgcccaaaataatacagtaggacgttcatctttataggggatattcatttgattatacgggggcagggtcaggcaagaacgaaccttgacgttgcagtgcagtttcacaggatcgtgggttagatcttcgatttcatagccatgcactgttgtgaggaaacattgacctgtcttgacctgccatgtgttcatcatcttaagtatgtaagctggtatgtcctgggttgtacaccgttatcatatcttgtggtcctatctatctgaggcactggtggagtaaaaaacctgttatgttttagcttcgttggcagattagttcttgacggcagtctatgtgcaatgttagccaggagatggtggagctagaaacttttaacctaaacaagtgccttttggccggttggtgtgactgtggtggtatggtgcgncgggaatacctggatcgcattatttttgcggagaagacagggtggttggttaagcacgatattgaatccgggtcaaaagtcgggaattggaaataagcttgcaccgttggtattgtacatcaggggattggggcagataagtggtatatatttggccattatagagataaatagaattatacagagaagggtagccaacctaaaatttacctacaagacccaagggtctacctaatgagcgatgagttcttg

SEQ ID NO: 535116 - DNA, 100 bp, Homo sapiens
gggagaagagagaatgttggggtttattattgcatgcaagctctacatatacccatctcactttcggcggagggaccaaggttggagatcaagcgaactg

SEQ ID NO: 535117 - DNA, 202 bp, Homo sapiens
caatgatgtgattgtcattgatgtgattgtcatgatgtgatctgttcatgatgtgattgttgttgattaaattgattggccctaagatagaggagacacctgctaggtgtaaggagaagatggttaggtctacggaggctccagtggatgggagtagttccctgctaagggaagggtagacttgtacaaccttgtttcctgc

SEQ ID NO: 535118 - DNA, 524 bp, Homo sapiens
attggtatttagttgttttttatcccaatgtcaactttatttttttatcggcgcactgattaactgagccattttgttgacacaggatgcaagctggttctggcctatctgattgaacacaggatgagataaaataactcctggcctccacaccttggaatacgctggagctggtttgacaactttacccaggatgagtaagctctgtgtggtgacctcccaaaggagcatgatgaatggcctgttgcagtgggcatgtgcctttgaccaggcgttcatagacggaggctgggagaggagtcctaaagaagttacatcctaattgtcctcctagctgaagttcatctcaattatggtaggtcaactggggatgaactagacacgatgtccatagtctgctgcacaggccgaatgtttgcgcgcttcattctactgaccagtcagcaccacttttgatagcaccccatcagtggggctaatgaggaaccactactaaacgcatcttaggaacaactggtctggaa

SEQ ID NO: 535119 - DNA, 410 bp, Homo sapiens
  misc_feature (342)..(342): n is a, c, g, or t
  misc_feature (357)..(357): n is a, c, g, or t
gtcttactcttaccctgatgcccaggctggagtacagtggtgcaattatagctcattgcagccttgtactcctgggttcaagtgatcctcccacctcagcctcccaagtagctaggactacaagcacgcaccaccatgcccagctacatttgtttctttttttttgtagagataggggtcttgctatgttgcccagggctggtctcagactgcctaaagcagtcctcccacctagggccgcccaaagcactgggaattattagggcatgagccacttgcacctgggcctgctttgcctttctttaaatggaccttcatgttcatttgttccagtggaggganttttgtttttcaggntggacccctggaggtgtttgggttccccggaagtttcccaggccacaggttcc

SEQ ID NO: 535120 - DNA, 258 bp, Homo sapiens
  misc_feature (162)..(163): n is a, c, g, or t
  misc_feature (210)..(211): n is a, c, g, or t
  misc_feature (253)..(253): n is a, c, g, or t
ggtagattagcataatgtcttaatattcatccatataatcacaaatggcaggatttctttcttttttaaggctgaatattattccattacatatataaatcacattttctttattggatcattcaagtggatatttacggttgattgatatatcgttggcannattgggaataacactggcgtatgaacatagcaggtacacaatatctnncttggacattacggatttgactttcccttttggatatacacnccaga

SEQ ID NO: 535121 - DNA, 235 bp, Homo sapiens
ggggggggaaattttattttcccgtttattttcaaatttttttacgggggtattttggggacctttaaggttttaacccttttttaaaaaattcaaggggggccactagaatttttttcaaaagttaatttttttccaaagggggggaaaaatttgtttccccttccatgattttgaaatggctgggaagaaaataaaattaaacttgggggttttattggtcccccccttggta

SEQ ID NO: 535122 - DNA, 2195 bp, Homo sapiens
  misc_feature (2099)..(2099): n is a, c, g, or t
  misc_feature (2103)..(2103): n is a, c, g, or t
tgaatgtaagatggcgcccaggagctgtgaggagaaaaccctgtcggtcttggagcgacgacggcagaaccaggtccctggcggtgcggcggggccggcgggtgcagcggaggcggcggcggcggcggcagtgacgtcgccgggaaccctaaggactctgcaatatgaataattccctagagaacaccatctcctttgaagagtacatccgagtaaaggcacggtctgtcccgcaacacaggatgaaggaatttctggactcactggcctctaaggggccagaagcccttcaggagttccagcagacagccaccactaccatggtgtaccaacagggtgggaactgcatatacacagacagcactgaagtggctgggtctttgcttgaacttgcctgtccagtcaccaccagtgttcagccacaaacccagcaagaacagcagatccaggttcagcagccgcagcaggttcaggtccaggtgcaggtacagcagtctccgcaacaggtctcggctcagctctccccacaactcaccgttcaccagcctactgagcaacccatccaggtccaggtgcagatccaaggccaggcaccacagtcagcagccccctccattcagaccccgtctctgcagagtcccagtccctcgcagctgcaagcagctcagatccaggtgcagcacgtgcaagcagcccagcagatccaggctgcagaaatcccggaggagcacatcccacatcagcaaatccaggctcagctggtggctggccagtctcttgctggtggtcagcagatccaaatccagaccgtgggtgccctttccccaccaccatcccagcagggctcaccccgggaaggggagcggcgggttggcacggccagtgtcctccaaccagtgaagaagcgcaaagtggacatgcccatcactgtgtcctacgccatctcagggcagccggtggccaccgtgctggccattccacagggccagcagcagagttatgtgtctttgaggccagacttactgacagtagacagtgcccacctgtacagtgccactgggaccattactagccctacaggagaaacctggaccatccctgtttattctgcccagccccggggggaccctcagcagcagagcattacccacattgccattccccaggaagcctacaacgcagttcacgtcagtggctcacccacagccctggcagctgttaagctggaggatgacaaggagaagatggtgggcaccacatctgtagtgaaaaactcccatgaagaggtagtgcagacccttgcaaactctctctttccagcacagttcatgaatggcaacatccacattccagtggctgtgcaggctgtggcaggcacgtaccagaatacggctcaaactgtccatatatgggacccccaacagcagccgcagcagcaaactccccaggaacagacaccaccaccacagcagcagcagcagcaactccaagttacttgttcagctcaaactgtccaggttgctgaagttgaaccacagtcacagccacagccttccccagaacttctgcttccaaattctttgaagccagaagaagggcttgaagtatggaaaaactgggcccagaccaagaatgctgaactagagaaggatgctcagaacagattggcacccattgggaggcgccaactgctgcgattccaggaagatctcatctcctctgctgtggcagagttgaattatgggctctgtctaatgacacgggaagctcgaaatggagaaggtgaaccctatgacccagatgtgctctactatattttcctgtgtattcaaaagtatctttttgaaaatggaagggtagatgacattttctccgatctttattatgttcggttcacggagtggctacatgaagttctgaaggatgttcagccccgggtcactccacttggctatgtcttgcccagccacgtgactgaggagatgctatgggagtgcaagcagcttggggctcactccccctccaccttgctgaccaccctcatgttctttaataccaagtaagtgttctagaggctccactgctggcatctgtccagngaanagtgtggaaacttttccaagaggccttctggattcctctggacatattatttggggaaacttgggctacttggaaggcccttaccccccact

SEQ ID NO: 535123 - DNA, 2177 bp, Homo sapiens
  misc_feature (2099)..(2099): n is a, c, g, or t
  misc_feature (2103)..(2103): n is a, c, g, or t
tgaatgtaagatggcgcccaggagctgtgaggagaaaaccctgtcggtcttggagcgacgacggcagaaccaggtccctggcggtgcggcggggccggcgggtgcagcggaggcggcggcggcggcggcagtgacgtcgccgggaaccctaaggactctgcaatatgaataattccctagagaacaccatctcctttgaagagtacatccgagtaaaggcacggtctgtcccgcaacacaggatgaaggaatttctggactcactggcctctaaggggccagaagcccttcaggagttccagcagacagccaccactaccatggtgtaccaacagggtgggaactgcatatacacagacagcactgaagtggctgggtctttgcttgaacttgcctgtccagtcaccaccagtgttcagccacaaacccagcaagaacagcagatccaggttcagcagccgcagcaggttcaggtccaggtgcaggtacagcagtctccgcaacaggtctcggctcagctctccccacaactcaccgttcaccagcctactgagcaacccatccaggtccaggtgcagatccaaggccaggcaccacagtcagcagccccctccattcagaccccgtctctgcagagtcccagtccctcgcagctgcaagcagctcagatccaggtgcagcacgtgcaagcagcccagcagatccaggctgcagaaatcccggaggagcacatcccacatcagcaaatccaggctcagctggtggctggccagtctcttgctggtggtcagcagatccaaatccagaccgtgggtgccctttccccaccaccatcccagcagggctcaccccgggaaggggagcggcgggttggcacggccagtgtcctccaaccagtgaagaagcgcaaagtggacatgcccatcactgtgtcctacgccatctcagggcagccggtggccaccgtgctggccattccacagggccagcagcagagttatgtgtctttgaggccagacttactgacagtagacagtgcccacctgtacagtgccactgggaccattactagccctacaggagaaacctggaccatccctgtttattctgcccagccccggggggaccctcagcagcagagcattacccacattgccattccccaggaagcctacaacgcagttcacgtcagtggctcacccacagccctggcagctgttaagctggaggatgacaaggagaagatggtgggcaccacatctgtagtgaaaaactcccatgaagaggtagtgcagacccttgcaaactctctctttccagcacagttcatgaatggcaacatccacattccagtggctgtgcaggctgtggcaggcacgtaccagaatacggctcaaactgtccatatatgggacccccaacagcagccgcagcagcaaactccccaggaacagacaccaccaccacagcagcagcagcagcaactccaagttacttgttcagctcaaactgtccaggttgctgaagttgaaccacagtcacagccacagccttccccagaacttctgcttccaaattctttgaagccagaagaagggcttgaagtatggaaaaactgggcccagaccaagaatgctgaactagagaaggatgctcagaacagattggcacccattgggaggcgccaactgctgcgattccaggaagatctcatctcctctgctgtggcagagttgaattatgggctctgtctaatgacacgggaagctcgaaatggagaaggtgaaccctatgacccagatgtgctctactatattttcctgtgtattcaaaagtatctttttgaaaatggaagggtagatgacattttctccgatctttattatgttcggttcacggagtggctacatgaagttctgaaggatgttcagccccgggtcactccacttggctatgtcttgcccagccacgtgactgaggagatgctatgggagtgcaagcagcttggggctcactccccctccaccttgctgaccaccctcatgttctttaataccaagtaagtgttctagaggctccactgctggcatctgtccagngaanagtgtggaaactatccaacagctctctggagttgactgggtcagatgtgcctctgggtcaatgttccggtcccc

SEQ ID NO: 535124 - DNA, 1447 bp, Homo sapiens
  misc_feature (1351)..(1351): n is a, c, g, or t
  misc_feature (1355)..(1355): n is a, c, g, or t
tgaatgtaagatggcgcccaggagctgtgaggagaaaaccctgtcggtcttggagcgacgacggcagaaccaggtccctggcggtgcggcggggccggcgggtgcagcggaggcggcggcggcggcggcagtgacgtcgccgggaaccctaaggactctgcaatatgaataattccctagagaacaccatctcctttgaagagtacatccgagtaaaggcacggtctgtcccgcaacacaggatgaaggaatttctggactcactggcctctaaggggccagaagcccttcaggagttccagcagacagccaccactaccatggtgtaccaacagggtgggaactgcatatacacagacagcactgaagtggctgggtctttgcttgaacttgcctgtccagtcaccaccagtgttcagccacaaacccagcaagaacagcagatccaggttcagcagccgcagcaggttcaggtccaggtgcaggtacagcagtctccgcaacaggtctcggctcagctctccccacaactcaccgttcaccagcctactgagcaacccatccaggtccagcacagttcatgaatggcaacatccacattccagtggctgtgcaggctgtggcaggcacgtaccagaatacggctcaaactgtccatatatgggacccccaacagcagccgcagcagcaaactccccaggaacagacaccaccaccacagcagcagcagcagcaactccaagttacttgttcagctcaaactgtccaggttgctgaagttgaaccacagtcacagccacagccttccccagaacttctgcttccaaattctttgaagccagaagaagggcttgaagtatggaaaaactgggcccagaccaagaatgctgaactagagaaggatgctcagaacagattggcacccattgggaggcgccaactgctgcgattccaggaagatctcatctcctctgctgtggcagagttgaattatgggctctgtctaatgacacgggaagctcgaaatggagaaggtgaaccctatgacccagatgtgctctactatattttcctgtgtattcaaaagtatctttttgaaaatggaagggtagatgacattttctccgatctttattatgttcggttcacggagtggctacatgaagttctgaaggatgttcagccccgggtcactccacttggctatgtcttgcccagccacgtgactgaggagatgctatgggagtgcaagcagcttggggctcactccccctccaccttgctgaccaccctcatgttctttaataccaagtaagtgttctagaggctccactgctggcatctgtccagngaanagtgtggaaacttttccaagaggccttctggattcctctggacatattatttggggaaacttgggctacttggaaggcccttaccccccact

SEQ ID NO: 535125 - DNA, 1016 bp, Homo sapiens
  misc_feature (282)..(282): n is a, c, g, or t
  misc_feature (970)..(970): n is a, c, g, or t
gtatcaacgcagagtggccattacggcgggggctgcagacgtacttagaaaaggggtgcatactggatattcaggctaggagaagaacgcaaaaagcagtgacgtacattattctctgcatatatttactaggggaaattgtgcgtctccctattctgagtcttggcaggaatggactggtccaaccttatacagagagcagtagagcgcggcagtatagagagtacctcacgaaggggacgtgggaaaagtgtagccggggaacgctgggaaactcccggnctccgccaccatcttgctttcctttaatccggcagtgaccgtgtgtcagaacaatcttgaatcatgaagctactaaccagagccggctctttctcgagattttattccctcaaagttgcccccaaagttaaagccacagctgcgcctgcaggagcaccgccacaacctcaggaccttgagtttaccaagttaccaaatggcttggtgattgcttctttggaaaactattctcctgtatcaagaattggtttgttcattaaagcaggcagtagatatgaggacttcagcaatttaggaaccacccatttgctgcgtcttacatccagtctgacgacaacaaggagcttcatctttcaagataacccgtggaattgaagcagttggtggcaaattaagtgtgaccgcaacaagggaaaacatggcttatactgtggaatgcctgcggggtgatgttgatattctaatggagttcctgctcaagtgtcaccacagcaccagaatttacggtcgttgggaagtagctgaccttcagactcagctaaagattgacaaagctgtggcctttcagaatccgcagactcatgtcattgaaaattttgcatgcagcagcttaccggaatgccttggctaatcccttgtattgtcctgactataggatcggaaaagtgacatcagaggagttacattnacttcgttcagaaccatttcacagtgacagaatggatttgattgga

SEQ ID NO: 535126 - DNA, 794 bp, Homo sapiens
  misc_feature (119)..(119): n is a, c, g, or t
agcggagttttggggcgcgcgctctgatatcgggtggcggtgctgcctcgagagcgcgcaggaggcttctgctgagcagagggccggccgcggctcgttgcgctgggaaggttgaggantgggtcctttctggtctggtgacgttcccgggcatccgtggcctcggcctggagagaaaccaaccagctttgctgtctggcttgcggttccgctcctctgtgaggggggcgagattgcccgttctcctcgaagaatgccgttacttgaggcccaagaatattagaagtcttaagaactcaggacaagcagcagaaatacatgcaacatggtgactggaaccctaaggactctgcaatatgaataattccctagagaacaccatctcctttgaagagtacatccgagtaaaggcacggtctgtcccgcaacacaggatgaaggaatttctggactcactggcctctaaggggccagaagcccttcaggagttccagcagacagccaccactaccatggtgtaccaacagggtgggaactgcatatacacagacagcactgaagtggctgggtctttgcttgaacttgcctgtccagtcaccaccagtgttcagccacaaacccagcaagaacagcagatccaggttcagcagccgcagcaggttcaggtatatgggaaatgctgaggtgcagcctgtttaatgtactttatttgttgtcagtgttttagttagtgggctcatcacatctatgtggatgttataggttatttaacactaagattttcaaagttaaaa

SEQ ID NO: 535127 - DNA, 314 bp, Homo sapiens
  misc_feature (63)..(63): n is a, c, g, or t
  misc_feature (68)..(68): n is a, c, g, or t
  misc_feature (74)..(74): n is a, c, g, or t
  misc_feature (83)..(83): n is a, c, g, or t
  misc_feature (87)..(87): n is a, c, g, or t
  misc_feature (95)..(95): n is a, c, g, or t
  misc_feature (99)..(100): n is a, c, g, or t
  misc_feature (141)..(141): n is a, c, g, or t
  misc_feature (154)..(154): n is a, c, g, or t
  misc_feature (281)..(281): n is a, c, g, or t
ctctagagtatccccccatattggcctgcagtggtcgagaggtgcagcagaagaccgaccggntgctnaggtgnagctgcgantcanggactgcntggnngagaaggcacaggaggaggagcggctcagtcggcgcctgcntaacagccacganaccattgccagcctgcgggtccagtccccacctgtcaggtatgtcatcaagacagtggaggtggagtcgtccaagaccaagcaggccctcagcgagtcccaggcccggagcccagcacctgcaggancaggttggttatccaaaagtccagggtgcttga

SEQ ID NO: 535128 - DNA, 1272 bp, Homo sapiens
  misc_feature (282)..(282): n is a, c, g, or t
gtatcaacgcagagtggccattacggcgggggctgcagacgtacttagaaaaggggtgcatactggatattcaggctaggagaagaacgcaaaaagcagtgacgtacattattctctgcatatatttactaggggaaattgtgcgtctccctattctgagtcttggcaggaatggactggtccaaccttatacagagagcagtagagcgcggcagtatagagagtacctcacgaaggggacgtgggaaaagtgtagccggggaacgctgggaaactcccggnctccgccaccatcttgctttcctttaatccggcagtgaccgtgtgtcagaacaatcttgaatcatgaagctactaaccagagccggctctttctcgagattttattccctcaaagttgcccccaaagttaaagccacagctgcgcctgcaggagcaccgccacaacctcaggaccttgagtttaccaagttaccaaatggcttggtgattgcttctttggaaaactattctcctgtatcaagaattggtttgttcattaaagcaggcagtagatatgaggacttcagcaatttaggaaccacccatttgctgcgtcttacatccagtctgacgacaacaaggagcttcatctttcaagataacccgtggaattgaagcagttggtggcaaattaagtgtgaccgcaacaagggaaaacatggcttatactgtggaatgcctgcggggtgatgttgatattctaatggagttcctgctcaagtgtcaccacagcaccagaatttacggtcgttgggaagtagctgaccttcagactcagctaaagattgacaaagctgtggcctttcagaatccgcagactcatgtcattgaaaattttgcatgcagcagcttaccggaatgccttggctaatcccttgtattgtcctgactataggatcggaagaatggctttgattgaacttgctgtgagtcatactgttctaaagcaaagcgctgaacagtttctcaacatgaggggcggtcttggattatctggtgcaaaggccaactacctgcggaggcgaaatccgagaacagaatgtatacagacttgttcatgctgctttagtagcacaaagagctgtcgagcgaggtcacaggcaaatgcatttagtgttgttcagcatgttctaggcgctgtgccacatgtagagaggggcaagaacaccaccagccttttggactaggctgtagtcaaggtaacataagaagcattttatggttctgtaa

SEQ ID NO: 535129 - DNA, 1348 bp, Homo sapiens
gctggtatacttacccacccctttcctagaagggctactgctcctggacagagtggacggatccataataaagacgtcccaaatggatggagttcggagagagctgcgatgtgaactgccccatccccatcgcatcaccccaggaccaccaacggacagtccttctgccttgtccatggacatagagcacatagaaccaggctccctgactagactacacacctaggagcactcatacctcggtagcacgacacccatgggatagcaaggacagaaccgagagcatctaccactggaagagggacccacaggcttcgaggaccaaggtggcagcaaggagaggctagcaccctagccgggacacctagaggacaagcatacagctacaggcgtaggggtgtgcgctcggggacccaattgagcacacgcagaagggacactagccaaaccaagactagtcgaacggggacccaaagtatggactgggttacacccacacacaaattacccaaaaatacacacagatgagaccgcccaaaccgtagagcaagtgagacgtaggtttaggacgagggcaaacccttctacacttcacccctactttaaacaaccctaagctacaaagacatcgaaaggggcatagccacgacaaagcaacgccagatcctacggcacggaggagagaagggagatcaaaaggtaaacctccgttttggcccggcaccatacaacttataatccttccattcacctaccgcgcaacttacctggtgcaaaaaagatcccaacatgcatagactggaaacattcaccatataacaccccaaggggccccaagggcacccacccatcggcgcagctaccaccaagggacaatgagatacaatggaaaagacaagagcacccaacatagaaaaacaggagacccacaaccacaggaggcaagcctgagagaaccaaggcagagcccatggggagagagacccatgcaataggagaacacgaccacaaagcatagcgaagaagagagcaacaacaggacaacaatgacgcaacccccatggggcgtgaaatgaaaacaaggacaaaaaaacccaccaccctgggcctccaacacctggcgcaggacaacgcaagatggagcccactcactatcacggcgaacacacacgaagaccccctgacagatgccacacaccaggacacccggaaaagagcgcacgcaagtagccacaaaacagaacgcaagcacgaacacggacaacagcgcaacaccaaacaggaaaacccaaacagcaagcagacgaccacccccgaacaagaaaacagaagacaaggcaaaacaacc

SEQ ID NO: 535130 - DNA, 141 bp, Homo sapiens
cttcgcacccacatagaggcaggaagtcaggaaagaggctggaagaggttccccttatgtgacagctagccagtcactggtgatcatggccatagatgtgtgcatcaagtgagggggcagagccagactctatgtcatttt

SEQ ID NO: 535131 - DNA, 796 bp, Homo sapiens
taaacagatatgctgatttgtaaaaggtaatcctcactgtatacagaatggggatgtatcaaaaaaggcagcagaatatatagaggcctgcagcaaaaaagaacccacccatttgctgcgtcttacatccagtctgacgacaacaaggagcttcatctttcaagataacccgtggaattgaagcagttggtggcaaattaagtgtgaccgcaacaagggaaaacatggcttatactgtggaatgcctgcggggtgatgttgatattctaatggagttcctgctcaagtgtcaccacagcaccagaatttacggtcgttgggaagtagctgaccttcagactcagctaaagattgacaaagctgtggcctttcagaatccgcagactcatgtcattgaaaattttgcatgcagcagcttaccggaatgccttggctaatcccttgtattgtcctgactataggatcggaagaatggctttgattgaacttgctgtgagtcatactgttctaaagcaaagcgctgaacagtttctcaacatgaggggcggtcttggattatctggtgcaaaggccaactacctgcggaggcgaaatccgagaacagaatgtatacagacttgttcatgctgctttagtagcacaaagagctgtcgagcgaggtcacaggcaaatgcatttagtgttgttcagcatgttctaggcgctgtgccacatgtagagaggggcaagaacaccaccagccttttggactaggctgtagtcaaggtaacataagaagcattttatggttctgtaa

SEQ ID NO: 535132 - DNA, 204 bp, Homo sapiens
gtacatccgataagcattgccttcttatttacttctttagctgtcaactttgtaagatgcaaagaggtcggatcacgtttaaatgactgtgctgcccctttcacatcaaagaactactgacaacgaaggccgcgccctgcctttcccactctgtctactctatctggctggcagggacacggaaagcaaccttgcctgctcggc

SEQ ID NO: 535133 - DNA, 1172 bp, Homo sapiens
tccggcatgtcgagttctgtattagctggggcttccaacaaaaaccagagtcactgacagagggaacagcagagaccattgtaggtattcagcatgtgatggatatagagaatcagaggcaccttgttttcacaactaggataaaaatatctgcagggtcgctttccattcctatttagagggagtcctggctccatgaacccactccgcgagtggcactgtcccaagccagcatcaggctccacacgcagcaaacagtgcaggctgcacacagggggggctcatggcacagcagcggtcagggcagtccaacggcagcacagcatgcaagatgcaatgcttgcaatgcattcacacagtagtgtagtagtccccagactagattcacatcctattacgccgatgcgtggtaggaggctgggcctcatctggactagggtgccagtgaataggcacagcagggtattcatatatactagcaatgggccaacaggacgcatatagaggaggatgagcaggagggtaggcagactggctggccatgcaacatggggactggacgtgacggcagacaagaaagacagaagataaacccccaacaatcccatgcaaggccctgagtagatagaagatggaatctggcttccataggattagggcaaacattaactgcagcatacttgtagcatacacaagactcccccttcacagcccagagcccgaacactgggtcctcgacaatcgcgcagtctacctccatatccagtacgactacagtcggacacacagtccaagctgccagggaaccctccagattagacaaacaagcaccgacacacaagcacaaaggaaagacggccacaacagagaggaacacactgaacggttacccatatacaggatcacacaaactaccaacaagaaagagatcacgcaaacgaccagaaaccccgccaccaaccaccaaaaacgaacaaacaagagcagacagaacagggaagacaagcaggagaaacagacgagaacaacaagagaaagagaacaggaatggcaccacaaggtaaaagaacaacgcaaacaacgatagaagagaacaaacaccaacacaacaaagaaaagcaacaaagacggagaagaaaagtaagtaggtcgattcctatgcaaaaaagaga

SEQ ID NO: 535134 - DNA, 295 bp, Homo sapiens
  misc_feature (159)..(159): n is a, c, g, or t
  misc_feature (219)..(219): n is a, c, g, or t
caaggacacatgagtcaagctcaaatctgtctccctctgctggctttcaggcagtatttttattagaaaaggttaggaggtggattctgagattattgggtaattagtggaaacaaaggagaagtttggaaagtacttgagcgtgcacagttatttctncatgttacttcatgggtttcatgtgcaaatgtgaggggagttagtataaaacatgcagtnggaaattcaggctgtgacatcaacaagctccttctgcccaaacttcctgggtggccatcttgggtccaatttccag

SEQ ID NO: 535135 - DNA, 236 bp, Homo sapiens
ccatctcaaaaaaaaaagctaaatacagactgcaccccagcctgggcaatagagtgagactccatctcaaaaaaacaaaattgcgttaaatatgtttaggcctagaaagtctttattattcattcttttcccaactaaaggttccaattccttaagatctccttgatttggcttccttctgtattagtatattaaaggtaaaagagaccttagacttctccatttctgtgatgtcg

SEQ ID NO: 535136 - DNA, 131 bp, Homo sapiens
tggaggcagatagacctagattggattctcagcctgcatgttagtagctgggtaaccacgggtaagttactctctaagactgaattttctccttgcaggactgattgaagggttatattacatatttttag

SEQ ID NO: 535137 - DNA, 167 bp, Homo sapiens
taaaacaattaaccaggcttggtgttgaacagccataatcccagctactcaggggagctgagagctggagagttgcctgagctcaggagtaacgaggctgtagttagctataattggcccactgcaccccagccttggcgacagagcaagaccctgtctgtaaaaat

SEQ ID NO: 535138 - DNA, 212 bp, Homo sapiens
attacgtaaaagacaaatataacagatgccagtcagactgtgcagaaaaaggaactcttataaactgttggtgggaatgtaaattagtacattcactaaggaaagcagtaggcaggcttctcaaaaactattcatagaacgttcatataatccagcaatcctgctattggcattatccaaaaagagtatgatatgtcaaaagcacgccaccc

SEQ ID NO: 535139 - DNA, 144 bp, Homo sapiens
gagaacaccaagaaggtcatccagtatctggcgtacgtggcgtcgtctccaaagggcaggaaggagccgggtgtccccgcctccgtcagcaccgtgtcttatggtgagctggagcggcagctgcttcaggccaaccccatcctg

SEQ ID NO: 535140 - DNA, 732 bp, Homo sapiens
tcactatctttgctcttttaactcgtaacaacatagtgataatcctcctcaggttttgatttccctaataagttttaccgcgttctcctaggtaccccccctctttcgattgggttgcggtgactaaccggccctcctacggccgctccctccgtcagcgccaacggggcgcgctgccgtcggattactggtctcctccaacggcgctcaatagtaacggccgcacttggctttaccacggcgttatggagactgctaaggaggcggccggtcgcggtttcgtggttgtattaggagatgtttgtggtccccccgcgttccgcgagagcgttctcttgccatgagcggggttccctccctctttcgctcgcatacgcaataggtgtcttcaccgctacagcagcttgtaatgtacaacactcattcccatctgtgcgggaaggcgactcccgtacctcggaccctctgcctcttgctgactgtctctgtccaccgagcccctgcatggtccccgccccgcctcccgccatctcaagagattagatgcaggtaggctgtcaggtccttgggcccggagggaaggccatctgccggccaacttggggcagacacagacactctaaggatctgtgcacaggaaggcgtcctttttccttgtagctaacgttaggcctgacgtagctcccctccatcctcgtaacgctccattacctcctagcgtgacggcattcc

SEQ ID NO: 535141 - DNA, 796 bp, Homo sapiens
  misc_feature (35)..(35): n is a, c, g, or t
  misc_feature (62)..(62): n is a, c, g, or t
  misc_feature (83)..(83): n is a, c, g, or t
  misc_feature (99)..(99): n is a, c, g, or t
  misc_feature (101)..(101): n is a, c, g, or t
  misc_feature (123)..(123): n is a, c, g, or t
  misc_feature (135)..(135): n is a, c, g, or t
  misc_feature (138)..(138): n is a, c, g, or t
  misc_feature (155)..(155): n is a, c, g, or t
  misc_feature (166)..(166): n is a, c, g, or t
  misc_feature (168)..(169): n is a, c, g, or t
  misc_feature (179)..(179): n is a, c, g, or t
  misc_feature (183)..(183): n is a, c, g, or t
  misc_feature (202)..(202): n is a, c, g, or t
  misc_feature (247)..(248): n is a, c, g, or t
  misc_feature (251)..(252): n is a, c, g, or t
  misc_feature (255)..(255): n is a, c, g, or t
  misc_feature (258)..(258): n is a, c, g, or t
  misc_feature (265)..(265): n is a, c, g, or t
  misc_feature (272)..(272): n is a, c, g, or t
  misc_feature (282)..(282): n is a, c, g, or t
  misc_feature (295)..(296): n is a, c, g, or t
  misc_feature (340)..(341): n is a, c, g, or t
  misc_feature (348)..(348): n is a, c, g, or t
  misc_feature (410)..(411): n is a, c, g, or t
  misc_feature (656)..(656): n is a, c, g, or t
  misc_feature (663)..(663): n is a, c, g, or t
agcggggtggcggcagtggacggctgtgaagcgcngagccgggccctgggcagcagcggcancgcggtaggacctcgcgcagngtccgcgggctccggngncgggggcgccagtggtcgaagncctcctccccgnggnaggctgtgtgacctggngtggagtctcncnnagtcctgggngatnctgctggtaggcacggtantcgatgcatcagaagctgttgaagagcgcgcattacattctgagnntgnnggntgnttaccanttactgngccggtcctntttaccccgtggnnatcctggctgtacacctacgatgcagatccctcgggtccctcannggacaanccgtacttcagcaacggctaccgggcctacctgccgtccaggctgtgtatcaaaagtttgtnnattttatctaatgagacagtaaacatctggagtcatttgctgggtttctttctcttcttcaccctgggaatatatgacatgacatctgtgttaccttcagcaagtgcgtccagagaagatttgtaatttgttctatttgtcttttctgcttccaggtctgtatgctttgctctgtgggctatcatcttttttcctgccatcggtcagaaaaaacatgtcgaagatggatggcattagattatgcnggaattnctattggaatactgggctgctatgtctcaggagtattttacggcatttaattgtaataactactggcgtccaggtgtacttgatcacagtgcttgctatgatcctggcagtgtctttggcgcagattcatccc

SEQ ID NO: 535142 - DNA, 175 bp, Homo sapiens
gccggcccccagttacacagctagtacaacagctccagttatacagctagttacaacagctccagttacaacagctagttacaacagctccagttacaacagctgaggtccatgcatacttaatattatacttgaattcaatacgagctgttgtaactagctgttgtaactggag

SEQ ID NO: 535143 - DNA, 158 bp, Homo sapiens
gtcacaagttttggtggcattgttagctcagtgtctgtgctgagtccatttcccagagatttcctcaggtatcctgaatttttatcatgaattcctttttattcaactgtcgttttgttaaaatcagtccgttcaaccttaaagcaattgtataatta

SEQ ID NO: 535144 - DNA, 193 bp, Homo sapiens
gtctacagaatcacatacggcagagttgttcccgtaatttctcaactctcataatgtgagcacgtgctcaaaggtactgtgatccagttactgacatacaagacaaatcgagatgcagaaaatcagcctatcaaaatatatataaaaatttatcctgctccgggcacagtagatgatgcctgtaatcccaaca

SEQ ID NO: 535145 - DNA, 154 bp, Homo sapiens
caggtacgcagcttctttcttccttgctttaacagcttctacccacagtctcagtgttactacttgctaccctggccagctatgtcacatgttgttgtagttgttgttgctgctggtgctgctgctgttggtgatgttgttactgctgtgatgg

SEQ ID NO: 535146 - DNA, 384 bp, Homo sapiens
caacctcaaaagttagtatgaaaaacgctcttaatatgcccagaatattcaaaagtctcatttatcatcatatacgtgcactttcaacaggcgctaaaatatttgagggttcaaaggttgtatatgcccctttaatttgtcaacatttaggcctagagtccaaagctcttgggttctaaaaccatctgacacatttctaagatatgcattgagaagccaatccaacatagggggaccaaaatttaaaccgacaagctgtggaccatggaatcggctcacctacccataatttagcttaaaagttccccttttaacagtccgaatacttctaatcaatggttgcattgtacccatttcaccattagcttgaatagtgccagaaac

SEQ ID NO: 535147 - DNA, 556 bp, Homo sapiens
gcataagtgctgggaaggagaggtgaataaacaggcacttgtcctgcctttgtggagtttatagtctggttggatgagacagatattaaacaaaaaaaatccttactggaatgtaggggtcacagtctttgtctgttgcattcattgctgtatctctagcacccagtacagtacctgacatgtagtagatacttaataaatatttgtggaatgaatggatgaagtggagttacagagaaaaatagaaaagtacaaattgttgtcagtgttttgaaggaaaattatgatctttcccaaagttctgacttcattctaagacagggttagtatctccatacataattttacttgcttttgaaaatcaaatgagataatctatttagattgataatttatttagactggctataaactattaagtgctagcaaatatacattttaatctcattttccacctcttgtgatatagctatgtaggtgttgactttaatggatgtcaggggtaggtccctaattgcttcttgcttctatcataacagtaagtcttggattcaaa

SEQ ID NO: 535148 - DNA, 770 bp, Homo sapiens
cagcttaattgtatttcatccgattaagtgcctgagtaagttgggactcgtcaagcttaatagagttaaggtattaattgaagtgatacctctctcaattatttcgtctaagcgctgctttatacaggcgctatacctgtgtaattatatggcatccatccataggcatccctctgtccttctatcattgtcaactaaccaccaaactccgttcgttatctaagtaagatttaaccaagttttatcctataacacctggacttacgccttatcttcccccaaaagcaccaccccttttcacacgcttccaactttaccactttttcaacttcttcaacttaaccggcctgtccacacttgggcttcatacttcccttgggtttaggcccccaaggcgttcccttgggggcccttgggctttgtccccccagattaattactctgcttacgatttaaaagtttcgtggggacacaaacgggtcttaagaagcgtttgttcgaaaaagcgtttgttagaggccactaaaaaggccttttctacatttccctccacaaaaattatcgtttcccgcccaaaaagttatctttactatccccattgcgtaaaacttttccgggtatagagtatgcataagatactcccccggtatttatttacccgagtttatatgcccccgccagatattatataccgagttgggggcaacaacactaaaggccggttgagggggactgggggcgcttttaacgggcacaaacgtttgactcct

SEQ ID NO: 535149 - DNA, 243 bp, Homo sapiens
accgggggtctccaagccccttttcctggacatgccacccttgaatgggggatgtgcagggcttcaaacccccctggcaggagccctgtggcagggcaaagggaccctgctccaaattttttgttggctgcgcttttgtatccaatgcttttcaaagggtattccctcacccccaaaaataaagccctgtgctttaggggtgactgtcatatgccttatttttaataaaatttttgaaaacca

SEQ ID NO: 535150 - DNA, 924 bp, Homo sapiens
  misc_feature (266)..(266): n is a, c, g, or t
tggagacgtgagtttctcgttcttgtttgcccaggcgtggagttgcaataagtgcaatctgggctcacttgcaacctccacctcccgggtacaagttgattctccgtgtttcagcctcccaagttagctcagattacgggcttgtgtcaccagtgcccagctaatttggttggatatttagataagagacgggattttcaccacgtttagttcaggcgtggtcgcaaacttccgtgattctcagggtgatttcactttgcctcagncctcccaaagtgtgcgtgggatttacaggcatgtgggccatcgccaccgtggccagaatttacctcttttaaacaacggttgtttactcacgtggggcaattatacgactagaattcacatttaatatagtggcatttggaatttttctctctcaaagcaaattagaacctttagtacgtgccaagattgccattataattatatcctctttaacatgtgaaaatggaggcatttccacacatttcaatctgttcaacattagagaaatggggctactatgggtggttcaataccttcggtgcctatatttaaatccagttcacataacgtggcttaaacattccatttggtataatggtctcataatgcctgcaaacctaaatgttgtcacgcattatttttcacccacgttggggcaaggggtttacatagagcatgctatgttctgagaaagccccccaagtgggacaatatttctacaggacccagaagttcttaccccttgtttccacaaacttcccattggggtctatccagaccatatttgttggaataatttctagacttttatgccatttccttgcaagcaccatggtttgcacacacaagaagacgacaaaacaaacagttcggggcgtcgaccagagaaagttgaac

SEQ ID NO: 535151 - DNA, 356 bp, Homo sapiens
  misc_feature (244)..(244): n is a, c, g, or t
ttccaatatagtgttgaataggagtgggaagagtagcttccttgggttgtacctgatcttagcaagaaagcatctaacatttacggggtgaaccccgtctctactaaaaatacaaaaattagctgggtgtggggatgcacacctgtaatcccagctactcagatggctgaggcaagagaactgcttgaacccaggaggcagaggttgcagtgagccaagatcaggccattgcattccagcctgngcaacaagagcaaaactccatctaaaaaaaaagccaggcgtggtggctcacacctataatcccagcactttgggaggccgagacaaacagatcacctgaagtgaggagttcg

SEQ ID NO: 535152 - DNA, 801 bp, Homo sapiens
tggcagcaaccattaataaatgccaccacattctaccagcacaaggaaacataggcagcactgaaaaaaaaaaaaaagctcatataattaaacggacaatatggcctgggaaggctccccctgttgtggacccaattgtgccaggggccttgggttgctcgtgcaaaacacgggtgttgtgggttgggttttgtgttggcaaaatgagccaaaaaaaaaacacgggttcccccgaaccagcttgccctgtgaaaagttaggggtgtggcggcggcggcgcatgagtattatatacatttaagatccagaccctccttggcggggcattcaacctgtgcttgtgatgtcgcaattccagattccagattgtgaccctggttaaggggagttaaacaaggggcttgagttcccacccaattgtgcataagcgtgttcactttctcaaattattgcaactctggggtacgtgcagctgtgtgtcattgcaattattatattattcaccaaccccagttactcacaaaacctctcattagaaaaattatcatgtgtgggcccggggctgggggggggtccccacaactgtgggttttgcaaacactggcttgggtccacgggtccacgtacaccctcaagtcttaaaaaaccctctcaacatttcagttctgaccccaattttcctggtccattcattaataatacaggaacggcaggttattaaaagtccaaaaccctttccgaaggtcaaaattaaaatctcttcccttgggaccctttctttctaaaatttccccagcgatt

SEQ ID NO: 535153 - DNA, 91 bp, Homo sapiens
agatcactaagaaattagaaacacgtttaagtctagcctctgcgtggcagacaggtatggggagggagaatgcttttcccctcccagtaat

SEQ ID NO: 535154 - DNA, 344 bp, Homo sapiens
gtctttttaaccctaaactgtttaaggtgaagccttttccaatgtttgggggggaacatccttttaaaaaggggccctgggctttccttttggggaggcggtccttagcaggtgaatcataaggcatttttgcatatgttttattgggggtggccccccctctcccccccagcctttgccttttggggtggtggggtgctttccccctactttggtacatttttatagtttagttgggttttcttgaatgatttatgtttaggggggaaattaaaatttccccttaaatttgttttaactccccctgcaaataaaataaattaagtggccgatggtaacgggga

SEQ ID NO: 535155 - DNA, 326 bp, Homo sapiens
  misc_feature (187)..(187): n is a, c, g, or t
  misc_feature (231)..(231): n is a, c, g, or t
  misc_feature (287)..(287): n is a, c, g, or t
cactgtttgaatttggcacaaaaagtgactgtaggatcaggtgatagccccgggaatgtacatgtgtcttgagtgcaccaaggactgccgttcttaaacggactgacagtaccgtctggacctctaactggaggcatgatgagtatatgcccatagacccgagtggttgacagtgatccacttcccntgttggcgagggccgtgtaggctagacgggcgagctaggtactngctgttttcctcacgtcggaaagcaggcacattgacgtggggtgaacagggatgtnaggagtaagacggctcgtatggttagaggtggtccatct

SEQ ID NO: 535156 - DNA, 311 bp, Homo sapiens
cgtcgaccaactcgctagtggtaatcagatcaggcggaatccaccctggcatccacgacttgccaatcatccaactgatgcggtaaccgcctgagtaaccaccacaagtaaccacctcgcatgtttaccatccatcacgggatcgacgtcacagagtctcccggcgcccgccatccttgacaattgttaacagggtgacaggttggccaacctctcgcgggactaactttagctaacaggccgcgagcgtcgctactggctccaggcagatctgatgtcaacatttgtcatcatcgcacctggccgtcgac

SEQ ID NO: 535157 - DNA, 113 bp, Homo sapiens
ctcggctgactctcgaggatccctcgaaagagtgagggtggtctcctcaaagctcaatgtgtgatgctctgatgtgccgtggtggacattgcctatacagttcaatgcgttcc

SEQ ID NO: 535158 - DNA, 186 bp, Homo sapiens
acccccaccttcaccattttacagtataaaaaagcactagctccatagagaattcacgtgttgtatggtggtatcaagtgatatagggtgatataggtggtatcaggttgttatagggtggtctagggtgttatagggtggtatggagtggtattgggctgctatagagagtatagggtggtatag

SEQ ID NO: 535159 - DNA, 195 bp, Homo sapiens
  misc_feature (91)..(91): n is a, c, g, or t
  misc_feature (114)..(114): n is a, c, g, or t
  misc_feature (146)..(146): n is a, c, g, or t
tttccactttttggctattaagaataatgttgctgtgaacatttgtctatgtattttcaattctttagggtatatacctagaagtagaatngctggatcatataactctgtgtntaacaatttgaggaactacaatattctatgtnttttttcaaccattggcatatatttaaaaaaaattctctgaaaaaaaat

SEQ ID NO: 535160 - DNA, 499 bp, Homo sapiens
ttctggactaacagtttccattcttcagaagatagtccagaatgatgtagtttttgctcaatgcattgagtaatagattctctagtggatctccctagggatgggaagggggcaccttgagggagagcctggagaggagcccggggagcatgggttctatgaacttgaattgattgagttgaaggaggaatacaagtcaacgggtattgtagtgcagaatgttgtgcaagtgatcatggcatgggacattggtgtgtgtagagattttagtttaaaaagctatgataaaaacgattgatcgaaatctgtgcagtattcatatttgttcccagtatgtttcttttacagctctgtgacttaaaatagctatgaataccatacataagaataactaacatgaaacgtcgataaaacacaaaatagagaagggagacctaataaggggtggtagaccacaagttgccccccataagtgacacaaaaaaatgttacccaaata

SEQ ID NO: 535161 - DNA, 537 bp, Homo sapiens
gactagtctagatcgcgagcggcgtcatttgacctcagccccaaaaaaaaaaaaaaaaaaagaaaaaaaaaaaaaaaaaaaaaaaaagaaaaaaaaaagaaaaaaaaaaaaaaaaaaggggggcgttaatatattagttgagtggaggtgaattctaagtgacatgtttttttggaagatgtggcgaacagggactctatattatacatagagagaggcggggggccgaaagatgaaaccaaataagcgagagtaaggtgagtaatgatacttttatgagggaaatcgtgcgcggaggcaacggtattatagctggggggagcggtctactctctgaggggaattcacctcagaggaaaaggtaagaaattgcacctccgtgggggatgaattaagaaaatataagcaagcgagttttgtggggcgatgatgaaagcgtccagatttccgtcaaagtcaagactgattgcatagaaaaaatatgtatgtaccaggatagatatttttaatcacgggagttctttaaaaaagtcccct

SEQ ID NO: 535162 - DNA, 116 bp, Homo sapiens
cgcagtgattaggacttgtctgggtatcggaaagcaagcctacgttgctcactattacggtataatacctttacacattcagatgcctgaggaagtgaaccatggaagaagaggaa

SEQ ID NO: 535163 - DNA, 910 bp, Homo sapiens
atgaaatagcacactactgatccaactactgagtatgactatcaatactgaatagcttacataggtaaagataactcttaagagaccttccattatatgactccctaaatgcactaatgttaaagcccccgatcgatggcgtccatagttagcgtgtgtccgtagtatcttcgttgcgaaagctagggcggataatggatagtacggtatgtcgcgttcataactacagtccttcaacacctccactgatcacaaaaacaccactaacacataaccccattactcttgtatactcattccctagtgtagcgacttaactttgtaagcacattacttccaatacatgacacgtactgcacatacatgagaacctaaacaaatcggaacactagacatacgctctattcagactctagacccatactagatccgtcgatagatagaccagtcgatagctccatccccaaaatcccctctgtcacagctctccaccggacagaccagttctactcgcgtcgctagatccgtcccaacgagtactctgaccactcacgtgcatttacataattcctggctttaagtatactgcacaatagtcacgaaaatgccacatctacgagaatcggccatccctaaagtccgtcattttacaaggtccctttttcatcacatcgtactccccaaattacataggctctcattgattgagtttcttaggggatagactcccgtcatgacacacggccgtcccgttaacacctccgacttaattaaaacctccaattgatgaagaacactcattcgggtgggtaagttaacccgaagtttcctccatgcatcgataattaatctagtacttcctataatttaatcgtgacttcaatataaggaagtccacagtccttattct

SEQ ID NO: 535164 - DNA, 420 bp, Homo sapiens
ccaaaggacaaacaatagcctgtggacaagttatgagaggtgaagacccgcctgtgtaacagcgagaccatgtctcaattgaaaaagaaaaacaaccaccacaacaaacagagggaatccttgtgacacaccacatgccgggaatttcccaaagtgggaaaatcacaaggaagataggctatccatcaaaaaaatgacagctccagaggcccataccccttcacatggaggaaactgtccatcctcggaggataaacctactttgggtaatattgagatagccactcacccaatgacacagctttgaagaacttttcaaagtacgaagatacaacttcatctggagacaacccatgttgtggaatgggaaggggggtgttacagaaaataaataaagttatggcttcttgttggaaaaaa

SEQ ID NO: 535165 - DNA, 926 bp, Homo sapiens
  misc_feature (187)..(187): n is a, c, g, or t
  misc_feature (194)..(194): n is a, c, g, or t
  misc_feature (197)..(198): n is a, c, g, or t
  misc_feature (211)..(211): n is a, c, g, or t
  misc_feature (223)..(223): n is a, c, g, or t
  misc_feature (228)..(228): n is a, c, g, or t
  misc_feature (236)..(236): n is a, c, g, or t
  misc_feature (253)..(254): n is a, c, g, or t
  misc_feature (283)..(284): n is a, c, g, or t
  misc_feature (289)..(289): n is a, c, g, or t
  misc_feature (311)..(311): n is a, c, g, or t
  misc_feature (314)..(314): n is a, c, g, or t
  misc_feature (326)..(326): n is a, c, g, or t
  misc_feature (338)..(338): n is a, c, g, or t
  misc_feature (340)..(340): n is a, c, g, or t
  misc_feature (350)..(350): n is a, c, g, or t
  misc_feature (354)..(354): n is a, c, g, or t
  misc_feature (370)..(370): n is a, c, g, or t
  misc_feature (379)..(379): n is a, c, g, or t
  misc_feature (385)..(385): n is a, c, g, or t
  misc_feature (405)..(405): n is a, c, g, or t
  misc_feature (410)..(410): n is a, c, g, or t
  misc_feature (412)..(413): n is a, c, g, or t
  misc_feature (420)..(420): n is a, c, g, or t
  misc_feature (464)..(464): n is a, c, g, or t
  misc_feature (580)..(580): n is a, c, g, or t
  misc_feature (620)..(620): n is a, c, g, or t
  misc_feature (641)..(641): n is a, c, g, or t
actaattaaatctataggattatatgacctacttataaagtatctaaatgtgctatgtaatctaacattctttgagaactggcaatcattaattcttaaaatgtttttaaagctctatgggtatttaaaagaaatgtgtactacaattaggatttatttttaaatattaggctgggtacagtggctnacgcctntanncccagcactttgngaggccaagagncaggnggaatcanctgaagttagggagttnnagaccagcctgagccaacatggcagaaannccgtntctactaaaaatacaaaaattngcngggcatggtggngtgtgcctgtantnccagctactngggngagctgaggcagaatngcttgaacncgggangcagaggttgcagtgagccnagatngnnccactgnactccagcctgggcaacagaggtgagactccaactcaaaaaaanaaaaaaatagctttagtcactaaatataaagcttatgaagaattaatttatttttctccctttgaactaattatatctattagattatatgacctacttataaagtatctaaatgngctatgtaatctaacattctttgagaactggcaatcattntctttgtttttgctctatggnttttgcactgtgccctacacttagcattcattctacctattaggctcgctacagcggtttacgccggaaccctcagcactttgcgcgcgccccctggcggactcaccgaagccggccgttcagaccacgccgcccaccaccccgacctcccgctcttactcaactccccctaggcccgccatgacctcgctccctcccgtcccactctccctcgcctctaccacccctgtctctcccttcgccgggcctctctgttcgcgccccgctcctccctctgccctcccg

SEQ ID NO: 535166 - DNA, 1390 bp, Homo sapiens
  misc_feature (322)..(322): n is a, c, g, or t
gtgagccgagatcgtgccattccactccagcttggacaacaagagcaaaactccgtttattaaaaaaaaaaaaaaaaaaaaaaaaggcggtatgcactggtgggtgggggtgtggtttggtctagggccacaagggtggatttttccttgtgaggtgttcataatgaaacagtctccgctccatgtgagacattgttgtttgcagagcgtgtgtggaccattcttgctcccgtgccgtggggccagaggtccacgtgggatagcacattcttgtgtgcccatgcgtgataaaattgccccgtttgtcctcgtgtttgctcantctcgggggaaagaagctgttggcgggcatgactagtggcgcatgtatttctcttggcacgtattcaaaatttggtctccatatattattcggaactcctgtgtggtgacaaatagagaaactagttacaagaaccattatatgtctctcttgttatgtcatcgccgctctacttgcagcataaccctagatttgtgcgcgctccaactgtggaaatgctctccaccggttggtacacatacattggtacatctgtccataaaacttctttttcgcaattgggagagaaccgtggggcacggaattccgggggaaacgtgagaaagtgcgttcgggcgatatcaccccctcatagggtggggttcgcgtaggaaccccctctcctataatatttcgcggggaattagcgatcgcttttcatacaacaaggaaaaattgggcggatttctctcgcttgtcgaaatcttcttttaaagaccctccgttggctcataaggtttataagggcacccactttgtgcgctcctctttttaacacaactataaagagagagatataccccaggataaggcggcaacagagacaaagggcgctgtatcatttctctcccccaagtacgtctcccccctatctttgtggggggcgcctttagatctggggagaaagcacaacaggcggggtattaaataaagggttctccaagagaaagcacttttctttttaacgcctttttgtgggcgcccttcaagaggataaaaaactcccccaagagttttttgcaacacggagacacacaactacaagcgacttgatataggcggacggtccattctgaaacagtttaaacaaatgtggcgcttcatagtgggacttttttgggggaaaaagggggcactctatccaccatttattaccctcccatggaaggccgtggatgtttggacacacaccccgaactttgtgtgggcaaacacccccccttgtgggtgttaacagtgaacactcaaagggactccattgggcagtgggtttcacatataaagcatcttggttttttcccccctttc

SEQ ID NO: 535167 - DNA, 815 bp, Homo sapiens
gctttccgctcggctgttttcctgcgcaggagccgcaggccgtaggcagccatgggcccagccggaatggcatggtcttgaagccccacttccacaaggactggcagcggcgcgtgccacgtgggttcaaccagccggccggtaagatccgcagacgtaaggcccgggcaagccaaggcgcgccgatcgcccgggccccgggtcggggtcccatcggggcccatcgtgcgctgcccccagggttgcggttaccacaacggaagtggttgcgcgccgaggccgggggatttcaggccgtgagaggagaagctcaggggggtggccgggccatttcaacaagagcgtgtggcccggacacaatcgcgcgcatttttcgtggtagagaactcccaggagggagggggggaaaacaaatgtccagcggaggttccccttggagagggccaaattggttgccacggcggtgtctggaaagggaagtaaccgggtttcaccaaaatttcaatcctttctctcccccccgagagataggcccttgcggcgcccccccaaaaggaggggggacggacagaggtgtccttggtttggaagaggaccgttggaaaagtggggcgcaaccccaaggttggaacgcgggagccggggtcacaatgggccccgggtccgaggggaaaaccgtcctacatatagagaaggggagagacaacggatcccgaaggtccaatcacattgggggcggacgcgcagaaccgaattttccaaaaagggccttccgggtaaggctctcagaggtagttgggcccgggtggccaaac

SEQ ID NO: 535168 - DNA, 125 bp, Homo sapiens
ccggctacgagtttctttgccaagcggagttggtgacacttttctcagctcccaactacggtggcgagtttgacaagtgcgtggcgccatgatgagtgtggacagagaccctctatgtgctcttt

SEQ ID NO: 535169 - DNA, 540 bp, Homo sapiens
gtctcttcgcgtcgctgctccccgactgtgcgctgagtcgattttcgaagcttccttcccctctgcgtcgttctggtggtcaggcctgcgtgtgggtgtgcgccgtgcctgtctagcctcgatgtgggtcctcctcctgagtctcccagtctgcttgcactgttgggccgggctgtcgtccaccgaggccgctactgaccacctgcggggtgtgtgccaactcagacgcctgtagccgctttgcaagtgcccatgtcgccctgggaagcccagtctcccagaagcaccaggcaggtccctggccagcagcttagcaaccaaaccttggctgaaaggcagttccatggagtgggatctaggggaacacaaaccagagggaatgggggcatgactggaggactgtcgtccccgctgttgttaattaagtagtaaaagggattgagagctagctatggctggatgtgactttagcactttacattcaccttatttaattcttacaattacttatgaagtgatcgattcagagtggccccaagc

SEQ ID NO: 535170 - DNA, 650 bp, Homo sapiens
ccctccacgttgcgttaccccagcacctgcccccgccctttccacttctttgagccttgaagcttaactctcttagagtctaactcttggttccattccgcaccggtaccatagcatgaccttatttgtttaaaaagtttaataatatatgaccatgaccatatatatataatttgtctgtaagaattatgttttaaccgctgctgtagaggacccttttttaagtgaaatcttaccgtggagtatattttttaagcccccaacttggtgcccagactgggtgagaaatgtaccgtacccccctattattttgacggtgtttttttttcggggccggggaccttacctgtagagacttttcaaagattttcctccctcctgtttcaggtgggtcaccttctgatgaatgtttcccttgtaccagatccccgcttatggccttgaccccgccgtcctcaccagatgccgggtgaccctctagctctctctgcatctcccaccccccgacaccctgggaccctcgaccccacccttctttcctacccgccccgagccttgctggcttgtaccgttttgaaactcccgttctattttatgatggttgatcaatagtccgtaacctaataaaggaacgtttgtttaaatatcca

SEQ ID NO: 535171 - DNA, 868 bp, Homo sapiens
gggcttgttcgcaagcgtggtttgcctgctcagtaacacaggtgtcgtgaaaactacgcccgtaataagccaaacatgggaaacggaagaagactcatatcaacattgtcgtcattggacagcgtagattcgggctaagtcccaccacatactggcgcgtcgtgagtctataaaattgcgtgttgggcatcgaaccaaaaaaggaacccattgacaacaacatttggaggacagggaacggcctgccttgagaatgcggaaaaggggcctcccttcacaaggtattgcactggagtcttcggacattaacacctggaaaggcttgaggcgttgaaacagtggtcatcaaccattgtggatatcctcactttgctggcaacattctgaagaaccaagcaaagatacatattggtgaacctatcaattctgattgcccccagggaacaacagaagacgtttatccaaagacaccagttgatttacacggtggacacaattcctcacgggctcggacttggtgcgtggtccccggactctagtctgcttcgcatagaggtcgataggggacgaactttctcgaatgcctgggtattcattccaatagacattgtggccacgaaccccgaaggaaggcaattgcccccttttcctggagcttttacaacaacatcgggcattgatggaaaaacacaaagcttacacgtcggtccgggctggcttcaacaccaaaacactggggacatttcccaacctggaaggcacagccccgtactcaagacacaggaaagcacgactactcgcacggcaacaacttgctcatcaagggcgaagaagcttcagggcacatttaccacttctcacagcaaca

SEQ ID NO: 535172 - DNA, 832 bp, Homo sapiens
gaggtacgcatcaatatcatcacaacaattatcactataacaccccctgcataacccaatagcgaaacgcccctcttcgtctgatccgtcctcatcacagcagtcctacttctcctatctctcccagtcctagctgctggcatcactatactactaacagaccgcaacctcgaagactcgaccgttcttcgacccgcgcggaggaggagaccccattctgatagcaacacctattctgatgttttctggtcaccctgaagtctagattcttatccgaccaggcgtcggaataatctcccatatcgtaacttactactccggaaaaaagagaaccattgggatacataggtatggtcggagctatgatatcaagtggcttcctagggtaatcgtgtgagcacaccatatatgtacagtaggaatagacgtagacacacgagcatatttcacctccggtagcataatcatcgctatccccaccggcgtcaaagtattgaggtgatcgccacattccacggaagccatatgaaagtgattcttgctgcagggtcggagccctaggatcatctggcttgtccaccggaggtgtgcggactggcattgtgttagcaaacgtcatcacgtagaacctcgtactagacggaaagtacctacgttgttggctcaacttccaagtatggtcctatgaatgggaactggattgccgccaacggaggtgccatacatggtttcctattttcgggtaggctaacaataggcaaacagttcaaacaaaacggggacatacttgccacacttcggtcgagcggtcgcaccggaccagacacttggt

SEQ ID NO: 535173 - DNA, 149 bp, Homo sapiens
tcctagcggagctcctatttgcaaatttgcaaatcattctggtcctaagcaatctcaggaaaacatttctaagaaccaaagaggaaaaaaatccttttttttttttgagacagagtctggctctgtggcccaggcaagggggggatctg

SEQ ID NO: 535174 - DNA, 206 bp, Homo sapiens
gctgtgcccccgagctgctccctttcctgcacctcccaggaccgcccttccctgaattgcttgtcccgtgagcctcttagttcccgctcactcgctcgtgggaggaccttggcctgttgcatgagcagagaagatagaactggccacacttatgaccccttagctccccccctttccgccacagagagagcgtcgggtaccgagct

SEQ ID NO: 535175 - DNA, 151 bp, Homo sapiens
caactccggtatgatcaatccccaaacagttacattctttttacaaatccttgcgcctcccattagcatagtgaacaaactccggtattctcatgaacgtttagtacggttagctgctgtacagtgacacattggccatggaaggactaaa

SEQ ID NO: 535176 - DNA, 411 bp, Homo sapiens
ccattgatcccccttcatttgatgtttggaaaattccaggaattatcattttggcaacgaaaatggataccccatagctctttggtgtttcccgcttttcaaaaataaagtttttggttcccccggtgaactatttatgagtttttttggtgtgaaaaaaggggtcatgttgcatttccagccattgtttcaaagaacctttatttgttcagtatcggtagaaaatccttcccgattaaaaacttcagacttggtgaatatcctgcaaagtcaaaatgcccgatgttcagttgggtggatttgcccacgagtcagatttgaacatcagtctattggaacccaataggtgtcattgatggcggcaagccatagctttcaagttttaataaaatgcccaaaagaaaaaaaaaa

SEQ ID NO: 535177 - DNA, 698 bp, Homo sapiens
  misc_feature (361)..(361): n is a, c, g, or t
  misc_feature (440)..(440): n is a, c, g, or t
  misc_feature (508)..(508): n is a, c, g, or t
  misc_feature (510)..(511): n is a, c, g, or t
  misc_feature (515)..(515): n is a, c, g, or t
tccgtctagatagtctcactcacctcttcgtttggcggtcagcctctatccgcaatgtgcttggcctctttgagtctgcatctcctgaatctccatacttctcctcatccttcatggcccggttttctatcgccttcattcctctgcaaggagcaatctcatcaggacggccgttcactacacacccctccacccacctctcatctatctttactttcagatggagtctcgctctgtcatccaggctgaagcgcagtaggcacgatctcagctcactgcaacctccacctcccgggtacaagcgattctcctgcctcagcctcctgagtagctggaataacaggcacccgtcaccatgtcnggctaattgcgtgagacaccacccctagtcccatctctcatctaaatgagtctctgaatctactgagcactgtaacacnctgcaaagatggaactctgtgcacacatttccttcatcttggttttttttttttttttttgagatgancnnacancggctcataaacgctaactggctttggggaacggaactgttcattttaacctcaactgctgactactgatagtagaatgcgagtcaatgtccaattatctagataaatcgggaaataaattacatgaagtgtaaacacaaatgattcttacactgtaagtcaagcactgtgcagaccacgacc

SEQ ID NO: 535178 - DNA, 245 bp, Homo sapiens
gataatagcaagaaaaaaaatatcatagctgaggaataataagttatggaatagatatacacatgatccataatgatatatataactggctaaatatacagtaggagttcaaattaatgtagagagaataacagcaatagaacattctacgcagttagtcaaactgccatagtaataactgttgcaagcatatatcattacctgtctcgatgactgtgtcaatgttgtctcatgcgaacctatga

SEQ ID NO: 535179 - DNA, 300 bp, Homo sapiens
acggtgtggataaggggtgtagtgtgccttgtgttaagacgtgggctaggtcatttttaatcttagagcgaaagcctctaatctctgcgcccgttcataaggggatggccatggctgggttgatagatagttgggtgggaggagtcacatgagtgaggcaggagtccgaggaggtaaagtatgtggcaataaaaatgattaaggatactagtataagagatcaggttcgtcctttagtgttgtgtatggttatcatttgttatgaggttagtttgattagtcattgttagcgcgtgctgt

SEQ ID NO: 535180 - DNA, 779 bp, Homo sapiens
  misc_feature (65)..(65): n is a, c, g, or t
  misc_feature (160)..(160): n is a, c, g, or t
  misc_feature (392)..(392): n is a, c, g, or t
  misc_feature (557)..(557): n is a, c, g, or t
gccgatgggcctggtatggagctcgggctgagcgggtgctagagcttgttatcctagtcacgtgnccaagcgacagaacatcgctggtcctgggagcacgcgacagatggcactacactacgcggcgtcggtcctcgcggcctgtggcgtgccacctagncccttgatagcgttgtcctgcggatcacgtctccgcggtgactggactgacctttgcgcggactgacgttcgtgggaccgtctgtatgaggactcgagagggggtccaagtagttaggtctgtacgagcggtgaactgaggcagatagaacctgaccacaggtctgccacgtgactttgtcagacattgcgctgtgcgcctgctgtcagagggaccgtcgacgaaacacacnacggatacgagcgcgtcatagtcgcactcacacccctgcacggccatggggagttgggagccatctctgtggcaccaggaggcagtgtcacgcctcatgacctgcgtgtttggcagtcggagcgatgtagcagaaggccgaccctaggggcaagagtggatggcntgccaccaagtaacatccacaaagggtctcagcctgccttcgctttgccccacacttaacccgtaaggcgacgcaggctcgaacaccagttagggagaagacgccccttgtgctgactctcttctgtggggctgggcaggggaaggcgcgaaacaggacccatgctttcaatctttacggggggaccgttagattggacccaaggggttgactcaccggtcc

SEQ ID NO: 535181 - DNA, 897 bp, Homo sapiens
agctggtgttggctgggtgctgcacgcgctgctctgtctgcaccgacgctcacctcctggctccgcgttcggttcggcacctggaactggatctggctggcgctgctgcctgcgccgcctctgccgcggtcctagcgccgctcggcttcacggctccgcaagcccccgtgcattgtctgtgcagggaaccgccgtcaccacctgtgcacccgctgccgggtgtgtggtccgtgcctgtgcagccctgcacaccacctgtgatgcgctggctgctgctggactgtgtcgttccttggagaagctgcctgtgcatattggtgcctggtgatcaccgaggtgtgatgcagtgaacccagcttctcgtgacatcgcgagcctcgtggttgtggtgtatggccgtgggcatctcctacattagctgtctacgacaccaaggtattttcaaaagaaataattccagattgatggatgaaattttaaaacaacagccaagaacttctgggcctagatttgttcaaaatactcaccagaatttgcaaatagtaatgacaaagatgatcaagttttaaatttgccatttggcatggtgaagtgtgctgtctccggaagatggaaaaagcagaatatttgtaaagagcttgtcagtgacattatgccaggttaatgtagcccagaagcaaaaaggagacccacagatttggattgtagaatacgttagccagttactttagttcaaatggattgtcctgatcctgaatttaggacttgaaagttcggtccctgtggccacgcacactaagcttttcttcccctgggccatcagacttgacttgggatcgctcttggcatcccactaaaataattttaggacttatatgcctgccaagatggcggctg

SEQ ID NO: 535182 - DNA, 274 bp, Homo sapiens
ggacctgcgtagccttctccattctgaggtcaactaggagtcataatagttacgatcgggatcaaccaggcgagcctagcattcctgcgatcatctagtacccactgccttcttcaagagccagtactagtaatgtgctccgggtccatcgatcgcacaaccttaacaaggaacaagatattcgaaaaataggaggactactgaaaaccatacctctcagttcaacctccctcaccattggcagcctagcataagcgggagtacctttcctcac

SEQ ID NO: 535183 - DNA, 657 bp, Homo sapiens
tctattaacacacgaagagataagattagagctttcccccaccatcaaatgatcacaccctcaaactttctgttgtctgcactatcctatcatcaaaattagaggcaatccctgtattcccccccgcccagaattttatttattctatgatgcattttctttataaactattatggaccaccattcataaaatttccttttcaggttcactgtgcagaaaagtgacaattttctagataaaaagtctatcatatctaaagaaaattttctctagcaaaacaggtcatcacatctaaggaaatttttctctcaattgagtgatttcgcaaggacttgcaaaatttcctagttaattctatttactcatttaagaatgttatgtacatttcaatgtctatctggctaacatgcttaattctttgattcactatatgatataactgtcacctaaaaagatcctggcgaagtgataaacaatttaaaccagctagcaagtttgccaaactgttcatgagggcttagtcacctttcttaagctgtctttggcttgcttcggattgctttacagtacttagttcctgaggtacttcagccagtactctcacaaacagtatggcctgaaattgactctaatacaaagtactctcgtcccagact

SEQ ID NO: 535184 - DNA, 408 bp, Homo sapiens
ttgatagcccaatcccagactttgggaggccaaggcaggcagatcgcgtaaggccaggagtttgagaccagcctagctaccacagtgaaaccctgtctctgctaaaaggtacaaaaattagctggacatggtggcacacgcctgtaatcccagctactctggaggctgaggcatgagaatcgcttgaacctgggaggcagaggttgctgtgagccaagactgtgccactgcactccaacctgggctaacagagcaagactctatcttaagaaaaaaaaaaaagaaaagaaaaaggatcatcatacaaataggagtagggcagcaacagtggttttgtgtttggaacacttcctcatccgtctggttcgtatcgttttccttcctcctgggattgggctatcaaggtac

SEQ ID NO: 535185 - DNA, 152 bp, Homo sapiens
cgtgtagacgtgagagcccctagcttacgggacacgctctgaccgaggtcggctcgcagacggacgtaagttaagcctgcaggatagtgtagcacgacgcagaaccatgcagatcgaagattccaattacgcagctctagatatccgacttt

SEQ ID NO: 535186 - DNA, 820 bp, Homo sapiens
cccacgcgtccggccacgcgtcggactagtcctgtatgtgaggactattaattgtttatgggtctgttgatgtgtggatttgtattggtgacgatggagatctccactcgtgtgtgcccaaggcgtggagcgtgcaaatggcgcagtcttggctcactgcaatctctacctcctgagttcaagcaattctcctgcctcagcctcccaagtagctgggattacagtcactactgtcgggccagtaggaacacgggaatggctacattcctggcaggccgggacatgacgtggtggccgataggagcctccctcttcgaccagcagcgagggctctggcctcttcataggactggggggctcaggcgcggcaggaggtctggccgtggcaggcttcgagtggaatgccacgtaacgtgctgctggcactggacatgggtgttcgatgcccatctacatctcactcagagatcgtcacacttacctgagtacattcagaagcgctacgggggccagcggatccgcatgtacctgtctgtccggtccctgcatactgtctggacattcaacaagatatcgctggacctgtacgcgggggctcagatagagccacatctgcctgggatggaaactactagcctctccaacatcatcacgctcggaatcaaagcccagagcaccatcgcagctttagagcaagaacgagaggtaacgggcagtaggcggcaaacctagggccagacaatccctccagcaacatgccaaacaacagtcaagctggacagtcagaccaatgaaaagtaacaaaaccaataagggaacg

SEQ ID NO: 535187 - DNA, 260 bp, Homo sapiens
gtcgacgctaaggaaaatacacattgttgcttcatgagatgctaacatgcgcaatttttcctttggaggcatcggtgtacggccttccatacgcgtaataatcactgtttgagatacattaggtagtgtatattcttgtttcaaagccgctgctgtagcaaggaaagaacttacacctggcacgacttcataagaaatacccatgccagctagtgcatccatttgctcttgaatcgcaccgtaaatagcaggggtcgacg

SEQ ID NO: 535188 - DNA, 145 bp, Homo sapiens
tgactaaaccggttgatggtagagatggtaagacggcatttactcagccccgccctgctcagccacgggagcggacgaatactaagcgtggtggagtgcgatgaatgacgcagactggtaagagcgtgtgaggactgagcgtgca

SEQ ID NO: 535189 - DNA, 293 bp, Homo sapiens
  misc_feature (1)..(1): n is a, c, g, or t
  misc_feature (94)..(94): n is a, c, g, or t
  misc_feature (184)..(184): n is a, c, g, or t
  misc_feature (199)..(199): n is a, c, g, or t
nagatcgttcttatctataatagacatctgagcctggccatccatgaaaccaggctgtagagaggatgaggcttaagtttgggttaatgacagntgcaggtgtcgctcatcagggaaaggggtaagtgaaaatgctgtataaactgcatgatgtttgcaggcagttgtggttttcctgcccagnctagcaccaccgcgncatgcggatatgttgtccagcccaacaccacaggaccatttctgtatgtaagacaattctatccagcccgccacctttggactttacctcccgg

SEQ ID NO: 535190 - DNA, 701 bp, Homo sapiens
aagtggtatttgcattcaagttgaagcagagcataaatgttgggaaaatgtgcagcctgtcgatgtgatcgaaaagaaaaccccattttcttgggagaaattcaagtttgctgcagaaattcgcataagtaatgaggagtgaaatgttaatcaccaagacaatggggaaaatgtctccagggcatgttagagaccttcatggcagccccttccatcacagaccgagacctaagaggtaaaaatggttttgtgggctgagcccagggaccccctgctccatgcagccttgggacatggtgccctgtgtcccagctgcttcagctctagctgtggctaaaggggccaaggtacagctcaggccattgcttcagagggttcaagctttaagccttggtggcttacctgtggtgttaggcctgtgggtgcacagaagtcaagaattgaggctggagaacctctgcctagatttcggagaatgtatggaaacgctttggatggtcaggcacaaggttgcttcatgggtggaaactttatggagaaccctcactaaggcaatgtggaaaagtaatgtgccgttggattccccaaaagtcccactaggggaattgcttctggagcttgtaagaaaaggccactttccttccccccagaattatcaattcaaccaccagtttcccttgaatgcttgagcttagactttt

SEQ ID NO: 535191 - DNA, 947 bp, Homo sapiens
  misc_feature (913)..(913): n is a, c, g, or t
ggcatcccagcccgctgcatggccgcctacaaactggtgctgatcctggcactggctgagagcgacatggacacctgtgagaacctgcttcagcgtgctggtacgacgccgacctcgagccctggcgtggccacgcaggagtgcgaacgcgcggcgggcaggcgcgtacgagatgctcggctatgagtcttgacatcgtgcttccacctcagtgcagaaggagaagccgaatccgggaacccctcctgggcaacaggttggcttagaattgcccaattggcatccacacatgtgggcttggccaagtgcgtcgacggaccattgggggcccttcaagtgagccgggcacctaatcgggggatctacaccgtgtctacaactacagagcacgacaacctgcttgcacaacgccatgggtcgcagtgccgcatgtgtgcaagactctcggacggccgcatcactaatgagtgtacccgagcagacgtccgcattggagaccctgacacactcctgttctcacagcgcaacatccaggtacaggactcgccaggctatcgcagaacgctcaacagcaagcatcacgctcacccgtccctgtcgagcagtcttgacaggcatcactcattggccagagatgctcttgcccgtatcgtggacatgagagaagatagattcgccgcagaatcacagggcagggggaacactgtgttactggcattggcaggaacacaatggacacacacggccttcacgagaggaacattggtcaacggcagtcatgagaggggtactcctcttgcaagcagcgctagtcactgcgaaggttgaaccactgacaggagatggatatcgacgcgattggtcatcatgaagtcgggacagagaagactgtgaatgcactcatccaagtcancaatgcagggatcaatgaggggattgaagcaggc

SEQ ID NO: 535192 - DNA, 1702 bp, Homo sapiens
gccacgcgttctggacatcgtcttgtaaaccactgacgctcggcaactcactcggtggacgcaaccgatcgctgagttgcccagggaaggacagcgggcgatctgtggaatgctccaactaccttccttaagatcatccaactattggcaatgattatccgcagaagtgatttccattggtagggagcacgacatatgtggagcgtccaatccagcatgcagcatgatccgcatgtccgcttcgcgggaaggctgtggtgctgatgggcaagaacacacatgatgcgcatatggaccatccgagagggcaccctgtgtaaaacagaccgcagctcgtggatgaacactgctcgcctctattagtcctgtgggcgaagtgttgagcgttctgatgttcaccaatggagagactcgtcgactctgatagtcaggggacattgcttgcgtggcctacataatcggtgctcagcgtgcttgcccggtgctggcgtgcgcaaaacgcgccgcgatagtcgaaggtcacgttgtgccaagcgcgcaagatatactggtcgtctgggtcccgagaagacctcactattttccaaggctttgaggtaatcatcgactaacaatctcccagggggcggcatttgaatatcctgaatagaagttgcaaggttgatctaagaattggtgacagatgtgcggagccaagcgaaagccatgctggatgagacgtgctcaagatttccccctttttctttggggctggcctccaggcagtgttcacaaatggggcctttaaaccctgagatcctgtataccgcgggaaccccggattttcggtccggagagggtcccatgttgcccgcttctccgaaaggttccccctgcagtgagaacctcatttaaaagacaaaaaaagcaaggcgcggttgggcacccaacataagaaggacacactacggagacgtgcggcgtccacgctcgtcttttctcaacctatcacctttcctctctcttacctcttcgatcaacgatgacaaaaactgagaagaaagagagaagaacaacatcgacagaacagcggaagacaagagagacacgagaaaagacgaaaggaaacaacaagcagcagaaagaaacgagcagagagggaacgaggaaagagcagaaacagacacaaaagacccacaacagagcagggaaaccggagcagggccgagcgaaagagagacaacagcaaaaagacaccacgaagagcaaagcagcagacgaggaacgacaacgaaagggagagaagggaggagaaggaaaaaaaaaggaggaaaaacggagagaagcgcgaagcacagacgaaagaaagaggcaagagaagaagaaaggaaaagagacaagacaaacacagccaggagcaaagacaaccagaagaaaacaccaaagaagaaaaaaagaaagaaggagacaagaagacgaatagaagacagacaaacgagaggacagagaagagacagaaagaaaccagaacagaaaacacgagagaaacacatgacaacgagacaacgcaagacagaaaacagacgagacgcaagcagagaaacagacgcacagacacaggacacgacagcagaggagacgaagagaacgacacgaataaacagagacagccagaaaacagaaaaacaaagggagaagacagaccaacgagcaaacagcaaac

SEQ ID NO: 535193 - DNA, 513 bp, Homo sapiens
agggtgactgatggcttgagacacattgctctgcggctggatttcatggttactattccatcccgggacctgacgcggatcagtctcccctttcctgtggctggaggggcacactccgtccctggagagcgtctggtaggggcttgtagaggggcggggaggacttccagaggcccgaggacaggcgccaggcttggcttcggggctggggcagctgccatgtgctctcagagcactgagggaggagcgggggagcccgggggcgagaaacccacagcacagggaagggaagggcagccttgaaactgcaagttgggagatcacggtttcctcacgtggccaccatgagggctgaggctgtaggctggccgctcctgcccctcccgaccaccccctcaggcttccagcctccttgctcagccacctaggctgggctttcaggttcacaggcagccggccctacaacatggaggcccaggctgggctttcttcaggagtggcatctaaacttag

SEQ ID NO: 535194 - DNA, 5943 bp, Homo sapiens
ggggcactgaggagcggcgcccgcggggcagcgaggagcccgatgcagggttctgcgcgtcatttccggtcccgcgggcgccccgtgaagcccacctggatccgccagcgctgtgccactccccagtgccgagctccgagctgtctccgcggcctcgcgcccggcccctccaccgcgcacctcttaggccccgcccgccagcgtccctttgttgtgaaggcgccggggcctagcgctatgcctgcggcggagactgcatcaggctctcgcgtctgcttctgcgctttgcctgggagaggccctggtggcctcgttcctggcgcccggagtccctgctgcggccccacccccgggcggtcacggtgacccatgctgcccagcctggaggtaaaatcgttcgtggctgtggcttcagcatgtcgtcctcggtgaaaaccccagcactggaagagctggttcctggctccgaagagaagccgaaaggcaggtcgcctctcagctggggctctctgtttggtcaccgaagtgagaagattgtttttgccaagagcgacggcggcacagatgagaacgtactgaccgtcaccatcacggagaccacggtcatcgagtcagacttgggtgtgtggagctcgcgggcgctgctctacctcacgctgtggttcttcttcagcttctgcacgctcttcctcaacaagtacatcctgtccctgctgggaggcgagcccagcatgctaggtgcggtgcagatgctgtccaccacggttatcgggtgtgtgaaaaccctcgttccttgctgtttgtatcagcacaaggcccggctttcctacccacccaacttccttatgacgatgctgtttgtgggtctgatgaggtttgcaactgtggttttgggtttggtcagcctgaaaaatgtggcggtttcgtttgctgagacggtgaagagctccgcccccatcttcacggtgatcatgtctcggatgattctgggggagtacacagggctgctggtcaacctctccctcatcccagtcatgggcgggctggcgctgtgcacggccactgagatcagcttcaatgtcctggggttctcggccgcactgtccaccaacatcatggactgtttgcaaaatgttttttcaaaaaagctgctcagcggggacaaatacaggttctcggccccggagctgcagttctacaccagcgccgctgcggtggccatgctcgtcccggcccgggttttctttacggacgtcccagtgatcgggaggagcgggaagagcttcagctacaaccaggacgtggtgctgctgcttctgacagacggagtcctgttccaccttcagagcgtcacggcgtacgccctcatggggaaaatctccccggtgactttcagcgtcgccagcaccgtgaaacatgccttgtccatctggctcagcgtaatcgttttcggcaacaagatcaccagcttgtcggccgttggcacagccctggtgaccgttggggtcctgctctacaacaaagccaggcaacaccagcaggaggcgctgcagagcctggctgcagccactggccgggccccagacgacacagtggagccgctgcttccacaggaccccaggcagcatccctgagagcaggaagctgccagctgctgctgtcctcgtgacactgcatcccccagaaatgggcagggacgccctcctccatggccctgctggggtgcaggacatggggagctaagttggccattgcctgcggctttctcggtttgtcggtgaagaccagcagaaactcaaactggggattccaggtatcagcttcctggagtagacaccagaccagtagctgactgtgtccgccgagcccatccccgtgtaatgtgaaaacagcctctgaggctcccatgctgggggtgcaccacttcctctctgggcgacaccccagggtccaccgggagccagaggtgggtccagtgccaacgagagccgctccctgccacagccaagagagccctcggcgtcccacaccagccatcgaaggccctgaggccctggaccggcggcagactggccctgggcatgaggccacagagcagggccgaagggaggggacagagggccctggaaggaagggtctcctgctgccacggtgggcactcagaacttctccccacctgacccagggctgtgggcatcctcagactatcccagaggcatcgcaagcctcaagctgcagcattgcacggcactcaagggctatgaccacggaggccgttcagtcgcttctgtttagaggaaggccccctacctcttccacaccctgccctcctatcccttccacaccctgggctgcatgagctccccgcaaccccagggcaccctgccctcctacctgtgggggtttccagccctgaggttgaggacaaacctctcgtgtttaacttgggaggagatgtgtacgttccttttcttttttggactctgagtatgaggcaggctgttctgaggtccccgtggggtgagcctgtctgtcctccctcagagcccaccgttcctatcatcatctagcacctgtccggttccccacgtgagccttgggcaggacgctgcagtgttgatggtttgggttacgtggcgtttacctgggcgccgtccttgctgaaaaaggaaacgtccacactgaatgtttctggggcgcgtggtgtgtgtcaggcgcccaccctgtcccactctccccaagggacagtagtacggcacactggggccaccagccagctcaactcatcctcctgtgtcacgcacccccgagggcgcaggaggcctgaggagtggctactggagccgtgtgttaggcagaggcttctgaccatgtctgagctctttacccccaatctcgcaaccggcggattcccatgcccggtgcagcctgttgccagccagcctttgagacccagagctccagggcttgtcagaggcagcatggggctccagtggtcccgagtctcatttccctgcctgctctttaggcctttggcacccatggtcacttcactggttttccatttggcttctcacctgggaaatacaaaaatagcccctcctgaagataaaatcgttcagaaacagagcaataattctgactcattaacttctacctactcaaaaaagtctgccatgatgatggaccgaagtgaggctttttaacccacaagtaacctttttatttttttgagacggtcttgctctgtcacccaggctggagtgcagtggcatgatcttggctcgctgcagcctcgacttcctgggctcaagtgatccacctcagcctcccatgtggctggaaccgcaggcacgtgccaccatgcctggctatttttttgttgagctgggctctcgctttgttgcccaggctggtcttgaactcctcggctcaagcaatccttcccactcagcctcctgtagtgtcgagaatataggcgtgggctactacacctgcttcagccgcttctataaaaccgctgacctgtgtgtggaggacaggccaggtgtgtgctcactgcgctgcgaagatgttttgtcacgtgactttccctgggtttccatttctttttttctgctttcctcaaaaactaatagaagaccggctgcggtagctcaggcctctagtcccagcactttgggaggctgcagatggcggatcacaaggccaggagttcgagaccagcctggccaacatgatgaaaccctgtctctaccaaaaatacaaaaattagctgggtgtgatggtgggtgcctgtggtctcagctactcaggaggctgaggcaggagaattgtttgagccccagaggcggaggttgcagtgagccaagatcgtgccattgcactccagcctgggcaacagggcaagattccgtctcaaaaacaaacactattagaaaatgctctggaggtggcggggagttgttgatttgtgaggacagattgaaagcaactcccagggtggccttgtccacctccccatcgagaatatggctgccggcctctttgaagattgtggtctggcataaggagaggtgcaggcgcctggttctgagcaccttggaatttccagccgcacagcatctggtgccctcccctccaccctcacaaggagctgccatcctgtttggattttctgtttgtggaccagaaacaaacgtttttccaaaggattagcaaataggttgatttcctgtgtaacgctgctctggggcctcttcctcatcctggcagaaggagcctggagcccatgaggcagccagcactgtgcccttgctcagtcgtgctgtcccctccctctccctcagtctcttctccatgcccaagtcagtttccagccgctggtcttcatggcattcccagcacagctggacaccaagaggcaaaacccaaggcctggcttggccgtgttaacgattgtacagacatttttttaaataactttgtgtaatacttttctagaatagtaagttcttgttgaactgtcacagatgagcttctaggaacacaccgggtgtggttacttccactgggtgtgtccatggtcgtggtctgtgcctttgtaaacaaacagaacacttgaaccaccttccgaattgggtcatcggcttctttacattgatacttagagatttgcagctctctaactttcaaggaaacttcccctactgaaaggcataaaaaggttaaaaaagaaaatccgagagtcccaattccctgtataacagcattaaaataatctgcctgcctggaaagatgagaacactgttgcacaacccaaaatgtgtttttaatttgtgaaaaattaccatggtgagtcagacagtcattttaaacagctgaacagagactatcatcagcaaatagagctcagctttgtagctgcctttaaaatccttgtcccaaatccggtgagctctgcttgctgccgccgcgctcctgggtgatcactcagacgggtcagtgggaataacgggccaacaagacagctttttacatgtgtccaaaggatggcctttcgaaggcctggaagtatttcactgttggaagaagtaaacaagaatgacattccagatggaaatagaattctctctcttgcctttgaccaacatggtactaaggggtttcttctttcccaatgtatgtacgtgccctgctgggggccttactttatagaatgagagcatccgagcttccctaatgaatctggctagttctgtgtctggctgaggatacaggagtgggacatccactctcggatccctcagagcacagaaaccttcagctttgctgtctctgaagtatttcctccagtttccctgcgggcccctatgtttgagtttgatggctgctggatcctcactcaacgaaaactcggttggaaactgttccgcctggcagtccttttttgttgttttccatctcatttcccttccatctgaaagtggcattcagctgacttgctcatttagactgttcacggagtctgaatctgccaacgtggtgttggaggctccaccttgaaaagggccacagtcagggcaactttccccatacaggaaaacttgaaaattacatcaacagtctacgtcacagccaaattatatttcctttataccaaacaaaactatggagaactaaaagtacatcacacaaaacgtttatagtgttttgcatgtgacctatttcagtatttatataactagattagtgctttctagcaaacggttctgttaattagcgagtcactgttgattctgctgtggtggtaagttgataccgtgtaactaatcccgtggatgcctcctcgttatttttgtccaaacgaagcagccgtggtagtagctgtctatgattcttgctcagcaaagtaaaataaatgttaaatatggagaaagaaag

SEQ ID NO: 535195 - DNA, 555 bp, Homo sapiens
  misc_feature (428)..(428): n is a, c, g, or t
  misc_feature (516)..(516): n is a, c, g, or t
tagagatggaggtcttgccacgttaccaggactggtctcaaactcatggcctcaggtgatcctcccatcttagcctcccaaagtgttgcagttacaggcaagagccaccacgcacagcccagcactctcaatttccttcaagaactttacctttgcattcacaatgtgactaagtgtttagcacaagagacctagccttcagccagtcttgcattttgacatgccttcctcactaagctcaatcatttctagcttttgatttaaagtgagacatgcgactcctccttactcttgaacactcagaggccactggagggttattattggtgtaacttggaatatttttgtgtcttaggagatgggggggccgaacagagggagagagactggaaaacagccagttggtgggagcagtcagaacacacgtnaacattatcatttaagtctgttgtcttattatgggcgcatttgtggtgccctaaaataattacattagttaacatcaaaggtcactgnttcacagatcaccataacaggtttaccattatttacaag

SEQ ID NO: 535196 - DNA, 833 bp, Homo sapiens
ggttcactgggcggcatggcggtgtgtgctcgcctttgcggcgtgggcccgttggcgcggatgtcggcgccgtcgcagcatgctgccgtgggcccgtgctgatgacgtgtggcggccgactgccgattccggagctcagagccctgaggaggatgcgcattcgaggtctatgcgccggggttcggggtgcggtcttgtgtctgcgggcccctcggccgcgaccccgtgctgatcgctgctggagctggcgctccgatgcatgctggtggagatcttcgtcgtcggcatgccggggcactggaccttactccaatgcgttggccgcagggtcgtgcaactgatagttccaggcgctaattctccactaccgtacaccaattcttggaggagtgcgtagccggtgaggatgtatgcgtatttgcggaaaacttttgcaggacacgctggagaatcacgaggcgatgtcttatggtctgtgacagctttcatgcgacagcctgcattcatcgcgagtcattgaccacaatatattgcggaattgttggccaagcctaccaatatcgggccaatcacggagggaacttgtcgtgcaacggtgtggtggttgtaacggtcgtgatgtcatccattcgttgttgagatgttagccatgggctccccagtgtatctctggacggtcagaatgcattgcctagtgcagatgccagagcactctgctctgaggagagtccacgctgattggagaggacaggctggcaccagtggcgtgccattgtacgggcaccaccaggagccccgaccattgggcagtttccagactggtgacacgaacg

SEQ ID NO: 535197 - DNA, 380 bp, Homo sapiens
agcccttcgatatgtgatgattatctcacccaccctgccagagttgtgaagagcactgtttactaaaaggggatgtctacatactcatgcgagggaagtgccgtgtttaaagccttgtgctggtgccagtaactaactcgtgcgcgtgttcgtatttgatcgattatggagctcggctaatagctcagctgtttggcgtggcctctttatgctcctgtgctagctgtggggcctctttctggtgccaatctcgaggtgtcctcctgcggttggcctctttattgagtgctaaggggggtcgtcttgagttgtccttgaggtgttcaagctcggcgttgactgtcactgttggtttcctttggcttggccattaccatggc

SEQ ID NO: 535198 - DNA, 482 bp, Homo sapiens
  misc_feature (1)..(1): n is a, c, g, or t
  misc_feature (9)..(9): n is a, c, g, or t
  misc_feature (32)..(32): n is a, c, g, or t
  misc_feature (34)..(34): n is a, c, g, or t
  misc_feature (39)..(39): n is a, c, g, or t
  misc_feature (42)..(42): n is a, c, g, or t
  misc_feature (106)..(106): n is a, c, g, or t
  misc_feature (110)..(110): n is a, c, g, or t
  misc_feature (113)..(113): n is a, c, g, or t
  misc_feature (116)..(116): n is a, c, g, or t
  misc_feature (120)..(120): n is a, c, g, or t
  misc_feature (126)..(126): n is a, c, g, or t
  misc_feature (133)..(133): n is a, c, g, or t
  misc_feature (135)..(135): n is a, c, g, or t
  misc_feature (138)..(138): n is a, c, g, or t
  misc_feature (141)..(141): n is a, c, g, or t
  misc_feature (143)..(143): n is a, c, g, or t
  misc_feature (153)..(153): n is a, c, g, or t
  misc_feature (162)..(162): n is a, c, g, or t
  misc_feature (164)..(164): n is a, c, g, or t
  misc_feature (166)..(166): n is a, c, g, or t
  misc_feature (176)..(176): n is a, c, g, or t
  misc_feature (188)..(188): n is a, c, g, or t
  misc_feature (201)..(201): n is a, c, g, or t
  misc_feature (214)..(214): n is a, c, g, or t
  misc_feature (217)..(217): n is a, c, g, or t
  misc_feature (231)..(231): n is a, c, g, or t
  misc_feature (238)..(238): n is a, c, g, or t
  misc_feature (240)..(240): n is a, c, g, or t
  misc_feature (249)..(249): n is a, c, g, or t
  misc_feature (253)..(253): n is a, c, g, or t
  misc_feature (255)..(255): n is a, c, g, or t
  misc_feature (257)..(258): n is a, c, g, or t
  misc_feature (266)..(266): n is a, c, g, or t
  misc_feature (302)..(302): n is a, c, g, or t
  misc_feature (317)..(317): n is a, c, g, or t
  misc_feature (319)..(319): n is a, c, g, or t
  misc_feature (321)..(321): n is a, c, g, or t
  misc_feature (330)..(330): n is a, c, g, or t
  misc_feature (335)..(335): n is a, c, g, or t
  misc_feature (340)..(340): n is a, c, g, or t
  misc_feature (342)..(342): n is a, c, g, or t
  misc_feature (349)..(349): n is a, c, g, or t
  misc_feature (352)..(352): n is a, c, g, or t
  misc_feature (364)..(364): n is a, c, g, or t
  misc_feature (368)..(368): n is a, c, g, or t
  misc_feature (381)..(381): n is a, c, g, or t
  misc_feature (387)..(387): n is a, c, g, or t
  misc_feature (396)..(396): n is a, c, g, or t
  misc_feature (399)..(399): n is a, c, g, or t
  misc_feature (406)..(406): n is a, c, g, or t
  misc_feature (415)..(415): n is a, c, g, or t
  misc_feature (447)..(447): n is a, c, g, or t
ncttccaanccagttttttttggggggtttcncnttttnttnaagccgcccgcgcagtttctttcccaatttcccttcccggggtcttgtggttttccgggtcccngggntcnaangggnatttcnaaatgancnaanccnancccccccccnaggggaatngngnttgggttggnttgggatgtttngcccttggtttcnggggttccccggnacngggtcccctttccntgggaancngggggggtnccgncnannccccccgnggggaatgtctttttaattggttggttccccgggcnatttttttccccccntngnaaatttggnggggnacccngnccccgcnggnggggggtgccgncccnccccggtttcccngggggnttttgccanccnggggtcngcgggtgtnggcttttgggcccccaaataagggccgtcccngggggggggggggaaatgggggagggccggccgtc

SEQ ID NO: 535199 - DNA, 1651 bp, Homo sapiens
  misc_feature (1602)..(1602): n is a, c, g, or t
cagaaattcttttatcaccatcatggtttcgtagccatgtttaaatttttgtcttttcgtgttcgctctatacaggaagaagtcagtatcaaagaaattgcaatcacacatcatgtaaaggaaggacatgaaaaggcagatccttcccagtttgaacttttaaaagtattagggcagggatcatttggaaaggttttcttagttaaaaaaatctcaggctctgatgctaggcagctttatgccatgaaggtattgaagaaggccacactgaaagttcgagaccgagttcggacaaaaatggaacgtgatatcttggtagaggttaatcatccttttattgtcaagttgcattatgcttttcaaactgaagggaagttgtatcttattttggattttctcaggggaggagatttgtttacacgcttatccaaagaggtgatgttcacagaagaagatgtcaaattctacttggctgaacttgcacttgctttagaccatctacatagcctgggaataatttatagagacttaaaaccagaaaatatacttcttgatgaagaaggtcacatcaagttaacagatttcggcctaagtaaagagtctattgaccatgaaaagaaggcatattctttttgtggaactgtggagtatatggctccagaagtagttaatcgtcgaggtcatactcagagtgctgactggtggtcttttggtgtgttaatgtttgaaatgcttactggtacactccctttccaaggaaaagatcgaaaagaaacaatgactatgattcttaaagccaaacttggaatgccacagtttttgagtcctgaagcgcagagtcttttacgaatgcttttcaagcgaaatcctgcaaacagattaggtgcaggaccagatggagttgaagaaattaaaagacattcatttttctcaacgatagactggaataaactgtatagaagagaaattcatccgccatttaaacctgcaacgggcaggcctgaagatacattctattttgatcctgagtttactgcaaaaactcccaaagattcacctggcattccacctagtgctaatgcacatcagctttttcgggggtttagttttgttgctattacctcagatgatgaaagccaagctatgcagacagttggtgtacattcaattgttcagcagttacacaggaacagtattcagtttactgatggatatgaagtaaaagaagatattggagttggctcctactctgtttgcaagagatgtatacataaagctacaaacatggagtttgcagtgaaggtaaattttttttatttaaaatgcaattcatacagttcttgttcatgcatgtcagtaccagttaaaaattacactccccttgttgttaaaagtgccttttgttataaaaaagttaaatatctggctagtgatcttcagagatcttaatctagaaccctgtgagctaaaggtaaggtggttatatatctagttttcccagagcagtagcagtttacacctcaagtgattttttttctttttttacctcaagtgatttttaaagtatctttttactctgagaagtccccattttatgctcanggtgtcagcaaattcctcaaaattgtgtgcaaaattttgtatgtttaca

SEQ ID NO: 535200 - DNA, 472 bp, Homo sapiens
cctaagagctctaacaaccatagttgtgcccgtgtcttacaactagaggcagtcaccagcttattccacgaggatgctgagaaatgtgtacgggcacttttttggttgtcatatttactacgggcttctgttggcatttaagcctaaagacactcacccctggttgtgcattggaaaacccctcccgatgaagaattagccctcccaaaatgtagattattttatttcaagggatagggcagattaccattagaagcaaaattaaaagtacaagctgggcaaactgacagaatactagataggagagactaattccaaccttctaaatttggctagtaaagtgcaataaaggcattgataagttctgttagctcaccatagcacttgtaaatcaggaattaataattgaatcagatttaagggctctgtcctgttatacatatttaaggcagaaaacaagttacatgtcgat

SEQ ID NO: 535201 - DNA, 232 bp, Homo sapiens
tagagggaaagcctggtttttttacacagtttaatcacaacgggagcactcatggctccccatacgcttccccccccgggttgaaggtggctcccatccttactcgcctagatcacggggcccgtcggaccatcccacatcccgcgtaaatcttgtgtgtcgtctagacgcaaagccatcaccccatccaactacgcgaggcacaaaagtggcccgaaattaaagaccagct

SEQ ID NO: 535202 - DNA, 729 bp, Homo sapiens
  misc_feature (489)..(489): n is a, c, g, or t
  misc_feature (530)..(530): n is a, c, g, or t
  misc_feature (532)..(533): n is a, c, g, or t
  misc_feature (538)..(538): n is a, c, g, or t
  misc_feature (563)..(563): n is a, c, g, or t
  misc_feature (574)..(574): n is a, c, g, or t
  misc_feature (609)..(609): n is a, c, g, or t
agcggagttggaggcaggcgctcgctgaggcaaaaggaggcgctcggcccgcggctgaacagggacttagcccgcagagatcgaccccgcgcgcgtgaccccacacccacccactcatccatctatccactccctgcgccgcctcctcccaccctgagcagagccgccgaggatgataaacacccaggacagtagtattttgcctttgagtaactgtccccagctccagtgctgcaggcacattgttccagggcctctgtggtgctcctgatgcccctcacccactgtcgaagatccccggtgggcgagggggcggcagggatccttctctctcagctctaatatataaggacgagaagctcactgtgacccaggacctccctgtgaatgatgggaaaacctcacatcgtccactttccagtatgaggtcaccgaggtgaaaggtctctttctttggggatgcagtcctgttccagccagagcctgttncgtagaaatcccagatggcttattacgctgatgggagcaangnnggatngttagcactgctagagtttgctgangagaagatganagtgaactatgtcttcatctgcttcaggaagggcngagaagaaagagctccactcctgaagacttcagcttcttgggctttgagattgtacgtccaggccatccctgtgtccctctcggcagatgtgatgttcatgggtatcccctggaccagac

SEQ ID NO: 535203 - DNA, 250 bp, Homo sapiens
  misc_feature (141)..(141): n is a, c, g, or t
  misc_feature (197)..(197): n is a, c, g, or t
  misc_feature (238)..(238): n is a, c, g, or t
ggacgctctcagctctcggagaacggcccagcttcctacaaaatgtctactgtacacgaaatcctgtgcaagctcagcttggggggtgatcactctacacccccaagtgtatatgggtctgacagagcctatactatctgngatgctgagcgggatgctgtgaacattgacacagacatcaagaccaagggtgtggntgaggtcaccattgacaacattgtgcacaccccgagcaatncacagagacagg

SEQ ID NO: 535204 - DNA, 312 bp, Homo sapiens
taagttccctccccttgccctccacaccccaaaagtccatggtatgtgtgattcaccactttgtgtccatatgttttcattgttcttctcccacatgtttgctgatgatgatggcttccagcttcatccatgtccctgaaaaggacatgatctcattcctttttatggctgtatagtattccatggtgtatctgtaccacattttctttatccagcctaccactgatgggccttggtatcggtttcatgtctttactattgtaaatagtgctgcaataaacatatatgtgtatgtgtctttaaaaaaaaaaa

SEQ ID NO: 535205 - DNA, 334 bp, Homo sapiens
tttagaattaacagctgcttcaatatgttattcaatgttaatgtttggctgtgagtagaatatgtaaaagtggcatggcagcacttatgctctgtgacagtattgtgtgtcatagttgagcagtagctggtagaattaggcagttggtgatagttttactttggtacaaataaaaactgtatttctatattccaattatttttaggtatttatggccacccgtattattgcaatgctttgttctgccactcaatggtacagactttattattaaaggaacttgaaaagtcctaagtcattgtaaatgtatgtttgtttttccactgggcttaaa

SEQ ID NO: 535206 - DNA, 837 bp, Homo sapiens
  misc_feature (284)..(284): n is a, c, g, or t
  misc_feature (597)..(597): n is a, c, g, or t
  misc_feature (638)..(638): n is a, c, g, or t
  misc_feature (640)..(641): n is a, c, g, or t
  misc_feature (646)..(646): n is a, c, g, or t
  misc_feature (671)..(671): n is a, c, g, or t
  misc_feature (682)..(682): n is a, c, g, or t
  misc_feature (717)..(717): n is a, c, g, or t
agcggagttggaggcaggcgctcgctgaggcaaaaggaggcgctcggcccgcggctgaacagggacttagcccgcagagatcgaccccgcgcgcgtgaccccacacccacccactcatccatctatccactccctgcgccgcctcctcccaccctgagcagagccgccgaggatgataaacacccaggaaagggaatgaactaaatctcagtctaaggaaacattaaattggattcaaaaaaaattgagcagatctaaagccctgttgggtccatccgaaaaanaaggtggccaatacagtagtattttgcctttgagtaactgtccccagctccagtgctgcaggcacattgttccagggcctctgtggtgctcctgatgcccctcacccactgtcgaagatccccggtgggcgagggggcggcagggatccttctctctcagctctaatatataaggacgagaagctcactgtgacccaggacctccctgtgaatgatgggaaaacctcacatcgtccactttccagtatgaggtcaccgaggtgaaaggtctctttctttggggatgcagtcctgttccagccagagcctgttncgtagaaatcccagatggcttattacgctgatgggagcaangnnggatngttagcactgctagagtttgctgangagaagatganagtgaactatgtcttcatctgcttcaggaagggcngagaagaaagagctccactcctgaagacttcagcttcttgggctttgagattgtacgtccaggccatccctgtgtccctctcggcagatgtgatgttcatgggtatcccctggaccagac

SEQ ID NO: 535207 - DNA, 645 bp, Homo sapiens
ggctaagtgcgtcagttgtggaggtggcggtagacgagttaagtcctggtctgcgtggaggtcgacgactccggtcgcagactacggacctgtctgggtctcagcctgggcaatagaccccgtccggaagtactagccggacatcatgagtggctgtcgggtatccatcgggagagctaaatccagcggccagggagaaggacggtgggaaagattcttcaagggatatggacggataagagatatggagtgctgaaaagaggtcgtcgtggctgggacttggaatgtggaggagtccaagggactggcggaatgatgctggggttactgattgtgatggaggaagaggggctgtagtgattgggttactattgaaggagtgttagggcctcggttcacgatgctggaaggagtgtagaggaggatagcaacgggaactggtcctcggggtcgctaggcacctcgggaactgacgcgccattcataacagcggccgacctggtgcaggaactagagggcagccgtgtgcctccgtatgaagaacgtggcatcccctacggggagcacaagctggcacaggagcacaaacggatccaaagagattacagccggggaagcgagagggaccgtggaccggaatcgcgc

SEQ ID NO: 535208 - DNA, 160 bp, Homo sapiens
cacgctcatcgtcatctcgcacgaccgcgacttcctggacggctgtggtctacgtcatctgtccacatcgacgatgcgcaagctcaagcgctattcgggcaactactcgtcgttcgagcgccagcgcgccgcccagctggagctggcgcagggcatgatg

SEQ ID NO: 535209 - DNA, 345 bp, Homo sapiens
tcgagacaggttcttgctgtgtcgcccaggctgaagtgcagtggtgagattatggctcactgcagcctcaacctcccagggtcaggtggtcctcagcctcccaagtagctgggaccaaaggctcgtgtcactatgcctggctaattatttttgtagagaggaggtcttgccttgttgcctaggctggtctcaaactcctgtgttcaaggatcctcccgcctcttgcctcccagctttcagggaggggagaggtgggaagataagctttgagcccagggagtttcgagaccttgcctggggcaattattagttgagattccctttttccacaaaaaaaggggagaa

SEQ ID NO: 535210 - DNA, 295 bp, Homo sapiens
tgaagaggcgctttaggctgctctaggcctcgtccatcataggtagcttttgctgggatataactacccatgctaaccctcctgtccactcagcggatcctagaaccagatgatttcctggatgacctcgatgatgaagagtatgaagacgatactctcaagcgtcggggacaggggaaattcaagggtaggggtgtgggcagtgtccgtaagaagctggcttgcttccatcctggaggaccgggataagccctatgcctgtgacagtgagtgcctcacaagtggggtgggtaga

SEQ ID NO: 535211 - DNA, 390 bp, Homo sapiens
  misc_feature (55)..(55): n is a, c, g, or t
  misc_feature (99)..(99): n is a, c, g, or t
  misc_feature (103)..(103): n is a, c, g, or t
ttacgcagctgacttgcctaaatcttacctgccgaagctgatcacaatacgcacngacttcccctccggcttccgtgcctgcgtcctctccggcttccngtcngctgcggtctcacaggcacaagggtcccctacctccgtgtctccggcacccagcggacaggaccagcggcagtgaccagctggtgactccatcagaaccttgcatgtgatcagtcacctggctgggtcctcacggtgctgccgcccactttacagatgagccacctggctggcacggcgcctcttccttggccaggattctctaaacctccctgttccatgaggctgattccttccttcttctcttccctccttcgttcattcatgggaaagtcagtgcgtatgggg

SEQ ID NO: 535212 - DNA, 445 bp, Homo sapiens
  misc_feature (48)..(48): n is a, c, g, or t
  misc_feature (51)..(51): n is a, c, g, or t
  misc_feature (156)..(156): n is a, c, g, or t
  misc_feature (187)..(187): n is a, c, g, or t
  misc_feature (354)..(354): n is a, c, g, or t
cccccgcgctgtacgaattctgcacgaggatatagggaggggagaccnccncgctgattgtcgcaagcgccccctcaaggcccccgtccaccctctacgccagacattccgagggtctcgcggtcgccgcccattggcgccgaggtccccgacgtnaccgcgacccccgcgaggctgcttttcttcncgcccacccgccgcgcggtgccccttgaggagatagaagcccccgccgcttacgccattatgtttcccgaagaggaacttgaccggtaccaacccgaacctctttggaagcggccgcctgtcctccccctgtttgagttggtcggggaatattgtaataacaccagnaccgaccgtttactataccttgtcccccttttccccatattgaagaggtttcccaattttttcagagccccccattttttttgtacctttt

SEQ ID NO: 535213 - DNA, 112 bp, Homo sapiens
ttctagatcgcgagcggcgccctttttatttttgttgctaactgctaaaaccattctcttccacctggtttacactgtaacattgggaaaaggaataaatgtcgtcccttat

SEQ ID NO: 535214 - DNA, 1203 bp, Homo sapiens
  misc_feature (959)..(959): n is a, c, g, or t
gaagcttctagacgatccggttgtgcgcaggcccgagtcaggtaagtgaacatggtcgatatgctggtatccgtaggagatcctggttcatgacgtacgtgcttggattctcaagctggttaaacacatggcccgggcgggaagcggacgcgtgctgagcgtaactcgagatgcgagtacgtgatggtcgctggactgggaatgtgctattgcaagcagggagatccaaaggcgaggtcgtcgagtggtcaaaaggttaacgtcgccacgcggccctttgcaaactttcctaaggaaacgtggtgacgaaatacgcatggcaaatggatctcgcgagtcgtacataaggaaagcttattccccagagatgagggacgtctgcttgtgcatacgctggggaccttccaccatttagcttgaagtttggcgccgcgataacttttgactctctgaatgcatattctcccctttactacaaatcttaactcgaccgaggtctgcaatgtgaagcatgtttccacaatggttaagcgtcctttgggactggggccttcccttgccgcatttgatcaatcgtggcggttcgcccagcttaggtaaaggtggcctttatcaactcgagaacattgggtcgcaatgatatacatctaacgctcatggacaatggggagtgtatgaccacccgttaggtgagattgcaaatgtgtacgtaagttatacttgtgtaccgtttgtacggtttgggttcttttctctaagtgatgagagcaatataagtgattgtagtgagtgtgccattgtgagacaggctggggaaagtggtgtgaaacacacagaatggtgtaaggcatactatatgaggttatattaaggatggcatggatactctagggcggttcagttcaatttatgtgtgggggtttaacgatgtttacacttcgttgactttgcggaccatntaattgttgtttgtgggcaaataccctgttaatataattcttggtgctacaaaaggagctatttagtgatagtggtgagggtaaattacagaaaaaaagtcgcgaaaattatgacggtgagaggaccaaagagattcaggtgtggttgagcccactttttttgagaggtcttgagtgaaagaagagcatgtgtatattaacgccacagaatattatgaaaaggcttatagggagtgggctaaag

SEQ ID NO: 535215 - DNA, 340 bp, Homo sapiens
  misc_feature (335)..(335): n is a, c, g, or t
gccacaagtgaatgcagtctttccagaatcaaaagcagacctcattttgattgtagtagcagtggagcacgcactcctggctttaaagtttatacttgcatttgccatacctgataagccacggcatatccagatgaaactagccagactggaatttgagtctttggaggcactcaagcagcagcaaatgaagctcgtgaccgaggaacctgaaggaggaaccaatgggaaagcgggaaggagaaggcaacctgagtgcccagcgttgcccagctgccctgttgggcagaaggcctgtgtctgtggccacacctgccacggtgggcaggtggggntaccc

SEQ ID NO: 535216 - DNA, 169 bp, Homo sapiens
  misc_feature (141)..(141): n is a, c, g, or t
tggttctaagtggtgagagagaaaatctggttactgtgttgatggagtcaggtctaggttaattttagttcaagggatgcctttggggaatttaggtggacttgaagcagaagaaaacagttaatggatttaggcttctgnctgctgagtctttgggttctttccagag

SEQ ID NO: 535217 - DNA, 240 bp, Homo sapiens
gttgggtcgacgggatttgttccgggtgagccgcttgctggcctgtgcaggttgtgtgtgtgatctgtatgggagtacatggctgggggttctttaacgcctatttacagtgtttctggcttgtaatgcctgcactttgtgattacaggcatgagccaccgtgcctgtccctcctttattttatttatttatttttgttggagacagaatctcactgtcacccagtgcttcagagtcctc

SEQ ID NO: 535218 - DNA, 260 bp, Homo sapiens
cttagcaaatcaagaattcctccatgaatccccagaatggcatgaatgtcgatcctgcttcgacaggctgtgtcttcctacagacgccggcggacgcttcacagtcacacacgctgatctctaaaggtggtcacttggactttattctggttatccatgagcttgacattgattttgtagtcacccacctctaaggccatcatttggcttcaaaagtgatatatgtcttgggcttgcgtcgttgtactgaaatggtccaa

SEQ ID NO: 535219 - DNA, 682 bp, Homo sapiens
ccccgtacaagcaactgaaaaccttctggagaggattcatcattctagatgccattaaggacatttgtgattcatgggagaaggtcaaaatatcaacattaacaggagttcagaagacattgacctcaaccctgatggatgatcttgaggggttcaagacttcagtggacgaagtaactgcagatgtggtggaaatagcaagataactagacttagaagtggaacctgcatatgtgactgaattgctgctatctcatgataaaacgtgaacaaatgaggagttgcttctaatataagagccacaaaagtggtttcttgagatggaaactactcctggtgaagatcctgtgaccattgttgaaatgacaacaaaggacttagaatattacataaacttagttgataaaacagcagcagagtttgagaggattgacttcaatttggtagaatgttccactgtgggtaaaaggctatccaacagcaacacatgctacagataaatctttcggaaaggaagagtcagttgatgtcgcagccttccttgtggtctcatttaaagaaatctctagagacacactaaacttcagaaaccaccacaccgatcattcagcagccatcaacagtgaggccagactgtcttccagcaacaacgactcctgaaagactagattatcgtagcatc

SEQ ID NO: 535220 - DNA, 704 bp, Homo sapiens
ttattaagagaggttgattattcattgcagctcagctaaagtacacagcttgcttacacagagagatgatatggtctatggacagttgtgttactaccaactaaaagcagtcattgcagacgaaaacaatagatggcctgctacagacaatatactaaccggataatgatataggagaagtagggataaagggggggcacatggctttatacagagctgatgagctaatgtttcgtccgtcttagagaaggctacggtaacaaaatgacagctgctctgaaatcagccggctgctcatgtattcctagagcgatacgtggtgacatttgatgtcttccagcttatatgcaagaattaaataaatgccgtacagatgttgatgataactaacttctataatgagagtttgacgccggcctgattgctaaagttcgggggatccgctaatcttggagcgttccctcctcggctggcacttccttattgtgtggacagcaaggtggctaagtttggagcccggctttttaattggacctaccctggtgcgaggggataattcggcaaaacgattaaaaattgcctcccggaacaaacgcaacttaagctttttaaacgaagagacttgttgtttgccgaatggatgcaccaaaacaaaatttaacttgagtttgggctatagttggcctgggtttcatttaaaaaag

SEQ ID NO: 535221 - DNA, 203 bp, Homo sapiens
ctgaactgtggtcatccatgctccctcggggctgccagtggcggctgatgttccacggcggtggcgatcagcacctatgaagttgggatatgtttttgtgatagctcctggtctctcttgcagtggaaattctcttggctcccctggtctctgcttctggaatgtggccggctggggttgcggccctagaagaggtctcagcg

SEQ ID NO: 535222 - DNA, 244 bp, Homo sapiens
  misc_feature (74)..(74): n is a, c, g, or t
  misc_feature (89)..(89): n is a, c, g, or t
  misc_feature (104)..(104): n is a, c, g, or t
  misc_feature (165)..(165): n is a, c, g, or t
  misc_feature (175)..(175): n is a, c, g, or t
  misc_feature (199)..(199): n is a, c, g, or t
  misc_feature (203)..(203): n is a, c, g, or t
  misc_feature (207)..(207): n is a, c, g, or t
  misc_feature (212)..(212): n is a, c, g, or t
  misc_feature (214)..(214): n is a, c, g, or t
  misc_feature (234)..(234): n is a, c, g, or t
cgagctggactcaagcgatcctcccatctcagccgtctgcatagctggaactacaggtgcacatcactgtgccnggctatttcgttaanttttttgtagagacnggatcttactatgttgcctaggctgggctcaaactcctgagcttcagcgatcctaccaccncagcctcccnaagtgctgggattacaagtgtganccgncatncccancngggactaacatttaataaanattaaatgct

SEQ ID NO: 535223 - DNA, 779 bp, Homo sapiens
gcaagctttgaacctccttccacagccgcatcttctcatgacacaaagcttttgataagtactttcctgtgggtcgctcagcgcctcatagcatctcattcaattgcaagaatagaggccagacacggtggcgcatgcctgtagtcccagctaactgggaggctgaggcaggaggatcacttgagcccaggagattgaggctgcagtgagcatgatcgcgacactgcactccagcctgggtgacggtgagactttgtctcaaaaaaaaaaaaaaaaacaatgtggaagggcagacagcaagttccctgtgaggacaccattcacaccagtgtgttccgtgttagccttaagtgtgttcttgggaaaaacccaaaagactccaaacccctttcaggtggcattgcaggacaaggtctccgcaaaaagggcattctctgtgttgcacagattagaacagccgaaaagcttggccagaaccctctcctgtgttattgccttctgtgccctttgttccgtggtgggtttagagggggtctctgcaccaggaggccaccttacgagccaggcacagttgaggcttgccaatgtttcccctttgagacacccgagcttgccttcttccccgagcttcgtgttcccctgtgtgtagttcaacctgtgccggtgtgggccggaggaatccttcttccctgtgggaattaagcagctccccgagcccccggtttactcaggaaaacaaccggcgccaaggccaaattgggaaactgtgccaaccccaa

SEQ ID NO: 535224 - DNA, 308 bp, Homo sapiens
ttttttttggaaaaaaattgctgtggcagtaattgcatgtggtacgataatagctcactgcagcctgtgaacctcccaggttcaaacgatcctcccattgtagccttctgagtagctggaactacaggcacacaccaccacgcctgactgattttaatatttttggtaaagatgaggttccaccatgttgcccagaggggtcttgaactccggggttcagatgatcctccctattagccttccaaagcacggggactacagatggtgagctactatgccgggccccgtgagctctttcttttaaccaa

SEQ ID NO: 535225 - DNA, 288 bp, Homo sapiens
ccaaaacaaaaaggggctttttattgaaaacaacttctttaaaacatttgcggggcaaatatcccatcataaattttattctgaattacaataaagggctgaatgataattccctgaattttttttagtccttttcacttattttaagtaaaaaaagccctttttggggcattaccaaatctgggattgaccgagtgtgagacacagagaaagaaaaagacaacgggaaagaaagagggggagaaagaagggaagaaggagaaaagaaaacgctcccttccagtaagg

SEQ ID NO: 535226 - DNA, 461 bp, Homo sapiens
agcgatatatcagacataatatgttctgaggctgcagcaacatggaagtcacataatgtgactgagttagccctcgttactctggctccagggcataacttgtgttctaaatcagccctgccactcactccctgcctgacctcaggcaaccactctaggcctccctctcctcataagtaaaacaggatggtgatcttcacttcaggagctcactgacaggactcagcagggctctgtgcatgccaggcagcaagagcacaaggaacggcagctctcttcctaatacaactagagaataaaggtggagcccaaggcggtggtcccaattccactggcagccttcaaggaaaaaggctgtgattttacttcagctacaccttccaaccttcccaggttccaacaatagtatcatctaaagataaaaagtactgaagcccaatacttacccttgtggttaaaaa

SEQ ID NO: 535227 - DNA, 523 bp, Homo sapiens
tacttttcacaggcactagcgtcatgttaaagactgggtatttaggtaaagaggatctggggctcgtggtgtatcttcactgatgttccatgcactgtattaaagcatagtgccctgaacatggagacccccaaatcctctatgtgccaaagattaagttgtagagaattacatcaatgtttgctgttggtgtgcaccacagatgagaccaagcttcctggtccggctaagtggaatcttccatgcactgtgcaccactcagctagaaagtcaactaagcagaaaggagataaggaatggctatggaatacctgacttctttatcttggttatgtgtccacaattttcataaaaataaataatacacattaagtcaaaatctgggctcaaatgtgtaacaagaaaacaaaaggacaacaatctggtattccggttttttttttttttttgggaaattcggctccaggtttgggccttggtcccctccactggcacaatctcaccatcattctgggagggctcc

SEQ ID NO: 535228 - DNA, 349 bp, Homo sapiens
cggtggctggccgggcacgaggtgctcctcacatcccagatggcgtgtcagctgggcagtaggcgctcctcacttcccagatggggtggccgggcagaggtgcttcccatttcccagatggggcagccaggtagaggcgctccccacttcccagacgatgggcggccaggcagaggcgctccccacttcccagacggggtggccgggcagaggcgttcctcacttcccagatagggtggctgggcagaggcgctccccacttcccagacggggcagccaggcagaggggctccccacttcccagatgatgggtggccggccattcaacgcctccgcggaggcgttgaat

SEQ ID NO: 535229 - DNA, 163 bp, Homo sapiens
tcaacctccaaatcacacggagttcaagaatatctcaaatatcgaccaggtgcggtgtctcacacctgtaatgccagcactttgggaggccgaggcgggtagatcacctgaggtcaggagttcgagaccaggctggccaacttggtgaaactctgtctctact

SEQ ID NO: 535230 - DNA, 467 bp, Homo sapiens
ctgatcagtgcttatgttatgattgtctgcataactatacctaaagtagatagccttgcagagactgtgaaatgtaaaataaagatggtatgctgcctgtcagctattcatcattaggaaagttttaacttattttactccatactagaaactgtaggagactatagaaccgagttagtttctaggacagtctgtgccactgcactgttgtgtatacaagaataggtgtacgaagcagagaacaattgtggtcattgatgatggaatagatgaattgcaggctttgaagtctgcagaattcaagaaagagagctgctaatgcatttttgtatcattattctagtactcacatgctttacactctaaagaaacattggggaataggggaaatgaaaggaagccagaagacggagtaccaaaacatgcaatatacttattcatcgtaaactgtctggagtatgacatga

SEQ ID NO: 535231 - DNA, 237 bp, Homo sapiens
ttcgtgcgggtgatctagaggatcccgacgctctctcggttggggggcaaggtcggcatttttaccggtattatcccattggatgctcaccacagttcggtgaaataggttacattattatccctatttttaaagtacacaatggttttaccggttctgaaaggttcttaaatttggtaggatttttttcctccccacagagagagcgtcccccacagagagagcgtcgggtaccga

SEQ ID NO: 535232 - DNA, 428 bp, Homo sapiens
aattcggcacgagggtgatttcaggggcacctctggcggctgccgtgatttgagaatctcgggtctcttggctgactgatcctgggagactgtggatgaataatgctgggcacggccccacccggaggctgcgaggcttgggggtcctggccggggtggctctgctcgctgccctctggctcctgtggctgctggggtcagcccctcggggtaccccggcaccccagcccacgatcaccatccttgtctggcactggcccttcactgaccagcccccagagctgcccagcgacacctgcacccgctacggcatcgcccgctgccacctgagtgccaaccgaagcctgctggccagcgcggacgccgtggtcttccaccaccgcgagctgcagacccggcggtcccacctgcccctggcccagcggccg

SEQ ID NO: 535233 - DNA, 889 bp, Homo sapiens
gctgttacaagcccagtgaccaatcagtggtcgccctgtcgcccccatgagcgtgccccgataagcgcatcggggtgggggtcatcgatggccagatctatgccgtcgggggttcgcacggtgcatccaccacaacagtgtggagaggtatgagccagagcgggatgagtgggacttggtgtggcccaatgctgacactaaggatcggggtgggcgtggctgtcctcaatcgtctgctttatgccgtggggggcttgacgggatcaaaccgccttatattcagacctgacgatgttagctacccacgagaggaacgcagtggcgaatgatcacaagcagagtgatacaccatccgaagcggggacaggaggctatgagtggtcacacgttcctggacgagtgtggagtgttacgaaccagtatacagacacctggagcgaggtgagccgaatgacatcgggccggagatggggtgggcgtggtgtcaccctgtggagccctgtacggtagagcatgattgagacacgtcagaactgtaccctgttgagggcatcttggtttcttgggcaatgatacagtccaaatgggggagtatcattgtgtggtacaagaaccggggctaagacagaatacgacgaggactgggagaataactcgcatctctccgtgagaagggaggcgaggatgtcctcagtgttagaattggccatctcacgaaagaagtgccgtaggcgggaatcatgtggccctcagcggagcccccggggggtgtccaaggaatgcctggctggacgggggggggggacaaggcgggttccagggagacgggccgcactttggccgggtaaagccgggcccttcaccatgcaggggcggccgggacatcggg

SEQ ID NO: 535234 - DNA, 584 bp, Homo sapiens
taaaaggctacctaggaaatacttcagtgaattctaagaaggaaggaaggaaggaaggaaggaaagaagggagggaaacagggagaaagggaaaaagatgaaaatgagaaagatgaaaataggaacaaataaagacaaacaacattaagggccatattgtaagatttccatgttaatgatctaatataatcactcagtgcaacattgagaatttttttttaatggcttaaaaatggaaactgaaagcaagtcatggggaatgaatactttgggcagaatcttcctgatgacttcttagctaagaggaggaaaaaaaggctgaaaaaatagggaggaaattttctttattaaaacgacttcaagtggataacaatatttataagaaatgaatggaaggaaatatgatccttcctgaaactaaatttgtatgttaaggttggaactaattgaatgtttttgcagaggaagtattttaaaaaaatttactttaaatcccaaggcctgattaaaaattttataggtttatcagaaaaagctttaaaatttaaaattggatccacaattttggaaagacaaaaaaatat

SEQ ID NO: 535235 - DNA, 518 bp, Homo sapiens
tggaatttgggaaaaaaccttttaattaggagtttcttaccaagttatgatttaatatttatcagatgtgtaaatatacatgatagcaattttaaaactgtgtaaatagtgggccttacaaaattacaacacactgtaaataaatccttcccacattttatacaaactacatggattttggatatacaaagattctggtttttatttacactggacaatggtcacaacaaagactatttacaatggcaaaaagttatataacccacaatttaccagtctggctacgggcagccactatagtttaggaggtagctttaattaaccgaacatgaacagaagccacatttcccaactgtggtgtctctaaaaataatttactttaagataaaaattcattatagtgcacagtatgtccagtttaattattaaccgtgcaactctagcgggattttttagtatattcagaataactaactagtggcaggggggttggcatactggattatagcacacggttc

SEQ ID NO: 535236 - DNA, 263 bp, Homo sapiens
tcatcagtcattgcaggcatcctcttcaacaatacaggcggtcatggtctaatacgcctcacactcattctcaacccccgtgactaaccacttagcctagcccttccttgtactatgcctatgaggcataattataccaagctcctagtctgcctacgacaaccagacctacaatcgctcattgcatactcttcaagtcagccacatagccactcgtagatcacacgagcattctcatcgcaaaccccctgaaggagaactct

SEQ ID NO: 535237 - DNA, 260 bp, Homo sapiens
acttagggatgagcacgcttgctttcatttccagttcgcactcttcgtgtcctcctgcgaccgatcagctggcgatggcccttcctatccaatccacagcaggtttgctaaaatgtcatcattctccagagtgtacatgacctttcttgatcatcctgttgaaaattgcaacagccgggcacagtggctcatgcctgtaatcccagcactttggaaggccgaggtgggtggatcacctgagatcagtccgttcgcatgtt

SEQ ID NO: 535238 - DNA, 105 bp, Homo sapiens
tgtactctctggattgctccaaccatctcccattgatgaccacccgccttcatacactctcacgttgggggacaaaaaaggggggaaggagggggcacgaatggc

SEQ ID NO: 535239 - DNA, 798 bp, Homo sapiens
gtcggtgctcctacgccttcatgctgccggtctcaacacccccaaactccatgccttctctactggacacttgctggtcaaagacatggtgcggacgggcctgctgatgaacctgatgggtgtcctgctgctcagcctggccatgaacacctgggcacagaccatcttccagctgggcaccttcccagactgggccaacacccatgctgctaacgccaccgcgactgcctccagccttgagcaacaacacagttcaaaccttctgagccctgctggggactttgttttaggctgggccttcttctccagaaggctgttgctgtcacttgctgctaggagcctccaagctgatcaagcaattctttcctgtaatctgataggaggcagcaagcaaggacatcctccagtggtttcctggagccaccgggtcactgtctgcaagcacctgtctctttctttctcatgcatttcaaagccagctatctcctgcactagctgtctgtggcctgtagaacaagcttgattcaccaagctggtctctggccaggtgcaaggacaagtcccacttcagccaccaggagcaaggctgaaatggcatggttttcacacctggggtcaggggtatcgatagtcacggctgcattggcttaaggtctctggaccagagacaggagagggctggactccaaagctctaggcaagaagtcacagtgttcgcagcagggtcgattctgcctctcttttaagcatctcctggtagaggatcgggcagaaagataagtcaatgcctgaggagag

SEQ ID NO: 535240 - DNA, 577 bp, Homo sapiens
catcacactcaatgccatgttttcttcgcctatgtctgcaatctgaaatcatgctgtgtctgtctacccagagcgccctgagcaacatggaaaatacgagatctattgttattagaaaatagtaaatagcaattgactttgcaaagaaaatccagtgagaaggattagattcatcttccaaggtgtctcatagctggttaccccattgtcattctcgggggatatccagtctcttgagtggctgggactccattacccactttccttcttacgtaggtccaaggccattcccaccaaagctggctaaaaaagccgacaccccactcccgagtctgagggttcatgaagatgtggacttttttttttgagacaagagcctcaccctgtcgcccaggctggcacaatcttggctcgctgcaacctctgcctcctaggttcaagagattctcctgcctcagcctcccacgtagctgagatcacaggtgcccaccaccacacctggcttattttttttatttttttatttttgtaggacgggttttactatgttgtcataaagaaggaaataaggtccgcc

SEQ ID NO: 535241 - DNA, 112 bp, Homo sapiens
tctgaggatccctacatgatgggctttaaaataaattggtacaataatttcctcattttttcagtgctattttatccaattttggctttatattggtgggtcagaacataag

SEQ ID NO: 535242 - DNA, 114 bp, Homo sapiens
cggagcttagaggctgcagtgcaaggcaagaagtatcagcacaggagaaagacgaaaggtggaagactcagcaaactagctcatcccaccttcttccacctgctttatacgagt

SEQ ID NO: 535243 - DNA, 431 bp, Homo sapiens
cccttccctaccctctccgaccaaatcttgagccattctatttaatctttcatttgagtatgggtctagccatgctgagtgcattgtcttttccctagcaggatcattgcatttgtcagcctcttactcccgtgggtcgagcaactcctccccagcctcccaagtaactaggacctctggtgtaaactgggctttccagccatttatatggtacaagtgtacagcctccaaagctactgggtttttccccccgtaaaatctcacagggggtattctcctggccctattaatagcatattcctccattcccttgggatgtgtttgtactttataatggaaaacctaatgtttttatttccccgaaactatggtagaattttttttttgccctcaaggggtaatgtataaagcttcctatcctcggggtaata

SEQ ID NO: 535244 - DNA, 238 bp, Homo sapiens
  misc_feature (67)..(67): n is a, c, g, or t
ggatggatagcacacaggtggtgcttcaaaaaggcaaccagatggcctcacttgcctcctggggggnacgagtcgctgcgctctggaagcgcagatctgttttacagtcctgagcaatttctcgcaccagacgctggaagggacgtttgcgaatcagaagttcagtggacttctgataacgtctaatttcacggagcgccacagtaccaggcctggaacgataaggtttcttcacccc

SEQ ID NO: 535245 - DNA, 211 bp, Homo sapiens
tgaccatagaggatccctaagctcccaacaagaaggtctgcattgaatctgagcacagcatgtacactctgcttgcaacctgaagaaaacaggaagactgtttcctaccttgtgcttgagtagcaggggctggtccccacagcccacagtatggacaacaggggcaggatgttgatcctccccgctgcttccagacagacctggggactag

SEQ ID NO: 535246 - DNA, 297 bp, Homo sapiens
ggggcagtatctctcacccagtctggagtgcaacagcgtggtctccgctcactgcaacctccacctcccagattcaaatgattctcgtgcctcagcctcctgagtagctgggactacaggcatgtgacactatgcctggctaatttttttgctatttttaagtagagacggggttttgccatgttggcccgaggcaggtggatcacttgaggccagaattcgagaccagcctggccaatgtggtgaaaccctgtatcactcttttaggcccttctgtcgtcttctagcagccgcata

SEQ ID NO: 535247 - DNA, 404 bp, Homo sapiens
cgccagaacggaacattggcctttgatggttaggatgtaagcccaatcgatttaagtatttccggttgtctcaaagggtagcgattcggtgggcaatccctgatcagttcaaacctgtaggtctaaactctatgtcacgggagctccacagcttatcactctccctccaaccaacactccacaagcaccatttccatcttccatagcatctcccacagccctctcactctccattcaaacaagcatgccccattacctctaatccccataccatgtctactgctgtgattcatcctctggatcttctccagtggccggtgtctccacaggcaccagtgctatgattgatggctgcacggaatacccttactggcccaaaccaaactcgtgccgaatcctgcagc

SEQ ID NO: 535248 - DNA, 324 bp, Homo sapiens
tttttttttccccttttttggccttggggcccattttttttccatgccccccttttcaggcagctttatttttgcagagcccaagccgggcctgtttaaatttccataaaaaacccttaaaggaaagtttgtgggatccctaggggctaaaaactggggacccattttttccatcttccccccaggtggggtttttggattcttgagaagaaaaaatattatggattttgattccttaaaaatgggaaatgttttaaatatatggatataaaggggttgctggattggggccaaaatgggtatttaaaatattaaaaaagttga

SEQ ID NO: 535249 - DNA, 115 bp, Homo sapiens
gggtgatctagaggatccctccatttaaaaataaggtacttagcatatctggtacttacagcccagtgattgttaggttatattttcatcaccatggtaaccagtgtggagagag

SEQ ID NO: 535250 - DNA, 580 bp, Homo sapiens
cctggctctgaacttaggaggaaccaccagtgacagagcagaaaatatatactgaagacatggcctttggagcttcaacttttccacctcagtatttatcttctgagataactcttcatccatatgcctattctccttatacccttgactccacacagaatgtttactcagtgcctggctcccagattctttatctccagaccagaagctcacctattaaacgttcgctgtcgacagcccaatgtaaatgactgctacctcatgaatcagctgcgagcactgccagatggagagagatctacacacagtctatagcacaggcgtcactccattgatcagagggcggacggtctggtgtcttgaggtcgtcagtgtagactgactggcatggggactacatcaggggatcggactagccgtcccttgatgcggcctctcatcgagcttcatactacgaatcatctatggagcttgcgaatacgctgcattctcagtattgccctacatatcaggaccagtcggcaacctattgtcagaatccgtaaggctttgcgatcaattcgaagtccagaactgaact

SEQ ID NO: 535251 - DNA, 110 bp, Homo sapiens
ctttttttccccctaaaacttttagtttcagctcagtgatcagctcccccagctcggcgggggagcggaaggcttgaatttttccgccctgtgagcggcccctggcccca

SEQ ID NO: 535252 - DNA, 204 bp, Homo sapiens
ttttttttttcccctgggggaaatcacccccgggggaaaaaaaaaagttttttaattttttttgttttaacccgggaagttttttattaggggggcctttcctttttagacggttggggggggtgatgataaaaaatttggggcccatttttaaaaatgaagggtttggttttacatgggaggattaaagctttcccttagcca

SEQ ID NO: 535253 - DNA, 165 bp, Homo sapiens
ctcctcaatcctagcttcatcaaacactgattcctggaatcctttcttcttctttcttcctagattcacttaatccacttctttttagcaccttggtcagctttcaattaattctatgtcctcagattttaaaaaataatctgtaactcaaagtccaattcaaaa

SEQ ID NO: 535254 - DNA, 128 bp, Homo sapiens
caagattctgcgacactcaagctcgaagtacgctgcagatacgccggagggaaaatcatcctcgacgtgtactcaacacggacagccgggtcgagaccacggctgcgggaatcgggatcaacaccaag

SEQ ID NO: 535255 - DNA, 125 bp, Homo sapiens
ttaaagccaatgagcatacgtggacgctgtgtgtgctgtggtaccccgacaacaaccacagccgtcacagtgtcctcctgacgtttggggcaccctgcgctcagctaccaaaatgtgccccgact

SEQ ID NO: 535256 - DNA, 820 bp, Homo sapiens
ggccctttggggtgcagcggctgtggtcttgggcgtagtgtgtgttccttggggcgttctctaggggtttcttccggtgggaggccccgcctctattgttgttccccgtttggtggtctggcggttgtacattctggtgggcgtatttgttgtgccgcgcggggtcgcgcacgtttgtctgcgggtgtttcccccccccggcggggctaaggttcttgttttgcgtgagcctccggccccgcacttcctccggggttgccccaatatgtgtacggtgacttcttgcgtcgcacttgctttgaggccctagggttcagtctgttcttgttgctcccgtatggtggcctgtctcggccttgtagttgccgagctcctcactagacattcgtactacacgatacgtactacgtgtgtaggtcacttccgcctattgtcctgatccattggggctgtatttgccctcattggaggcctcattccctgatttcccctatttctccgggttctccctaggcccaacctgtcgcccagatccctgttcgactgatcatatgtgatcggcgtagatgctgactttcgtccgcgccacactttttcggcctatccggatgccccgacgttactcggggctatccccgatgcataccccccctggacatcctatcatctgtagggtcattcatttttctgacagccgtaatataaattttcagaattagaaccttgttgaaaggaaaagtcctaatatagaaaaaccctccataaacctggaagaaaaaaaggaagcccccaaccaaaaaacaatagaaaaaaacccaca

SEQ ID NO: 535257 - DNA, 302 bp, Homo sapiens
atatgtgttgttgctggtgtgtgtgtcatgctacacgtttatcccctgagcgcagagtgactgatgccacatccgaattgagttggctgtgctgagtgacgatgttgcccaattcctggaccacaatagtgtccttctaatacctaaaatggctgggcacccctccagcacacggggactagagattgtcgatgtcgcggccacgagtttgcccaccgatgcgggccccttcctgaagattggtcacgcattcccggtctttgtagtcatagaagttacacttggcgcgtacgggccatcag

SEQ ID NO: 535258 - DNA, 355 bp, Homo sapiens
tggccagagagtcagacaagaggaatcttgataggataacatgaaaaataaccacaatgtccatgcatatgtggcacactccctgtgtggttaatttaattgaaccatgaaagacaggatgaccttggaccaaggccaaacttgtcctccaatgactcacttaattgagtgggcatgtgatgtcccatgtggaaatgatgaaccatgccaatgcttgaaacaatgacaagaatttgaatgaatgaagattgtatgccaccacatgcctgtgtacctcaacccaaatggatgatgaatgaatgccaatatgcctgatggaaactatgtggtggtgattggctgacacttgtgttcc

SEQ ID NO: 535259 - DNA, 1322 bp, Homo sapiens
gatctcctactcctcattgttcccatttgctaatcgcaatggcattccgtaagtgcttaccagaacgacaaattctaggctatattacaagcatacgtccttcggcgctcaacgttgtacgcccctatcgggcgtactacaacccttcagtgctggacgaccattagaaactcttcacctaaatagagcccctaaagacccgacgacatcttaccatcacccgtgcttacatgcatccggtcctgactcgttaactgctcaccgatcgtgtcttctattatgaacccccctccccatactcgcgaagcccgctggtcgaatcgtcagacgctaggcgctcctatttattgctatgcacaccttcttagtctagccgtcgactcaaatccgtctggtcagggttgagcagtcataaggtcaaatctacgccctgatcggctgcagttgcaagatgcacaatagggaccgcatagatacatatctcaggtacctcagaagtccaccggcgtagggcgcactctagttactgaaggtagtgcacaccagttaactacaggtaacgttcgagcctcccttttatacactcttccaagctcgttgagtcataaaagtagcatacgaatcacccttttcttgaatttgacctcccgtagaccctagtcgatgtacaccctttggctcgagtaacatatggaatgtgtgatctgctcacccacatgagacaaggaagaagtcgaaatccgatagacacaccctttgcggaacgcatttaggcccgaaagagtgtgaggtgccagacacgtaggtctctacggtcttccgaaccgattcgaagagtctcggcccggcaagagcccaccgtttccggccctcttaatgttccttctagtaggcaccggaatcttaccaagaaaagagggaattcacttcatggattaaataaatcttccgcatgtacaacctcgaagtaaacaaattcctttcccttaaaggaacacacaaggatttgattggaacggccaccattctttcctcccttttgaaattcgtctaaccatcttataacaataagttttctgttcaccccataagaaggcccttacctttcttaaagccgttcccccatcttacatttatttgaactttacacaaaacacagggaatacactcccccgaattttcccgcttcattgaaaccccagatctatcattaagctccttcctttaatataatataaaaatctttccacttagaccaggttcaacacaccttaaaaattttcaccgttcatttgttagacatcactcgcttctccccaata

SEQ ID NO: 535260 - DNA, 156 bp, Homo sapiens
ctcgtaactaacactgacacgaacaacgaagtagctgcacgatccactactgtcctctcaatcaggagctgtataagccatcataggaggcttcatacactgataacccctattctcaggctaacaccctagaccaaacctacgccaaaatccatt

SEQ ID NO: 535261 - DNA, 137 bp, Homo sapiens
gcccccccctttgggggcccaagtcccttccaaaaggccctggtcattgggaattgggtaaacccctttggggataaggtgggggggctaaaaaaaaaatttatattgtaagattaaactgacttttttggccttta

SEQ ID NO: 535262 - DNA, 167 bp, Homo sapiens
  misc_feature (3)..(3): n is a, c, g, or t
  misc_feature (14)..(14): n is a, c, g, or t
  misc_feature (42)..(42): n is a, c, g, or t
  misc_feature (68)..(68): n is a, c, g, or t
  misc_feature (110)..(110): n is a, c, g, or t
  misc_feature (113)..(113): n is a, c, g, or t
tantattattctanttttagataagtcagaagtgcagcaaantgtaacccatattggtatacacaaanctggtaaggtaattcggaaaaggacagagggaaaattaccanacntcaggagaattaactctgggggaaacagggagtgtcaagaggggacacacagag

SEQ ID NO: 535263 - DNA, 892 bp, Homo sapiens
gacgttctccaggtgaccggggcggaatcgctatctccacacttctcatctagttgtcacgaagaacagccttggtatctggtcaggtgaatgacaaccaattggaagaagatctgtgtggttacaccaggagtatgggaaaaggttgctaactggccaagggacaaatacactgtcgacctgttggatgctgggaaatagccagtagcgcccacctgttagatagggaaagctgtaaattgatgtcctgtgaataccctggttaacaagctgttggctctggagcagagggaacctcctttgactgtcccgaagggaacatggacagatcaggtcacactgcatggaatacaatgggctcgttccatgcagcctgtcatcctcatgtccaagtagagctgttgaacaatatggaaagccacgttcacagatgagtgaagggcaggacaccgagagatagcctagcaacgtggggtgtgtaccagccccatccgaagtacggcagtctggacactgggcaactgcctccaggtaaagggactcctcttgattgctgcatcatgtagagaagcactgaggcttgtgaggacggtaccaggtggatccagatgacggcctctggcgtgtgaaatccaaattccaagtgtgccccaggcacttaatctctagtatagagtggacatcctgtgggtggtttgcagttcaggctgccatagtgagcgccaagaagggccccctaatgtcttaatgctggagtcagcggttccctcaagtggcgctgccctgtgcggcatccctcaagggtggaaccgggaccaacgaaataccaggatgcttgagtccctctgatagtggccgggacgtctgaatcctgcattcggttggccaatgt

SEQ ID NO: 535264 - DNA, 405 bp, Homo sapiens
tcgtgtcgtgatcggcattccctcactgttcaccctgcagtcttctccctcactgttctcctcatcctagaggagggtctctcactcagactcactcactcactcacagactcacttatatcccactctcaatctcactcactcagactcactcacgatctcattcactcacagactcacgatctcactcacgatctcactgactcactcacgatctcattcgctcactcacagactcaggatctcacgatctcagtcacgatttcactcatgatctcactcacaatctcacgatctcactgactcatgatctgacaatctcacgatctcagactcatgatctcacgatctcacaatctcactcacgatctatctcacagacttatgatctcactatctcactga

SEQ ID NO: 535265 - DNA, 404 bp, Homo sapiens
ccaaggggggccacaaaacattctcctttttttctgaaggttttacgatgcattgttatcatgagccagtcttttactactaaacttaaatggccaattgaaacatacagttctgagaccgttcttccaccactgattaagagtggggtggcaggtattagggataatattcatttagccttctgagctttctgggcagacttggggaccttgccagctccagcagccttcttgtccactgctttgatgacacccaccgcatctgtttgtctcatatcacgaacagtaaagcgacccaaaggtggatagtctgagaagctctcaacacacatggtcttgccaggaaccatattaacatggttagcttcaccagacttcatgattttaggccatctttcagcttt

SEQ ID NO: 535266 - DNA, 329 bp, Homo sapiens
  misc_feature (10)..(10): n is a, c, g, or t
  misc_feature (58)..(58): n is a, c, g, or t
  misc_feature (220)..(220): n is a, c, g, or t
  misc_feature (226)..(226): n is a, c, g, or t
  misc_feature (231)..(231): n is a, c, g, or t
  misc_feature (236)..(236): n is a, c, g, or t
  misc_feature (305)..(305): n is a, c, g, or t
cagctggaanccccggaggggacttcccaggtccataggtaggtaagagaaaaatggntgcattcttttgagtttcctgatgagcctctccaaatgaggcaatcagatatgcatttatctcagtgagcagagtggtgactttgaatagaatggaaggcaagtttgccctaagcagttcccagcttaactcgtccctttagcttagtgattttggggcccnaagatntattntcctntcacaatactataaaacatgttaatgcacctctattagttaggtccttttgattgcaagcaacaacctnccccaattcaatatagcttatgaa

SEQ ID NO: 535267 - DNA, 877 bp, Homo sapiens
caaggtacagctcgggccgtggctgcagagggtgcaagcctcaagccttggaagcttctatgtggaattcaacctgtgggtgcacagaagtcaagaactgaggcttgggaacctctgcctagatttcagaggatgtatggaaacgcctggatatccaggaagtttgctgcagggacagggccctcatggagaacctctgctgggacagtgtggaaaggaaatgtggagttggagtccccacacagagtcccaactggggcaccacctagtggagctgtgagaagagggccactgtcctccagaccccagaatggtagatccaccgacagcttgcacatgtgcctggaaaattggcagacactcaacaccagcccatgaaagcagccagaagggagggtgtaccctgcaaagccacaggggctgagctgcccaagaccatgggaacccacttcttgcatcagcgtgacccggatgcgagacatggagtcaaaggagatcatttggagatttaagacttaactgccctgctggatttctgatttgtatgtggaccagagcgcctttgttttggccaatttctcccatttggaatggctgtatttacccgatacctgtacccccattgtatctgggaagtaactaacttgctttttgatcttacaagctcctaggcgaaaggaatgtgccttgtctcagatgagacttttggactgtggacttttgagttaatgctgaaatgagttaagactttgggagactgttgggaaggcatgactggttttgaaacgtgagaacatgagatttgggaggggccagaggcgggatgatatgggttggtgtgtcccaccgaaatctcatttgaattgtaactccctaa

SEQ ID NO: 535268 - DNA, 371 bp, Homo sapiens
tgctgcttctccctcggccttctgagtgtgacaatagcaagagtctgtctcagatacgcaaaataataaagataaatgtacagatcctgccctccttccctgccaggcctgggacatttctatgggcagggaagagagggaaggaagggcaagaatcccaagagtcacttgttcattgaaagcaagagaagacctcaatcagcccgtggtgcaagacagttctgcataggacggggtgtaactgggctgtcgcagcatcaccacacctggagacctctgggggccagagtgggatgggacacacgctttagggggaaccacttccctttggcaagcgaaaaggcaagcatagcagatgggctgaggggacg

SEQ ID NO: 535269 - DNA, 114 bp, Homo sapiens
gctgcacagaaggttgggcatcaaccaggcagtccgcctgaaaagaagcttttccttgttaattgggttgtgtggacagagtgagagaacctataaaccacaggttgctgaaag

SEQ ID NO: 535270 - DNA, 250 bp, Homo sapiens
  misc_feature (23)..(23): n is a, c, g, or t
  misc_feature (25)..(25): n is a, c, g, or t
  misc_feature (38)..(38): n is a, c, g, or t
  misc_feature (69)..(69): n is a, c, g, or t
  misc_feature (78)..(79): n is a, c, g, or t
  misc_feature (122)..(122): n is a, c, g, or t
  misc_feature (143)..(143): n is a, c, g, or t
  misc_feature (188)..(188): n is a, c, g, or t
taaaacattagtatgctacagtntnatatggcactatngatgggagtcttacacaactagtactttttntttaaagtnngtggctgagttccagaaaactaaaattgtccttatttggtcantattacaattgggttatattngattggttcagcacaaggaagactcaggtttctcaaaaataatanagcagaggagtgaaaatttctggagttggccaggtgacatgagaggggccacatggcgaaag

SEQ ID NO: 535271 - DNA, 1216 bp, Homo sapiens
ggtctgctatgctttcggttcgactgtcaacatgacgcacgtgatgcgctgaggtccagtggagacgtgacaattagaggttcccaagatgggtttggcatggcccttcgtaggcagctacattactcgagcatgggactgagacaacgaggagcagtggacacagcaatgagttcaaacaaagagcaccgtaggatccgcagaagtaagggccggacacatgcccgggcgacgccagcagtcaggccacgaagcacgccagggatccgagagtgccagtcacagcgagcaagtcgcagctgctgcggccataggtttcgcgtgcctattacagaaaggtagcgcagctgaactgtgggtatttagttccttgtaagtggagcctcagtgagctgtgccgtgttcatgcgttccaccaacaagaggtacggtgacctactcaggatcatgacttgatggattccttgtagtggaagcaggaaatcgatgtgtccagcggtagtactacggtactaagtccgaagcggttgacgaaagtctcatgtaagggtagcttgcccgtatcgcgaaatctcaagtcctttcgtttgccccacggtaaagctccttctgggtcccctcggaataagtgcgaataacagattgctttgccttggataggaacctgtcattctcgtgtgaccaacccagggtgtatccgtgtaccgggatctatgaccccggtacctggaaacggtcctaatacagaaaggggacgaaaaggcctcggaaatcagtccactgaacgacagcaggaagcaattttcaaaagggcgtaaccgcgtaggtcttccgtaatgtgccgtggccaagcggcaccgagcgtctttccggcgcgataccgggcacacacagagcccaaggaaagggcgcaccaaccagggatgatgaacgccaagaaaattaaagccctcctgggagacttgaagtcacaacgtgaaaacaaagaggccgaggagagtgtgagaaatgaggggcgaagagatgacagcccgcacccggaggaagagcacccccaatacaacaacacagatacaaaacaatttaacacaaaccccagatgtcatcataaccaacttccagccgaactacaaaacaaacctacataacactcacctctaagacagaacgacacacaatagcaggcaacacaaacactacagcaaaatataacacc

SEQ ID NO: 535272 - DNA, 333 bp, Homo sapiens
gaagcgcttgttgggatagttaagaaacgctgcctattggatggagggagaggcttagtgcatgaagccctattactttgcaatggggcccttcagaagtctgctgggctcagcaaggctcttagtcagtgcttgagagtgagccatttcgacagagatactcgcccagacccaagcctccgggccaaccagacctgtggaggttggtcaggtggtcacccatcttcttgataagcttcacttcctcatataggaagtgagtctccaggaagtcacagagatgggggtccgtgcgggcagaacccaggacatgaagatccaacaagcgcctgg

SEQ ID NO: 535273 - DNA, 524 bp, Homo sapiens
cccttttgtgcctgtgtccccccgcaatcattgggtccaaccatgctgccgcgaagcgctttccatcgctttacccatcgacgagcctccccaactgggtgaagttacatctgccacctgaaaggccgatttaccaccgccacgaaggccttactccttcaccgatcgcggtatatcctgaagagattcaccacgggggttgcacacagtaccgtttgtgacaggccataaaattgtaacaagttcttaatctaagggacttgctcctgatcttcctgaagatctctccccattcattcagaacccacttgctgttcgaagcatctttaaaggcaccacaaggataaggatgctaattccctctgattcttatagagagcgcggattccaccccttgggtccgatattattagacccagcggagtctctccccctccccattggaaatatgaatctatttaccacgcctctgccccggtcccaaaaaatttctgggaccccacccaaaaaatggttttttacca

SEQ ID NO: 535274 - DNA, 136 bp, Homo sapiens
caccggggatagggcacaggttgtctggaattctgtcaggtcaacattcaggctccatcaaatctcaggtaagcagtgatggaggacacaagtctggctaataaggcggttaaggttagtgtatggtgaggctttg

SEQ ID NO: 535275 - DNA, 158 bp, Homo sapiens
cgcatgtagggctgagtctcaggctcaggcacgtaattcacacaatctggtgagataaaggcagacctttgcatatgcagttttcatcaatgtatcttctccagctatgtccacctgctcaattttccataagcaggtcgcaagcctcatgctctgca

SEQ ID NO: 535276 - DNA, 352 bp, Homo sapiens
  misc_feature (94)..(94): n is a, c, g, or t
  misc_feature (97)..(97): n is a, c, g, or t
  misc_feature (174)..(174): n is a, c, g, or t
ttggtttgggagcctcctcccctccccccagggggcaggggtaggttccccccccttggcctaaaaaaaggtccttaaggggggggttcaatanttntacccccccagcccggggtggccttccccccttggggaattttcccagggccccctttttggccttttttaaaaccncaggtacctggccccccccctttggaagggggctgggtttccccagtttccccatcagggggttcctggcccccctgtccaaacccccccccaagtttccgggcaacgggatcagggtccccctgggggttccacataggggtttttttccaaaaaaataaagtgaatttagggtgga

SEQ ID NO: 535277 - DNA, 1935 bp, Homo sapiens
  misc_feature (71)..(71): n is a, c, g, or t
  misc_feature (76)..(76): n is a, c, g, or t
  misc_feature (204)..(204): n is a, c, g, or t
  misc_feature (209)..(209): n is a, c, g, or t
  misc_feature (225)..(225): n is a, c, g, or t
  misc_feature (235)..(235): n is a, c, g, or t
  misc_feature (239)..(239): n is a, c, g, or t
  misc_feature (271)..(271): n is a, c, g, or t
  misc_feature (280)..(280): n is a, c, g, or t
  misc_feature (282)..(282): n is a, c, g, or t
  misc_feature (359)..(359): n is a, c, g, or t
  misc_feature (573)..(573): n is a, c, g, or t
  misc_feature (769)..(769): n is a, c, g, or t
  misc_feature (936)..(936): n is a, c, g, or t
tctctgtgtcgtgtccgtgtttcctgtgtcgacatgcgtgcgcacacgaaggggtttcccattgccttttnaggcnaagaggcgtatgcccaataggtcggtgactaaccttctccagagccgatagtaatgtcgctagtgagtcgaatggctaagtgctgtatgaagtgccgccgtggtagcgctgccgagatatgcctgatntgggncagcagtaacttggcntgccgagatnccgngtttaagaagtcgtgtataagcgcgggtcctngacgtgttntntgttagaggcgccggtttatagttgcgccgctgtcgcgcgcctgattgagataggttttgcccaagtgggtcgcccngtctttgatataagacggtggtgcccaaatatggatgcgcctcgccgtcgtgccgtccaaggaagctgggggcacaaaatggtaaaggccttttggtacactagcgcgtgtggggctccctgggtgtgttatgtcgccgctgttgtttgaaggccatgataagagccgctaagaggggtcgaaggaatgaaagcgcctgttttaaacgaagcgncttttctgtgggcaacactgggctgataatgcccagaagatttttgctgttggcggtcacaccgaacagtgaaagtgccgctgcccgcccctgatattttgtgtacgctgtgggagcgggcccggagtgcagggtcggctttctcgcttcgttgacgattactgtctggggtaacacgcaacggcgcggccaaacncccgtgtcgtggcataaacactacgactggcaaaaaacgggcgtcgggcgcagactataagcccccctttttgtgggccgcctgacaatgtgtgctccccggtgggtctccccaacatatactgagtcgtcgagcgacgacaacacgtttttcgcatctatcttgcnctgttacacgctgaaccgggctgttcgcagtaccgtttacctaatcagggcctgcggtcctggtcgcgatacactagacatagctgatctaacgcgtaaactggcgggcccgcgtttttatagacgacgacacgtgcagcaaggccgctgctgtattatgcagtgactgatgtgcctcctcccccccctgttcttggtggaggctggccgctatcttacagtcacccgtactacactgcgatgctactaactaccgccgggacgagacacaaaacgcggggcgatttttggggggcaggggacaagaacggcttttttatacagtcgcccgtgcggacgaaacacagcctgcgcgctaacaaactcaagatagtcgtaaagtcgctttttttttcccccgacaaaatcgatgcccgtggcgctctcttttctgggcggcggagacaatcagccacgtactgacacaaaccggtggggcgcctcccgagagtacaaatcgctcggggtgcaaaaaatacacgcgtttttttgcgcccgtattaattaatatagaccccgcgcgccgccacaaatgcgtgcgtacatatacagagacaatcgctctttttcccccccgcgtttattgggggggggccctctttataaaggacgagagacacgttatttatcctgctagcgggcggggcagcaacagctgcatcagtgcgcaaaagccaaccacaagccgcttttttggggcggagcctatctatatacgaattcgagggaggtacctggcgcacaaacacacctgggggtgacgtgtcgttcactacgcactaccacgcgcggcaccgactcagacatgccacgacagcgagctgtttttcgacgtcagtcgcattaccccgatgattaatagttataaaagaagcgccccgtcgaaacgagtttttttttcacgtccagctacgtatggagagcgacggggcagccacaacacccgttgttttcccccga

SEQ ID NO: 535278 - DNA, 1023 bp, Homo sapiens
  misc_feature (1023)..(1023): n is a, c, g, or t
ggcgagcctatggcattgatcttcggctccgtgtacgtcagctgcctatatgtggcacatagaaccacctagccaatgccatcctgattctctgtgtagcatactgtcggaaacgctagggtctcccgtggtggcgtgtatgcttgctcatttacgttcatccaatatcgtgcaattgcattggtgttacacttacttgagcgtacactgcaacatgcaggtcacccgaggtgctacaggaagactaggcatgatacgcagcggcgtggtcatgcgcgattacgagtaacgggcttgtcgcagggaccatacaggataggtgcgcctatcgtatcgcgcgtagcgcaactcagttggaccgctagacgttgccgtggagaatatcgcatagtgcaaccagagcggcctgtagcatttgaacgcttcagagcgccattggagcaggaatacgcgatgaatgcccttggacgaagcaccgacctagtgtttgggcttgcgtggtgaccacccgaacggtcaaggctggtgagtgtgatgccactccagttagaagtggccccagggtagaggcacttggacggtgcacacattggctttgagccatgacctagggtgatccgtaggtggcacctacatagggggaaacccaagcggttacggagccggaacgaggcctttgaaaacgtaataggccgtgccaatcgattgccacatggcggttaaccaagaggagccataagatactgaggctaggagtcccctttcaggtcccgggaggtccaattggaattttgagagcttgaatggcggtgcacctttggggcaacgattcgctaagcctatgtcagaaaggctatcgaaaattccaatcctaaaaggacgttcaatttagcctagccgtgtagaatccaaccgttgaaaaggttacccccaaatccctgaagaatgactcagcttttggtttggcccggttccaccggaaacgttaaagcaagttgggaacgcggaatggaggaccccttn

SEQ ID NO: 535279 - DNA, 1201 bp, Homo sapiens
catcaccaattcgtgctggtggctgccctgcaaggcctgcaggcatggatgaacattcttggcaccctgtgctggatgtggatctgctgtccatgtgctgtgagcttgccccatgtgcctgatgtgaatgtgagtgcctgctattgcactgtgtgctacaaacgacgttccagcccacctgctgtacaccttgcgaccattgccagtgatgacacctgtggacagtgccacctggttgaggacttataaggaatctacacaatgggtacaatttgttgtgttgtgtgtgtgatccattgtactgagttgtgggtgacactggaaccatttgccccgtcaaatactagaactcaccggtgttacagatgccaaaaagtggagcaaacgcatatcatggcacgtacagcggaaactatcagcaagatgtgacaccaacccccagtatgtgcggccagttgaggaacttgtacacgactgcaattgcggcacacgtgggaagtttcattgcacagcggtttggccttggcggtggccaagtattccccccatttaccatggctctaatggacaccgcagcatataatggcggaggcaactaaacccagggaccttgatgagaccactgtggaacagcacatgatggaattccacaagacatttgtgccacttatgggccgagacttcaagaaccccccgttaacgccggatcaacgctcaaggcacaagggagggcaaggtgacagtgaccgaagaagggtgacaccacagaattaccaaatgattcacaagatatctgggtgacattaccattatacacgagaaaacccacgcataggacaacgacacgtggtgaaagtatgggacttggtgggcacccaacacatctcacatttacatagtggtcgaggaatacaaaccgaacgattaagaccgcacaaaagatggggcacacaaatggactgttgtagggcccattagggatgggcacccagtggaaagcctttggggccacccccccaatttgggaaacacacatgtgggtggcaaagcgtcacagcaagtttggtgaaagcccccaccccatttagtatcccacaaacggcatctgggcagatatggacgccagttatttacacgagatacaggatttactacccgcacacgattcattgtggagcctaataagaggtggagttttctc

SEQ ID NO: 535280 - DNA, 299 bp, Homo sapiens
ttttggcccgggggcttttttttttaaaaaaaaaccaaccctggggaaaatccccccgggaatttaaaaaaacttaaaaaacccttttagggcttttgggggggggatttttatgggggggcccgcggccccccggcccctttttggaaaatttaattttttaaggggtttttaggggggttaatttttgggggcccagggaaaggagggttttaaaaattaattagggatttttggggggaaaaccccccaagggtttttattagggcgggggtttaattaaagggttttaacccgga

SEQ ID NO: 535281 - DNA, 260 bp, Homo sapiens
cgttaggtgagctagaggatcccattgcacgaccaaggagctaaaatcacttgaaccaggaggcgaagtttgcagtatgctgatatctgcgccattgtactccagcctgtgtacagagcaatactcttgtctcaaaaaaaaaaaaatttcaattcagggggaggtgaataagacattccggtttcctttttattcggaattacacctagatttaagctcctttgtacgttgccaattgggttcccggagctcaaattcgg

SEQ ID NO: 535282 - DNA, 144 bp, Homo sapiens
agtgacatacatgagtggtggctgcagtaatgttagcggttaggcgtacggccagtgtctatggttgaatgagtaggctgatggtttcgataataactaggctggatggagtgcagggatgtgatcacagctcatgtcatacat

SEQ ID NO: 535283 - DNA, 281 bp, Homo sapiens
ggcccgagtttagtcaatgtcctggccatctcagtgaatcttcacatgggcatctgccctcctggtgttgtgtggtgtggccctcaaggagctccgctgcctcctggagcctgtatatttgggatgctgctgctcctgttttgccacacatgatcaccctgtggaatcctcatctccactcagctgggcccagctgtgagcgaaggcttgctgggatctgtctgtagtagaacaacctatccataaatgtactgtgcaccaactccctgagtgacgacctg

SEQ ID NO: 535284 - DNA, 1011 bp, Homo sapiens
gctgccgcactgctgctgctgctggctgctgctgctgctgctgcacagaatcgtcgcatcccccagccgtgcgcgtcgtcgctacctcctcggacagaaatatatgaataagcatcagaagccagtgctaacaggccagcggttcacaactgcggaaaagggatgaaaaagagaaattcagaacccacagtcttcaagggatacacttgtccaggagcttaatgaggctggtgatgactcttggaagctgtagccaaatttctggactctacaggctcaagattatgattatcgtcgtctatgcagacacactcttctgatatcctggtggcgtaggcatggtatgcttgcgcccgtggaggaacgctgcatagatgatggtgacgaagaccaagatgaccaaccactagtgtgttttcagcgaatgaagatcatgaaaccatccgaaactatgctcacggtcttcaactacacactcagtcaggagatataacgtactccgcgagaacggagtcggggatccggtgagggtggctttctccggcttccttagaaggcttgccgaggcagatcagacccagttggcgatgctgtcggggatgctgctgggaaagtgtaccctgccgcgcatcatcacagtctcttcgcgaagttagtcaagaacggattgcggcctttttgtgtcacgctctcgacgctgcgtggcgaaaaaagatgccactccgttacttcgtcttctgcgaaagcacttacacagggtgctgaactcttccgtacaaagaatggggtacctgccaaactcccgaacccggctaacggatcgagtctcgagcaccgtcctgcgacagaaatagtatggtcacaggttttcgatccgcaagagtgatctcaacaaacggactcacagaggagcgccgactcacacatcggacgagactagactcacacacagtggcacacacacacccaaacaacagctcatctcactcattgactcgccatattcggagc

SEQ ID NO: 535285 - DNA, 665 bp, Homo sapiens
gcacgaggagagagagagagagagagagagagagagagagagagagagagagagagagagagagagagagagagagagagagagagagagagagagagattaatatgtgatgtatttatatttttagtcctgagattgttacttattttatataactctgcttaattattttccccaatatatatatgacctccttaccccctctactgactgcaagtcacactttgtctatatacgaacttctatatttatttattcatttttttaaagagagggtctcactctgtggtccaagctgtagtgcactggctcgatcatatctcactgcagccttgaactcctgcgtttaggcgatcctctcgcttcaacctcccaaagtgctgagattatatgtgtgtgtgagctatcacacctggcctagtctagtatatacatatgtctatattcttcttcaagtatgggtttcttatatacttacttccttcttccttggttttcactttatatactttaagatatcctttctaaattccttgcttccaggactttgtttttcatctttccgttgccctctttttttgctttccccctcttatggcttctgttgtgcattccttctccttttgtcctttatcatcgttttttgtttctctccccttttctgt

SEQ ID NO: 535286 - DNA, 163 bp, Homo sapiens
ctatatttcttaatcagtaaacctgggagaggtggctgcgtgcctgtaatctcagcactttggaagactgaggcaggaggattgcctaagtccaggagttgccgcccagcctgggcaacatggtgagatcccatctctacaaaaaatccaaaataattgaggg

SEQ ID NO: 535287 - DNA, 100 bp, Homo sapiens
ctgatacatcgtgtcggacagtatatagtcagagagatagctattagaatgattatggatgcggttgcttgctgtaggaaatacttaatggcagcttctg

SEQ ID NO: 535288 - DNA, 171 bp, Homo sapiens
acatggcagcaaatgacaactgaagatggcaagtagaaaaccactatctcttctatgacggcgaataccgttcaggaaaggtacacctagcctttaagcaacctggcaaagaggctagaacaccaaggaattagaattgaatatgtaggtcaccatagcaacttttccatg

SEQ ID NO: 535289 - DNA, 660 bp, Homo sapiens
tgcagtggctcacacctataatcctagcactttgggaggctgaggcagggggatcgcctgaggtcaggagtttgagactagcctggccaacatgcaaaaccccatctctactaaaaatacaaaaattagctggatgtggtgatacatgcctgtaatcccagctattcaggaggctgaggcaggagaatcgcttgaacccgggaggcagaggttgcgccactgcactccagcctaagtgacagggtgagacttcgtcatcaaaaaaaaaacaacaaccaaaaaacaaaaaaaaccaatcaaacaaaacaaacaaaaaacacattcgaggccgggcgcggtggctcatgcctgtaatcccagcacttgggaggccgaggcaggcggatcacctgaggttgggagttcgagaccagcctgaccaacatggacaaactccgtctctattaaaaatacaaaattagccaggtgtggtggcacatgctgtgtgatcccagctactagggaggctgaggcaggagaatcgcttgaacctgggaggcggaggttacggtgagccaagattgcaccattgcactccagcctgggcaacaatagtgaaactccatttcaaaaaaccaaaataaaacaaaacaaaaacacatttgattctacattataaat

SEQ ID NO: 535290 - DNA, 790 bp, Homo sapiens
tctcaaccacctgggcctaccggggattgctgggaaacttgtggttaaagggaatcagggggttgagaaaaaaaaaaaaatacctttaaaaagccggccatcgggggggagggtttctctgtggtactttacgcccattaccccaagaaatctacaattaaattaagccaattatagaaaaccggttccaagttatgtggagggtgatttccctctcctctcccgcgccaaagagcagctgtggcttctcgtgaggaggaagccgtggtttctctcgtggtagcattcacacccgaggctgtgttctcgagaaagagtcctcagtgggcacctgggtgttgtggcaaaattaacacacaagagttataaacaccctgtggaaaaacaaaacaaaaaaaaaagaaaaacacaaacaacaacaacaaacaaaacaacaaacaaacacaaaacaacaaaaacacacagactgacggactgacgacatctcaaatctatgtgcgggagggcgagcggaagacacagacagagagagagaataagcacgaaggagagcgcgcgagcgacgagcgcgcaccaacaagagagatcaagacgacagcaagccaccgcgcacagctcatacttgctgtgaagacaaaagcagggacgggaagataaacaatcaagcgcgcgcgccacacacccccctaagaaggacgggcgggcagaacaatataacaatcacaaccaaaaccagcacgcggaattaccactggtgtttattatttgctggctctcggcgaccggggga

SEQ ID NO: 535291 - DNA, 757 bp, Homo sapiens
  misc_feature (215)..(215): n is a, c, g, or t
  misc_feature (221)..(221): n is a, c, g, or t
  misc_feature (225)..(225): n is a, c, g, or t
  misc_feature (242)..(242): n is a, c, g, or t
  misc_feature (610)..(610): n is a, c, g, or t
gggtccgcaaagccggtggcgcccggaggctgcacggagagcggtgcccgcgtcagtgaccgaaggaagagaccaagatgaatgcagagcccgagaggaagttgcgtgtggtggtggtgtggccgagcggctcgtgcggatgagggactggcggaatccacacccttcctcaggtcctgaacctgatggcttcgtgtcgaagaagggagctcggnagcatngatngagtccagcagatttcntttgaggatgctctttccagccaagaggtggaggtcgcctatatctgcagtgagagctccagccatgaggactacatcaggcagttccttaatgctggcaagcacgtccttgtggaataccccatgacatgtcatgtggggggcggtcaggaactgtggggagctggtgagcaagaagggaaaagtctgtgcagaggagcatgttgaactctgtgatggaggaattcgttttcctgaaaaaagaagtggtggggaaggaccgtgtgaaagggtcgtcctcttcaaagtggcccgtgtgaagaagagggggtgttgcttccatgattcagggattctggctgaactgttggttcccttttggggggttntcttgtgtctgcacttggaagaggaaggaatcagattgaatgacggtgtctggaaagaagaaatctgttggttgggaaaagggggtaacgaaagtttggtcaaaggtggggggaagggaaggggggtaaaattgggcaaatttggat

SEQ ID NO: 535292 - DNA, 146 bp, Homo sapiens
ggtcggtatgtcttctctaggatcaggaacttgcagtccttgtgcaacaggtcatcgctctgcacacttatggtgcaggcggcggaggtggaaacgccatgttacacagccgcatgatctggggcatgtatttcttcaccccatat

SEQ ID NO: 535293 - DNA, 954 bp, Homo sapiens
gcaagagtccggtggtcctgagtatttcacacatggatgtggtcattgttattgtgtgatggctcctaacttagatgggcacttgagtcatccagaaccatcattcactactgtcctctcacagaatcagatgcattcttcagcagagtgcattgaagtactgggagatggatgacttattgatgaacactttgaagaactgggaggtgtatggaaacgcaaggcttgaataacatataaaataatcatgaattatgagagagtttaataaagacaaggatgtaagtaccgtatagatagaacaggtcgaaggagtcactacacagatgaggatgataatgagtgtctatattctgaccaaacgtgtcagatattttacactcagatattcagtagctacaaagaaaaggtgtaccatggtttgaacagctgcttccattaattgtcaacctcatttgtccacatagaccattggccagacagacaatggggattatgcatctttgatgatgtcatagaacactgtagtccagcctcattgaaatacgcagaatatttcttaggaccaatgctccaatatgtatgtgacaacagcccagaagtcaggcaagcagctgcatatggcctggagtcatggcacacgtacggtgggagattaattatccgcctttttgtacagaagcacttcccctgctggtaaagagttattcagtctgcggattcttaagaccacaggaaaatgttcatgctaccagaagaactgatttcagcagtagggaaaatcctgaaagttccaaggcctgactgtgtaacgttgtaaaaggtctttccaccattgggttgtctggggttccctacattaagattaaggaacacaatgttcaaactttccatatttggtggcacgatggaagaatcactccaagtgtcgtgacccacaaacctgtggccaat

SEQ ID NO: 535294 - DNA, 120 bp, Homo sapiens
gccaaatgaagtgggagtggagttgctgtgtgagacatagaatgatggtcaaagataacagtaaaaaaaagaagtctgaattaaacatgataaaaagtacatttaaatgacacttagtgg

SEQ ID NO: 535295 - DNA, 530 bp, Homo sapiens
  misc_feature (46)..(46): n is a, c, g, or t
  misc_feature (58)..(58): n is a, c, g, or t
acagagatgtaactagagacacatcagcaagattggaactcctcanagttactgtacncagtgtgccttgttctatgtgtttcagatttcagctgaagtcattcaggtagatttcaaattaaatataatcacagattgcaaaatgttattccaggtattttctataaaattttgtcttggtcactttacacttttctttaataaacaatatttttatagtagctttagcttcacagcaaaattgagcaagaggtagagagagtccctatattcccctttccccgttaccagcagcccccaccagagtggtacatttgttacagttgataaacttccattgatacaacaatattatccaaagtttacatttttaataaagttcatagttgaaattagttttcattttttgttcttgtacattctatgcttttgaacaaatgtataatgacagataccaccattatagcatcatacataataatttcattgccctaaaaatcctctaaaatctgcctatttattcctccctc

SEQ ID NO: 535296 - DNA, 293 bp, Homo sapiens
gagattagtattaacaaagaccctacagagtgattcatagttgcattgcctaatgttatgagaacatactgcattgagatgatggacatttttaagatagcataacaactcaatattcagattatagaaatcaaggtttaagggatattatgcgttattgttacaagttagattgcccaaacctggctgactcatccatttgtaaaaatacagatttatctagtataagaattactgttttaggaaatcctaatctgtgaataagcccagtaacttgatgtaattacaagtct

SEQ ID NO: 535297 - DNA, 310 bp, Homo sapiens
agaagcagaagcccgccagaagcggcgaatggtagaggagatcgggtggagctggttgttctggacctgccttacttgccaaaggataagctggctcagtcggtgcagaaacttcaggacttgacactccgagacctcgagaagcaggaacgggaaaaagctcccacagcttggaagcgttcatattttagacccaagtcagttggcaggaggcagcagccccccacttggcttacactggctctttggtctttcctctggcttttgggtccaattttttcaactcccctcccagacaagctttaccacc

SEQ ID NO: 535298 - DNA, 296 bp, Homo sapiens
ggatcggctcggcgcctccgcctgctcggcctcccaaagtgctgggattataggcgcacttggccagcttcatcttttctgatactacctttaactggttgttttttgtttttgagatggagtctcgcgtctgctgctcagactggagtacagtggcatgatcttggctcactgcaaccttcacctcctggcttcaagtgatccacctgcctcggcctaagtgctggaattataagcgtgagtcaccacgcctggccgaccttgttattgttaatattaagtccagaattgccccg

SEQ ID NO: 535299 - DNA, 1003 bp, Homo sapiens
gtccccatcaaccgggccactccctcctgttttttatccccggcggttactattttccccggaccgtttgcacctccgcctttttgtgcgccctagtggccgtgggtgcccgagacacggcgtgttcccgtgcgagttttccgcgggtgtgttgtcatcccccccctccccaagagtttttcattggggtgcttacacctttcttgggcgggtgctcgcttctgtgtggggaataataatttttctttgtttgtggccacagcacactctgctttccctacatccctctggggccacacgtatatttgggggcaacccctctcgctggggttgctgggtcaaacgtactaccaccaatgaagaacgaattttttttgattggcgcatagcagaagaaaattagctgctatgggagtgtattatttttttctctagaagacgaggggttcacccccacccacctcgcaggaaggtgggtcaccaccactcttttattatgtcaaaagaggaagaaattttgttggtataataatacatgccaccccacccctcgcccacaccagtggttgcttgttaattctaatataagcccagcgaagatcccagtaatttcttcctcctcgtcggctgttctgctcgttattatttatcttgggcagcaccccctcttctctgggcccactattttttttgtgggggtggtatatgactccccttggtttgttgttttgatgatgttttgaaacaccccccaagttgtatgagtggctgcttgtttttcttcccccccacttaaaggggatgatattatattgaggggggaagaaaaactctctgttttgcttcttaatgatgatgttttgtcctccccccggcttgctcctcctttaagaggatttttcccccccgggcctttttttaaggggggggtaaaaaatttttccccccctttgtttaaaaaaaaaggttataaaaaagggggtttggttaatttttgggccca

SEQ ID NO: 535300 - DNA, 209 bp, Homo sapiens
cgccaaatgggatttcatctggaaaaaccattttcagttggagcagcgtaagccttgattaggaataggtcacacgttcacaatgaataagaaagatccactgttctctcaccgttcaccctcacgttgaataattcaactcaaagcttatggctctccatgttgaatatccagttgatattcccacgttttgctggcggtacctgagc

SEQ ID NO: 535301 - DNA, 564 bp, Homo sapiens
cctcgaggacccgacggctcaacggaacttttgaaaatattacaggttatttcgcttcctgataatctatgaaagacacagagaggataaaactagagtgtgtggttaagatgagagtgtgccacagtaagactccaggatggggacattttcggctctgtggcctcagtcatggtcaagtcatttgttcctttggggtctgattcttaatttttaaaatgagaatttgatactggggaggctgaggtgagagcattacttgagcccagggaggtggacgtggcagtgagattgtgccaccgcactccagcctgggtgacagagccagattctatctcaaaaaaaaaaagagattcggggcggggggcaggggtccaggccggtaatcctaacagttggggagaccagggcaggaggatcacgggagcccaggagttcagggtcagccggggcaacatagggagacccattctctatggtaaaattaattggtaattaaggtgagaggaaacggcagttagaaccagaatgagacaactatccaaggtcccgtggaagcggtcg

SEQ ID NO: 535302 - DNA, 289 bp, Homo sapiens
tgatcacctttgtctcaaaaaaaaaaaaaatttgctctgcccttaaaaccacttcagagtccagtgggcggagacacggggtaatagggaggatgggagatgggtttccatctatcaataaattcaaaatattcccattggtgatttaccctaaaaatacaggtttccacaatctctaagggcaaaaaccaaactatttcctttttttttttttgggaacggaattctcgcttagccccccgggtgtgggcacacaacccacaattgtctcctcaaaaaaaaaacagtg

SEQ ID NO: 535303 - DNA, 746 bp, Homo sapiens
  misc_feature (174)..(174): n is a, c, g, or t
  misc_feature (192)..(192): n is a, c, g, or t
  misc_feature (202)..(202): n is a, c, g, or t
  misc_feature (278)..(278): n is a, c, g, or t
  misc_feature (298)..(298): n is a, c, g, or t
  misc_feature (351)..(351): n is a, c, g, or t
  misc_feature (375)..(375): n is a, c, g, or t
  misc_feature (423)..(423): n is a, c, g, or t
  misc_feature (457)..(457): n is a, c, g, or t
ccttcggaaaagtcatttaaataggccctaccggttaaatcctccaaaaggtacctcttatgggaaaaacttcccgcagttaacccttcctttaatttcatttttggcataaactttccactttaacccatttattaattcatattaattagataatttcaatgcctacctctnccctagcatgttacctcncaaaggcaangatcttgattccttgttggcttatggatacacctaggaaagtgtgctgtcttttagaagctataaaatgagtttantatgcaaaagaagaatctanccatttcatcctgagagttgagcctggcaagagatccatacttctgcaagttntctcagccattgatcacgtttgtntcatgttcagattgaaagaagcaattattattgatcaagttcaagccntgtggacacatagtcaaattttctaggcatgtcntgtttctaaggtgccttggaattccaactgaaattaacaggtaatagagaaaaagaataaagaaagtatcaaagaaagaaagagtgagcttcagagtaaaatattattatatagctcagactaataaaatgtgttttacttacatattcaatttgaatgacttaactttaaacatcaattcaaaaaaattgaatatcgagaagagaacatgaaaggaataagcactggagaatgagagctatgaaaaatttaaaaactcaataacaaacttacagaaattcagtatctt

SEQ ID NO: 535304 - DNA, 277 bp, Homo sapiens
tggcagaggggttttttcaggaggaaccagggctggtttttccccttgggggccattgcccttgatgtgggaagtcattggcttggggggaccttatctggctttgccagatggacactgagaaagatgttgaagactccgaatttgaagtggcacattggtccgacctggtggggacctgatcctcagtgtccttaccccctcctaccttttttttgttccacctgttgtgggtccagcaggtttttatttggggacaataaaaagtctgggtcca

SEQ ID NO: 535305 - DNA, 351 bp, Homo sapiens
  misc_feature (130)..(130): n is a, c, g, or t
gcatctcacagataagaggagctgtgtcatcattccagttcttcaactccattggcagcagacagggagtcccagggggaaaaggctgcagatacaaccccaagtccgtatcaaagggggttttctcagnctacacctggcagctctggtcatcgtccgcggaaagttcagctgctgcctcccccccgaggggaacagctgaccttgcctccacctccccagcttggctattcgatcactgccgaggacctagacttagagaagaaggcttcattacagtggttcaaccaggccttggaggacaagagcgatgctgcctcgacctctgtcactgagaccccacctatcact

SEQ ID NO: 535306 - DNA, 712 bp, Homo sapiens
tccctgtagcagctccttattgctggagaaggagatatgtgcccaagatcctttcaggatataggcatttggggcgcgacacaaatcgaggtgcagggcaagacgagaggaaagtcccctgaatccctgcaggatgaatttattcaagaagtggaaatatcgaaaatgactcaagtatgcacaaagtcttgtgaggaaacatgagggaaaagcacagaaaaatgccaaaggtcggagggaagatcgccctttgtaggatgtaccacttggatggcagaaggaaaatcctcaaaccttccgaagaagcgcgtaaggccagggaagcagaaggaaacccccaggagtgagggccgaatcagcctgtccaggggatttcaaagatggacactacccgtagggcgtttggaccctgattgcaatgtgactaggaggagtacgaatgagctttgacgacggcttagggggaccagagatacgagacctgaggtaaagaacaccacagtttgttgactagactcgcattctggaacgccaagatgacttttccacggcagcacggtcctgtaaatcccgggggttgctaaaagtcgccttagaggttacaatttggcctaacctattgcaaactctggggccccaagcgtttctgttccgtgtcaagcatttccctggatgtacttacttggaccgcccatttgcactttaaaacatc

SEQ ID NO: 535307 - DNA, 470 bp, Homo sapiens
accgcggggacgcctcctctagtccacgcacggcttcctcttgcggctgggggtgatggcagacactggaaaaccaacaggactcccaggacaaggactgctgccccacgagctcccccctcctgcaagtgaggggcccggggcggtcccccagcccagcctctgctggtggaagccgctcactgatcaggaaagtgcttgggcagcagctcaacggtgaacagggtgcccggcctcagcacctcttcaggaaccttctccatgcccatgtggtggacgaagaggtgcaccagtctgggagcctcctgcggtctgcaaggcgctcatggtcacagtacagcgtctgacgtggaccacacagatatacgtagccgggaacaacatatcagccagggccgaggatacaaggcccagagcgtgaacagaccaatgggagccaggcacacacaatagaaggggggccaggtaca

SEQ ID NO: 535308 - DNA, 121 bp, Homo sapiens
gctccattctctcaggcttgctgccaaaagccttttgtgttttgttttgtatcattatgaagtcatgcggtttatcaccatcgagtgtttcagttcttcggaggtgttcctgatgctccaa

SEQ ID NO: 535309 - DNA, 676 bp, Homo sapiens
gaagaaatccaaggatacagtctcagaggacaccattaggctaatagagaaacagatcagccaaaggccgatgacacagggcagaacggacaggcatctggcaggaagaccagagaactcctggatgaaagtccacggggccagcaatactccagagcccagtttctgctggatcccatggggtggcacattgggacttctctcactcccccatctacagcagaagactgtgcaccaggctgacagaagcctgtgccttgtaaggcccagaccttccaggggaaacactcagacatgtatcattctctatcactgcttgctgactctgggaccggtgggatggctgctcagaaaatacttgctgctggcagaaggcctgtactcaggcattagcattgacttgatgttgccaagggactgaggcgcatggcaggcttgagtaccacctgcatcctcatcttaggagtctccttttcaaataattaggctctgttcccatgtttagaactctgatgatcggccttcagcctgtgagctggacactttactagaggcccattttcagctaatacaataaaattctacataaattggaaggaataacaaccacaataggacacagaatagcagctcggtctggactcgactgactcactgaggatctgtactgctgagg

SEQ ID NO: 535310 - DNA, 630 bp, Homo sapiens
gttcagagaacagtgtgacgtagtgcgttaccatatatcgaccatggagtggacgagcatagtaactccaagagtctagtaaatatcattccatacatacaactcggttactacatcgaccatcaagcatgtgccatataaaaactacaaagcctctcgtcatcaacagtcgtcaccacttaaaaacgccccacttcattgcatgctgaagcgacattgttggtcaagaaaccagtttctggcatagcgctatttgtagttacttttgctttctctgagagactgcagataataagatgtaaacattaacacctcgtgaatacaatttaacttccatttagctatagctttactcagcatgactgtagataaggatagcagcaaacaatcattggagcttaatgaacatttttaaaaataattaccaaggcctcccttctacttgtgagttttgaaattgttctttttattttcaggtataccgtttaatttaattatatgatttgtctgcactcagtttattccctactcaaatctcagccccatgtagttctttgttattgtcagaacctggtgagttgtcttgaacagaactgttttttccccttcctgtaagacgatgtgactgca

SEQ ID NO: 535311 - DNA, 430 bp, Homo sapiens
  misc_feature (36)..(36): n is a, c, g, or t
  misc_feature (246)..(246): n is a, c, g, or t
  misc_feature (254)..(254): n is a, c, g, or t
  misc_feature (268)..(268): n is a, c, g, or t
  misc_feature (289)..(289): n is a, c, g, or t
  misc_feature (304)..(304): n is a, c, g, or t
  misc_feature (307)..(307): n is a, c, g, or t
  misc_feature (312)..(312): n is a, c, g, or t
  misc_feature (314)..(314): n is a, c, g, or t
  misc_feature (318)..(319): n is a, c, g, or t
  misc_feature (326)..(327): n is a, c, g, or t
  misc_feature (329)..(329): n is a, c, g, or t
  misc_feature (335)..(335): n is a, c, g, or t
  misc_feature (337)..(337): n is a, c, g, or t
  misc_feature (342)..(342): n is a, c, g, or t
  misc_feature (345)..(345): n is a, c, g, or t
  misc_feature (351)..(351): n is a, c, g, or t
  misc_feature (357)..(357): n is a, c, g, or t
  misc_feature (359)..(360): n is a, c, g, or t
  misc_feature (362)..(362): n is a, c, g, or t
  misc_feature (365)..(365): n is a, c, g, or t
  misc_feature (369)..(369): n is a, c, g, or t
  misc_feature (372)..(373): n is a, c, g, or t
  misc_feature (376)..(376): n is a, c, g, or t
  misc_feature (386)..(386): n is a, c, g, or t
  misc_feature (397)..(397): n is a, c, g, or t
  misc_feature (401)..(401): n is a, c, g, or t
  misc_feature (405)..(405): n is a, c, g, or t
  misc_feature (409)..(409): n is a, c, g, or t
  misc_feature (415)..(415): n is a, c, g, or t
  misc_feature (423)..(423): n is a, c, g, or t
gaattgtaaggtgttccttttttgaaagctgcattnggtctatggtcaggcaccttttttccagcggagacaatgcatttttaggaggttgagttctgcggttaggaagggagatgtacccctcgccacctccccttgtcacctcccgccgagaatagaaggtaaaatatttttgagtattagtaattttcttttttcctttatcacaccggtggcttggggtctttcggagtcttacagatattnggagtatnaatttgaggactcntcggcctgcacaggaattttngcgtgtggatatttngcntaaantngttnntcctggnntnatcacntnggctngantagttncaccantnnantcnagcntgnncgncagaacaganccgtctcaaantaantaantaantaaaantaaatgtngatcagg

SEQ ID NO: 535312 - DNA, 362 bp, Homo sapiens
cactcattagtactcatcatggctatagccctacaactaggaatagacccccattacacatctctgagatcccagaggatcacccacaggcacccctctgacatccggccatgctacttctcacatgacaaaaactagccccacatctcaatcatataccaaatctctccctcactaaacgtaagccttcatcctcacactctcaatcttatccatcatagcaggcaagttgcggtggaatatcaaaccaaaccctggctgtgatgcttgctgctgtgcccataaccctgtgaatgtgtgattgctctgagcccattaccctgtggctgtgtactagctctgagcacataatcctgtaaccg

SEQ ID NO: 535313 - DNA, 139 bp, Homo sapiens
tgctgcggcgcgctggaggaggcagataaccatgtcagccacagttgtagatagcagttaatgctgcacccctatcgggatccaaagaaatgagtttggaagaaccaaagaagatgaccagagtcctcccccgaggcat

SEQ ID NO: 535314 - DNA, 196 bp, Homo sapiens
ctcagctagcagctcttccgttgccggcgcaggagttccgtttgacggctagctccctggacgtggggatggatgtcagcccctctgagaccccctatgggaactcctgaccgatcttccgcagaatcttcagggtgaagtctgagccatcttcccccgtgctcttccgtcctcgcctcattttttttgtgttttt

SEQ ID NO: 535315 - DNA, 349 bp, Homo sapiens
caagggctcgaggagcatttatgaataacagaaccctgtttggactttctctgctcactctgagcgtcagtaccgggcaagctgcgatggccgccggcgagaaaggctagggatttatcgaaggcagcagcctgaccattctcaatcgaaatctctacttcaaccgcgatttccgtaaagcgccagtccagcagctcgcgtagaggctattcggaagagagggcgcatggcgcgataggcagattcgagtctgggttcaccgagggcaccataggctttggtgccgacgcctttgccatgctagggctcaagcttgacaccggcgacggccgtactgcagcaggcggct

SEQ ID NO: 535316 - DNA, 407 bp, Homo sapiens
tactattttacatcgtgttggtgctctgttgtttttttagactgagtctcattctgtcacccaggctggagtgcagtggtgccatctcggctcactgcaacctccgtctcccaagttgaagcaattctactgcctcagcctccgagtagctgggactacaggcacgcaccaacacgcctggctaatttttgtatttttagtagagatgggtttcaccatgttggcgaggctggtctcgaactcctgacctcaggtgatccacctgcctcgggctcccaaagtgctgggattatccgcatgagccactgcacctggcctctggagtagctagtcttccactactttactttcataataaacttgctcgcccagaaatcttttgtttttttgagactgaggtcgacggg

SEQ ID NO: 535317 - DNA, 194 bp, Homo sapiens
  misc_feature (20)..(20): n is a, c, g, or t
  misc_feature (62)..(62): n is a, c, g, or t
catttgaacatatgactatnctcccagagtgaactgtgagtttcataggggtgtgggtgganttgggactaagtcttatgcatttttgtgttgatacattttcatgtgggttggtgcataaaagacactaagaatcgatgaaaggaggaagaaaggaaaacaggaagaaaaagagggaaagaagaaagaaaagg

SEQ ID NO: 535318 - DNA, 445 bp, Homo sapiens
agcggttgttctcttgaggtcagggatttgagaccagcctggccaacatgatgaaaccctgtctctagtaaaagataaaaaatagccgggtgtggtggtgcgcgcctgtaatcccggccacttgggaggttaaggcaggagaatcgcttgaacccaggaggcggaggttgcagtgagaccgagatcccaccacctgcactccagccagggtgacaaagagcgagactctgtttcaaaaaagagaaaatttgattgggtattaataaaaataatttttaaagtaagtggagaatatctgggcatgggaggctcagtgagtgtaatcccgaggagttcaggagggcaaggcaggtgaagcgagatgaggtaaggagttgagagagaacgaggcttgagtggaaaaatggtagaaagacgtgtatatgcaacaaaagataaaaataag

SEQ ID NO: 535319 - DNA, 119 bp, Homo sapiens
agactgttcgcacaggttggggtggagggagtttacaggaagcagacaggtgccaacagttgaaaccgatttcctgtatctgaggcaccaacgtccaaggcggacacatctgcatattg

SEQ ID NO: 535320 - DNA, 680 bp, Homo sapiens
agcgggcgtgcgcgcggcgacctggaggacgcgtaacgcgccgtggtccccgcctgccgctgctccgccgatcgccgtccagtctatccggcactaggaacagccccgagcggcgagacggtccccgccatgttgcggcatgagggaggaggttcgaccggttcctgcagcgagaaagaactgcatgactgaccttctggccaagctcgaggcaaaaccggcgtgaacaggacgcttcagtcgctcttggtgtcatcggactggtggccttgtacctggtggttcgggtatggacgcctctctcctctgcaagctgataggatttggtacccaggctacatctcaattaaagctatacgagacgttcccaagaaaagaatgatgatacccagtgggtgacctactgggatagtgtatggtgatgttcacgcactgtgctgaactactgtctctgatgatctttcctgtcaatggtttcccactgtctacgtacatgctgaatgtgtggctctaccgtgtagctggagcatggtccccgagctagtctaatggggttgaaattgcatctaaaagcgcatcatccggcctttcttcctgaaacacgagtcccacgatggatgacgtgtggacaaggaccttaaagaccaaggcaaactagacactgcaagatgcatcaagtt

SEQ ID NO: 535321 - DNA, 121 bp, Homo sapiens
gtaggaaagaaagcataaatgaacgtgatcctgaagattgagggacatctaggaatttggtttttaattacaagctatttaaagagatgaatgtggccaaagttttacacaattgaaaata

SEQ ID NO: 535322 - DNA, 1279 bp, Homo sapiens
  misc_feature (829)..(829): n is a, c, g, or t
tttgtggtgtccgacagacgaggggtgtgttggtgggttggtgagggccaaggtgcgagccggttggggcgggggggcggtggtggtggtgggtgggatcggtggatgctgtttctggtccgggtgcgcagtgtgttggggcgggtgtgttgtgtgtcgcctcgctccgtgttggagtggggctgttgtttgtgtgatgcgatggggtgggggctgttgtggtgtgggttgtgtgtgggagcggaggcgttggttgtgtggtggtggcgcgcgcatcgtgcgcgggtgtggggttggtggtcgccctccttgctgtgtgtgttgttggcttgtggtgtgtgtcgcccctggagacgcgctgcgcccagctcgcgtgtcgttgctctcggctccctgccgtcgcgcgactctgtgggtgttgcatcacgtgggttgttgttagtagcttgaggtgggtgctgtggtctacctctgcttgcttgcgtatggttgtgttgcacgcggtgctggttggttttcgttccgcgactctgtctgccctcatgatgtgtgtggggtggctctttcactctgttgtggcgtgttttgtgtggtaggttcgttgttgtggggtggtgtgacgtgccccccctcgcgcgtgtttttggatgggggggggcccaccgcgctctcgcctggtctacacgggcgctcgtctgtcgtgggtgcttcgtctcgtcgctgtcgctctcgtggcggggttggtatagtatagttgtgcaggcggcgcgcgcttgcgccagcacgcgcgcgtcgcgtcgctggcgctcgcgcgtgttcgctcgcattngtggacacacgcctcctgcttcgtttgttgcacgctctctatggtgtgggtccctctccacgcgcgcggcggtgtccgcgcgatgtatatagtagctcctcgttttccaccgtgaggtttccccgctcccttgtcgtctctactccccttgctgcaccgtagatgtccttcggagggcctgtatccctctcccacgagtcggcccagccgcctcgacagtggttgttctcgacgtatccggcgctcgtctgtgtttgttgttttttgttcgggggggccgctcttggtccccatgtgtttttgtgttggttgttttatacatttatttttttcattgttgtttttgttgttgtaatacttagatcaaacagggccccaattgaaaaaattgaaagaaaattaatccctgtttagggagaaggtttttataagaaaaacaataaaattaaa

SEQ ID NO: 535323 - DNA, 1522 bp, Homo sapiens
  misc_feature (228)..(228): n is a, c, g, or t
gcacaggcaggttgagcgtgtaatgagcaccagcgtcaccgtctcttgattgcacgtgattgtgcaatcgcgacgatagcgcggattcccgatggaacgctctctgtgcaccatgagaggcagtctcaggcaacacacagactaagatacatagcctcagcaaggacgcacgtagcaggacataagagtcgtggaattttcatccgataactcacatttgtgagcaanactactcaggacatgatatcatgatttgccaggctacctagtatgaattggccacagtcggagctacagaagactgtattgtggacactcctgtgtttgcaacacctgggtcaagggaacaggtggtaataggcactgagagacttcaggatctcgagcctgtttggcaagcaagcagtggaactgtgctgagctatgtgatgcgacggaggattgtgcagcttacaccgatgctagagttgcctatacaaacgttgagggccaaatggtctgcagtgacatgcttgacgctgtcacagacgagacatgctgcgttatcttgcaatacaaaggcttcccaggctcaagaattgccatagtaagtgcggtagccaggaattaccctttgtggaaatgtcctgaatgggaccaaggttcggggactttcctggcaaaggttccctatcctggcacaacaattcatgttgtttgaacccaatcaatgcccatatactttgtaaggcaccctattataggaacgaaagccccaaaaccgagaaggccccaaagaccccggtcccttcatattagcccggcggggtcaatccatttcagggtttccaggtgggtcgtgacatcagaaagacagagttctcgacgctatggtgaaaggcacaggaggacatttaagcaaaggtggcaggtttttgacaacggaagcccaaagacaaggaaatccaatacgaaaatccagggaaaccactagcagaacaccaggacgtacacggacaaccgggcacatacaagaacagatgctagaaagccaagacacaacgaaaaacaagacaagacgataaaaatcagggaagaaagggtgccgaactatcaccacgggaggcacaaaaaggccaggcagcagcaacaggaaacccaaaaggatcccggaagggatgaaaccagagggtcacagacaccggtagccccgtggcgccgcagaacagaaagcccaagaagataaaacaaacaaaggagagaagagaaaccgaaacacgggcgaaccagagagaaaaacgaaacagagagtagcaaggagaacagcacacagcaaaagaaaacacaacaagaaaaaacagcaagcaagcaagggaaacgacaaaaaacaaagtagacacacgaggagatagaacgacaagacaacaatacacggaaaagaaggaaagaaacgatgaaaactgaaaaaagcagccaacaaagagcgagagaaaacaaaaaagaaaagaacaaagacgaagacgacacaacacaagaagaagaa

SEQ ID NO: 535324 - DNA, 1035 bp, Homo sapiens
gatatgcatgcattttcatcaacaatatagtatgctgagtttccgaaaatcctcaaatgcacttcagaaatggtgctatcatgtggttcgtttgacccctgcaaatctcatgttgcaaatttgatccccattgctggaggtgtatagagcatggagcggatccctcatgaatgtcttggcgttgtccttgcagtaatgagttcttgctctattttacctcccctggaagctgattgtttaaaagagcctggtatcctccctccctttcttctttgcttcctctctcttgctgtgtgatctctgcacacacacagctcccctttgctttctgccatgagtggtctgaggctctcaccagaagccaagcagaggctggcaccatgcttctagtacagcctgcagaactgtaagccaaataaacttcttcttagtctaaacaaaggacggaaaggacaaccgacaacagacaaataccccagaccacaaggatatcccgttaacacaccacaaactgcgctaagacacaggacaacagggatacgcaggcacctgagccaagacagacatccaacacacaccggccacgacggaagcacgacgaatggcacccatgacacctgcacacacagccacccacagtcagcggccacgcacacaggcactcacacaacctacacctggcaagtcccctcaccgctcagcatacaccacaacagacccccaagcacacaacacatccccgaggacagaccaacacaacaaccgccaacaaccacgaacctaccacacacacaacaaaccacccacacgacacacacacccggggaacaaacgaacaagacggccacacaacaaaggagagggcaaacacacaaggccaacgcgagagcagagagaaacgactaaacaggcacaatagtacaacaacgggaaccacaggaacgacagaacgcagcgcaaacaaacaacaacacaaacacgaagaccgcgaacaaaacaaaaacgcagaacagcagctccgcctgccgccctggg

SEQ ID NO: 535325 - DNA, 161 bp, Homo sapiens
actataccattatcctcatatgatagtgcacgggccccgcgctggatacggcgacggtttctcagttttgcctttgtcctagctctcattcgctgagaggcataaacctttttgagtatccttccaggctctaagtttcttaaggatgcagaacaggttcc

SEQ ID NO: 535326 - DNA, 739 bp, Homo sapiens
  misc_feature (547)..(547): n is a, c, g, or t
  misc_feature (590)..(590): n is a, c, g, or t
caaaattccaatgtcatttttcacagaagtagaaaaaaaatcctcaagttcatatggaaccacaaacacaccaaaaaaaagaaaaaatagccaaaacaatcatgagcaaaaagaacaaagctgttcaggcagtgtgatgcctccagctttgcagtatttcaaactgtactgcaaaagcatagtaattaaaatgtcatggtcctggcataaaaataggcacattgatgaatggaacagaataaattatgattaatttattgacttgattatgattaaccaattatggttaattgatttttaataaaggtgctaagaatacacaatgggaaaaagtctcttcaataaatggtgttgggagaactggatatccatatgcagaagaatgaaatttgacccttatctcacaccatatatacaaaaaccaactcaaacatattaagtaaacttaagaccagaaacttgtaaactactagaagaaaacataaggggacaactacatgacattggtttgggcaatgagtttttggattggaccctcaaagtgcangccaacaaaaataaaacagacaaatggattaccatagacgcanaagccttgaccagaaaggaacaaaagtggaaagacagctagaaccggagaaattttgcaagctacatcgaaaagcgtatttccaaaatggagaaatgcaaacgttggtcaaacggccttaaaaaatgccacggaccggattacttttta

SEQ ID NO: 535327 - DNA, 107 bp, Homo sapiens
cgctggtatcaccttgcaatactcacagagccagttcacatcccactctgagctcccacgagaaacactgcttctccagtgcccggggtgtttgggctgataacact

SEQ ID NO: 535328 - DNA, 240 bp, Homo sapiens
agtagtcttaggtacaatatgaatatgtctatttctcaaggattgcaatgaccagtaaatgagtgcatgagagggtaaaacacagggtactccgctcctcctaggcatggagcagttgttctagaagcccaaatgtgctggaaggttggccacctgagagccacaatcttcttttatttaaccactgaaagcctgagaggaattctgaaactcatacccaaataacctctccggaatacg

SEQ ID NO: 535329 - DNA, 313 bp, Homo sapiens
ggtgatgacaactagggtagttttgaggtgtaagccatttaccaagatagttgtaggtaaagaagggcagatttattagagaaagtgtgaaaatatgttgcagtgggcagctcagcagagaaggggctacctgcaaagaggcaagggctggaggaaagttttatagggtcctgctgaagggtgctacgtgtggaatgaggtcattgtgcccgcaggttgtttgtgattagctgtttctaacaattgttcatacaataattgttcattattgttctcaacttggggctctccccaacctggggacccttcctta

SEQ ID NO: 535330 - DNA, 811 bp, Homo sapiens
tgtcatcttagggtatggtcaggcgacaggggtgaccagactgtcctggtttcccaggacttggaactttcaatgctataactgggacagtacccagcaagtggggatggttggtcccctaccaggagagggtctggggtctcttgcttcccgagaacgcctgtggcttgaaggaaccttgactgcattggtcctcaggtatctagctcccaccttctctctcatcgtgtggagcaagccagatctcagtgccccagaccccacgctgatctgcatcttggtttggcgatctccagagacgcctgaggccccagagcttgaggcaaagccaggccgtccatgagtcctgtgtgccgtggacgagtggtcacttatactactcctaaggctacgatgtcgagagctcagaccactgctcagagcagaaatccctgcgtcagaatgctccgcagttccctcgtccctgctcgcaggtctcttgtctcttgggaaggaactgataggtcgggccatggtttgggcctagtcactgagtcagctctagtatctcgaagagactctgttcattctgctcgtatccctaatggcctggttggtcaaactctgggcaacagggtttatcaggatgaggaggtcaagacaggatgtgcagagctaccgagttcatctggtgggtgtccgggggcacagtgggggctgatgtctgtgcaggctgtgctggcccgcactgccttgttccctggagtggggtactccttgttgaaagaagaggatccttctctgatagtgagaatacacatgtatgaccaga

SEQ ID NO: 535331 - DNA, 184 bp, Homo sapiens
gaagatttgtagtacacatagcatatgttataaaatgtattttacatacatcgtgcaaagatacacttatattaatgctataaaatcacttgacatgattgagcaatcgtaggctagttctgagcatgcctttaaattcaggacaaacagggttacatagtatgttggattttagggggaacag

SEQ ID NO: 535332 - DNA, 1052 bp, Homo sapiens
ttcagaaagagccaccagctggaatgctgcatgttaggtggcctttctctgcaggaggtgacctccttggctatggaggaatcccaagaagcaaaatcattgcagccagacccctggggatttgcacagacagaacatctgacccaaagtgtgctacacagctggggaggaagggacaccacagatacctaaagggaccagctccccctcctctcctcagctccagatcgagggccaccccactgtccactcccgtattgtcgacctccgttccggtcccgatgttccccctcggcagccaaggtccaagtccctggggcctgcgtggagtcccttgtgctgtcccaaggatgaagccagagagcccagcctcctgagacctcagacctggtacgcagcccacatgtaactcgcgattctcttcccagcacggcctggccctgactcgtgcagcgggagtccctcgacggggaatgggacaccggcttggtcgcttcctccctgtccctatcccacgtgtcacatccttggctgtcagtcccatgcctgcccatgccacgcactctgcgactctggcctcacgagcgcggtgcccttgacacgaagcacgacgggacgtggcagtgcccggcccctgcccatcgcgctgccctccctcaaccaggacaccctgcccgcctcgcctccccgcgacctgccacggggccacgctctacacagagcacccaccgctgtaccactaggcacggtgctcagcaagcagcccgatgcgcaggacagcacgatcgcccagcggcgaccgacggaccacgcgccgcggccacactcgcccgacccgcccgaccccgcgccgccacacgcctatgccccttcgcccgctgcgccacgggtcaactctcgccttgcccgctgtcgtccgctggctggcgcgggctgcccgtgcccccgcctgcgcctcgcgcccgtgtggccccgtgccccctccggcccgtggcaccgccgtgggccgcacgcctcgcgcggcccacccccgccgtatactttcgctgtta

SEQ ID NO: 535333 - DNA, 413 bp, Homo sapiens
  misc_feature (302)..(302): n is a, c, g, or t
tggggcaagcaaggtcgcgactacatcaacctgtggacagctacgacgaccccaacagttaccgctcggcattccgcgacggccgtatcgacctgttcagcgagagcgagcccaccaccttgctcaaccagctccaggacgacatcctcgaactgcgcccgctcaacgaaacccgcgaactctggccaagcgtcgacctgaagcgcgacacttccatccgcttccacatagcccacagcgcccaacgcgaagtagaaattctccacgaccagctactccaggttcagcgccgaccctttgcntaccacgggacgtcatcgtcatggtccccgacgtcgacagtacgcgccgcatattcgcggtattcggccaacttgatagaagcgacctacgcttcattgcgttcacactga

SEQ ID NO: 535334 - DNA, 600 bp, Homo sapiens
tctagctcggtaccccagagtccaaacagggccatcttttatcaggctttctgtgtcgaggacgctccccacatagagtaaaacctaaagggaagggatgtgaagtgacctcaccctcagcttctaactcatgggggcaaggcttgtgggatcttaaacacctctgcctcttctgagcctgttttttcatctgtaaaacaaggatgggaggttgtggtaaaaattccacaacaacactgtacacccatgaaatacctgggccacggatgactcggcagaccccaatttccctctgcctcctgcctaaagctgttagcaagcatccataatgcgggtcacacaaaagctccccccggaggttacagaaatgaaagcggcagccccagtccttgggtagcctgtttccccttgaaggaaacagactcaatatcagcaacacacagtgaatgacgccagggtggcgaacgggcctttcctggagcaaatgcgggaggcttcatggagatgacctgtaatgaacaccactcatctcaagctgggagcagcacatgcccccggcagggagtcagtgatgaggtatggggttcttgacatcttcct

SEQ ID NO: 535335 - DNA, 410 bp, Homo sapiens
  misc_feature (56)..(56): n is a, c, g, or t
  misc_feature (96)..(96): n is a, c, g, or t
  misc_feature (173)..(173): n is a, c, g, or t
cccccgggtccccccccgggtcccgggagggggggggggggctttttttcccggtngggatgggcccccccaaagggtttgttccccccggggccnaaaagttccttttccccctaagagggggccccttggatccagggctaaattcaccccgggtattccctctccagggntagagccgggatttggggcgggtttttttggggccccccccttttcccgggggttcccctaaaaaattggggcccggaaggggccgggataaaggaggccccaggtttttggaggggggggggggggggggggttttaaattgtttaaaaaaaaaaaatttttttttagggggcgggttttggtgggttgttggcccgggtcccgggttttttaggtttatataaacccgaattcca

SEQ ID NO: 535336 - DNA, 213 bp, Homo sapiens
cactattgcctcgtctggtttcgggggtctatagctttggctactccttgtcaaagttatttctcagttaattcattatgcagaaggtatagggagttagtcctttgcctatattatgcttggttgtaatttttcatctttcccttgcggtactatttcttttgcgccaggtttcaatttctatcgcctatactttatttgggtcaatcgtct

SEQ ID NO: 535337 - DNA, 513 bp, Homo sapiens
gcacgagctcctttcctttccagcaagagtcctccagaatcctcatactcacagtccaagcttactctcttgaagagttctccaaaagctcagttgaaactctcttgaggctcaattcccccttgttcccgcttgccttgacctttatgcattccaagttgtctcctcttcacccattcttgaccatctgttgctttgcccacgtacagacccctgggaagatgaagaaaccagatctgaaatggcaagtgtattaaagcctcccaaaccggcaagagggtcagaagggggcaggtgtctcttacagaaggcatgaacaggcactcaacatacgtttctttatttaaccctcaagaactctggtaggtaaatgtactctcaaatttccaaacaaatgaggaaactgagacctggagaatctaagtaactgcccaagatcacataggcttggagtggctccaaaacctttgctttttttttcatacggcatttaacatataaaatagaggtcta

SEQ ID NO: 535338 - DNA, 163 bp, Homo sapiens
aagcagtcggttggagcgagcatcccccaaagttcacatggtggccggggcttttgatagcacatcgtggttttttacatagtcatcccaaatataagatgcgtagtaacaggaaatcccttgcaatccaaaaagcaaccccatttatttctaaggagatggg

SEQ ID NO: 535339 - DNA, 1260 bp, Homo sapiens
caatcccgtcattctactctaccatctttgcaggtacactcatcacatgcggctaagctcgtactgatcttgtagcctgagtaggcctaaaaataaatatgctagcttgtaggttgcgagcgctatacgcttagaaagaataaactcctcgtcccacagaagaagctgcgctctccagtattggccgtacgacgacagagcatatccgagatccatatgaatccttctaataggctactctctctgtcatgcacagtagtactctccgagactaattgaaccatagagccaagtagcttaccaagtcaatgagctcgaatcgaatctaaatcaagtgctagtgacatcgggctatgagcgaaataagaagcgtacgcgaaatagcgcccgcttgttcacttgcttgaggtcaccagaggattagcgccagagggtaaccccttcgtgatgcatccggacctgcattcgttcgtcagcatgagcaatagacatagcccccgagtcctcaatgtcagtataacctagactcgtctccctcacgtaaacgtaggccttctcctcagtctcttcaatctctatcccatcactagtccaggcgaagttgaggtcgtgactttagaaccgaagaggcgcaagctacggcgacataactctctaagctagtactccgtcgaatgtgacccaccataaggatgaactaatcagcgagttcgtactcgtacaacacgctaacgataaaccactttcttaacttgtacactactttcatattcactcctcaacataaataacccgttagttccctacttacttcaatctttaaactccatgcaaccgatcgatccctgactactatctcgcaggctgataatcaagctaaacatgacttagacagccgtttaattcccatttccaacccttccttcttcgcctaaagaagtggcctggccccccgataaaccagggttttatgccccagaattgggggccaattatccgaagaattccacaaaaaacacataggcctctatcattccccaacaaattgaattaccagcgcaatcaaccgttcctttaacgctctatatttttaccttagacccttaatctaagttccagccttaatcaaactgaatcccccatattttaaccacggttaaaagtcaaacggaccgttggaaactataaaaacacacccaatcgtcccacatagtgtgcttaaacgctattctactatttcccctgtttgtaataactata

SEQ ID NO: 535340 - DNA, 120 bp, Homo sapiens
ctcaggatggcagcagagcagacgccgggctgcgcgctgggagctgcgtgtctccggccatggcccccgctccgccccccgcgcgcctccttctcgccctccgaggtccagcggcgcctg

SEQ ID NO: 535341 - DNA, 180 bp, Homo sapiens
atagccggctttttgggtgctttccctgctgagtatgaggcgagagtgctggagtactgtaaaagacgtgaacagcaggagtcgtcagagctctggcagccttcctcaaaaagtccgggaagctgaaagtccccgacatgtgtggataccgtcaagcgtggccaagcacaaatgagcttg

SEQ ID NO: 535342 - DNA, 220 bp, Homo sapiens
actaaagaagtaggcggaaatgagcagatcgctcctccctggtatgagcagaccgaaatttcgcttaagcggatctgccacacagcttgccccatagatgaatttcatgagctgatcaggacactgagcaaaggtaaaaataaaatctaactgtgcattggacacgcagagaaggaaatggctaattcctgataagcttttgatttttgtattgtttgca

SEQ ID NO: 535343 - DNA, 193 bp, Homo sapiens
cccttcgtgtggctcatggggtggctcttcgtgtggcgcgtggtgggctcagcgtgtgcctaccctacgccggcagccgcggataaccggttgaaccccattcgcgatggccatcggggattgcaattatcccccatgagcccaccacgcgccacacgaagagccaccccatgagccacacgaagggccggac

SEQ ID NO: 535344 - DNA, 264 bp, Homo sapiens
cgtaaaaaattttgtaaaaatgctgaagagtttccaaaaaaatatggggaaaagcgccctgtggactaaaatctcccccgattggttccagcaaatgttgagcaaaaaccccgtgcagtgcattcagaccccccccaaagcaggactttgtggaaattgacacgtgcccccccctggcgttcgcttgtggcagttactacctttttccagtttttttaatcaaaagtggtttaggtaacctgtaaaaaaaggattaaaaattta

SEQ ID NO: 535345 - DNA, 466 bp, Homo sapiens
  misc_feature (125)..(125): n is a, c, g, or t
caagcattgtccatcttgccaaagactgctgtttgtgattccagttttcagtggcttttcagcatcccatcaggcagaaaaccacatttgtcttcactactcccctcaggctggaccgttaggtngttgtttacagtcccttctccatacgggttggatggcctaaagcagccagttcttgacaacattgtgctgacacaagagtgaccatgaaaatctcttgtgctatctgcactgcatcttgtagcaaaatagtcaaggggcttgtggagctcaaagaggtatagattcttcatttacagaaaagcaagtatttctaaaattttctctgttgataagtgactaccagttttaggcccctaagaagatactagaaaaaaaagatcaacacactttattatccatcatggcaaatgtgatgcttgaacaaaggggtggaaggagtaaccacttttcttaaaaattt

SEQ ID NO: 535346 - DNA, 158 bp, Homo sapiens
ctgtgtgttgctggtgtatctgtgttgctgactgtgatctgtgtgtgctgggtgtatctgtgtatgctgggtgtgatctgtgtgtgctgactgtgatctgtgcgtgctgggtgtgagctgtgtgtggtgggtgtgatctgtgggtgtgctgggtgtga

SEQ ID NO: 535347 - DNA, 1667 bp, Homo sapiens
ttgtacattggaagtctagaatgtgtaacaatatttaatgtatactagagttcctcatgctcgcagggctttaagaaatctgacccacaaaggtcatgtgcactttatctgtactgtataaacttcattgctacataaaatgagagacccaacaccaaaacaaaggccgagccgcatcaaacaagctctcccctacgcgcgcccaaaatccttccggccgacacacaacgtatatctcataagcacccacaccgtgggcaccccacataggtcgcacgcaccgctatcaactcacgacgctcagcgcctactcgagcctcacgacaatgacagacaagcgtagggagaaatcacgggaacacaaacacgagactcaccgagcgcgagaaaccgatcgccacccacaagtggaccgcttatatccacactcctcgcgcgagagatacacctcaatactcgtgggcaaacaacctccgacctacttcaccgcgatactagcttcacaccgtcttctcaaacgaacatgctaacatctcacttcaaccaactctacactaaatgagcgatactaccgctgcttatcaaaacactaataaccaacaaaataaaaacaccacaactcacactaacatttaaataaaatattctttctcgcactttcatcctcgaacagccttaattcactctacccagagcaacaactatatactcatactacactaaattaaaaacacaccgcgactactaacaaacacccccatcccatcgctcctacccacatacacccacctcaacccacacctcatctcacaacataaaatcacatattatcacattcgactactcactcacacattcattcataacttctctacataacacacatactaccacactctaacatatccaaaaacacattccatttcatcacacaacttacactacacacttgcaacaaacacataaattaatacacacatctacatctcataatactacaaactacgaccttcactacaactccatacaaaatcaaacacacctaataacaacaccacacacacacacacacaatacacgagataagcacaagcagtataagagaccacaaaaacacaaccaaccatctacaacctacttaaaccacacaaacgataacaaccacgacgacaaccaacgagaatacgaacagtacaaccatccgtgaagacagaagcgacaggacacgcgccgcacacgccgccgatacgaagcgtcgccgaggaccagacgtgcgcagacgcaataaccacagacgcgcacgaaacaactagcacaaagacaagtacgcctacgtccgacctggctgctatctgacgtaagacagcaggaaaacacgacatgacctagacacgacgtactctagagggcgtagtcggcgtgaggctcctgaatcctgaggtgatagctaacgacggccacgccctacgactgctagtgactcctgagcggctggcgcgggcggccctgccgtccgtgggtcggactgcagtgggagcacgcgcagcgtcgtgcgttgcagtactcggatggcgtgaaggcggacttttcgtctgacgtaaggttggtgaggcgtctgtctgtggtgtgggcgtacttggggtagactgtggactgctgatgctaat

SEQ ID NO: 535348 - DNA, 120 bp, Homo sapiens
gattcccccgggccccccagggggccccccttttttggggccccccaccggaaccccccccccggttttgaattttccccggtttccccccaaaaaaggttggggccccccctgggggga

SEQ ID NO: 535349 - DNA, 706 bp, Homo sapiens
gacctctatgaggtattctactgtgcaataagctgatctcgatttcttacagatgcttgaagacatccaatgatttgtccctccactgcgtgtataattagatgtctacttccaatggaagaaaaactgttcgtgttgtaaaaaatataattagctcttaattcttggcgcgaggttactaatagcagtaggcatagaattttatgaggttacctacaaactacttaatgtactatacacatgtaagccattgtagctttacccatgacaaatgtacatgtttatcatcctgcttcatcgtcagatatcttcctctatttggcaaatgtgccttatgttaaacactatgtacttttacttattgcattgtccagacttctttattcagatggagatgtttctctactgtcttcgtagactaaatagagtatcatccaaataatggggcctagtgacttgtactgacctagaaatgaactaagctggtagttgcgtacttctccaaagagtggaagtcaagtcccagatctgttcctcctcgatacatcaaaaatgagtctcagttcacgttttgaacccagttgaaaaactttgctcttttcatgacaacactcccggatgacctggtttccccagtgttggttctccatatgctgtcaagcctaagactggtgtacaagctacccaccaaatggtctttctagga

SEQ ID NO: 535350 - DNA, 223 bp, Homo sapiens
tgcggaccgggttatgtttacggtctgaataggaaacagcctcagatgattggagatagggctcttcacaaattaccaccccctgcagaagcagaagcaggtttgtttagaaccttggagaaataagcacctctctgtagaacaagggacaggcttgtctactgttcagtatttaaaaatgtgagttctgtatgatataatccaccgtaagacataaccgcgg

SEQ ID NO: 535351 - DNA, 85 bp, Homo sapiens
  misc_feature (13)..(14): n is a, c, g, or t
  misc_feature (44)..(48): n is a, c, g, or t
aaattctgaatgnntggccttttttagatgtttttgattttgtnnnnnataattttaaattatggagcttgacctagatttgccg

SEQ ID NO: 535352 - DNA, 305 bp, Homo sapiens
  misc_feature (17)..(17): n is a, c, g, or t
  misc_feature (21)..(21): n is a, c, g, or t
  misc_feature (55)..(55): n is a, c, g, or t
  misc_feature (87)..(87): n is a, c, g, or t
  misc_feature (106)..(106): n is a, c, g, or t
  misc_feature (122)..(122): n is a, c, g, or t
  misc_feature (133)..(133): n is a, c, g, or t
  misc_feature (147)..(147): n is a, c, g, or t
  misc_feature (225)..(225): n is a, c, g, or t
gagagagagagagaganaganagagagagagagagagagagagagagagagagtncggatcaacaggatgttgtgctgtgctggggntgacagggtccaaacaggnatgcgatgtgcctttngagagccccanggcactgtgggcanggctcacattggccaagttatcatgtacatccgcaccaagctgcagcacacgcgcatgtgattgacgccctgcgcagngacaagctcaagtttcctggcgacagagatcacatctcaaagagtggggcttcaccaagttcaatgctgatgaatttgag

SEQ ID NO: 535353 - DNA, 102 bp, Homo sapiens
ttcagcagcaacgtcaaatgtgatgtgtgtgccgtgccctagagacttcaattcccccaactttaatatacactggcgcccagcccctcttttcttgttcta

SEQ ID NO: 535354 - DNA, 876 bp, Homo sapiens
  misc_feature (147)..(147): n is a, c, g, or t
  misc_feature (164)..(164): n is a, c, g, or t
  misc_feature (171)..(171): n is a, c, g, or t
  misc_feature (206)..(206): n is a, c, g, or t
  misc_feature (238)..(238): n is a, c, g, or t
  misc_feature (251)..(251): n is a, c, g, or t
  misc_feature (254)..(254): n is a, c, g, or t
  misc_feature (256)..(256): n is a, c, g, or t
  misc_feature (265)..(266): n is a, c, g, or t
  misc_feature (273)..(274): n is a, c, g, or t
  misc_feature (278)..(279): n is a, c, g, or t
  misc_feature (283)..(283): n is a, c, g, or t
  misc_feature (285)..(285): n is a, c, g, or t
  misc_feature (310)..(310): n is a, c, g, or t
  misc_feature (317)..(317): n is a, c, g, or t
  misc_feature (329)..(329): n is a, c, g, or t
  misc_feature (331)..(331): n is a, c, g, or t
  misc_feature (333)..(333): n is a, c, g, or t
  misc_feature (346)..(346): n is a, c, g, or t
  misc_feature (353)..(353): n is a, c, g, or t
  misc_feature (358)..(359): n is a, c, g, or t
  misc_feature (364)..(366): n is a, c, g, or t
  misc_feature (373)..(374): n is a, c, g, or t
  misc_feature (389)..(389): n is a, c, g, or t
  misc_feature (398)..(399): n is a, c, g, or t
  misc_feature (407)..(407): n is a, c, g, or t
  misc_feature (409)..(409): n is a, c, g, or t
  misc_feature (411)..(411): n is a, c, g, or t
  misc_feature (415)..(415): n is a, c, g, or t
  misc_feature (420)..(420): n is a, c, g, or t
  misc_feature (422)..(422): n is a, c, g, or t
  misc_feature (424)..(424): n is a, c, g, or t
  misc_feature (452)..(452): n is a, c, g, or t
  misc_feature (455)..(455): n is a, c, g, or t
cgaagtgtcaatgatgggggacaaaacgccaggcggatctcagaaggccagttcaaagacgagatcatcagatgttcattcatctggatcttcagatgcacatatggatgcatctggaccctcagatagtgatatgccaagtcgganacgacctaagagcccangaaaacntaattataggaatgaaagtgcccgtgaaagccttngtgattctcctcatcagaatctctcaagaccncttctggaaaacnganancttaaagcnnttcagtnnttgnnaccnantgagtacagctacagcgaactttangtaaaanaggaacaggaangnanttaaagaacacanggaggantgcannaggcnnnctgctgnngatttatgaggagtntcttgctgnnttttgaangnangtgntggtnananacgtgaaaccattgtgcgagggggtgtngtnaatgcagctacacagaagaacatgaaacagatgacaaaaagaggtaaaatctcataagccatcttcacagatttgcagctcaccaaaatcctccaaatcagtcttccaatgcaagaccaccatctcttctgtgatagcaacacacaaaaactccacttcacacacgggagaagaccagaacaacgccaccaccagccaattggggaaactctctcaacagacagacattacaagcacattccacgaggcccgtgcatgagacgacctaacacacaagggcgatcaacctccacctgaacctcctcagcccatctgatggtcaccgcgtgcatgcacgccttccagaaacaatcatactgctgaagatcgcccggctcccattccgcaatcactaccgtctcctgaccttacccagtacccg

SEQ ID NO: 535355 - DNA, 294 bp, Homo sapiens
  misc_feature (1)..(1): n is a, c, g, or t
  misc_feature (9)..(9): n is a, c, g, or t
ntctctagnactgggagcaactgctttaatgaacttatttttcctttcagtaagaaagtctgcatagttctgaatagctcattcttttggcttaacatatatcttaaagtagactttcaaaaatgttggtgacttacaatatgaattctccgtatttatataacaacattctcatactggcgaatttccaaaagtatcattgcttggctaatcagttttatatgtgtcttaaattttcattgtcagatatataatttgcccgtaatttgacagttaattgtggctaatttctta

SEQ ID NO: 535356 - DNA, 130 bp, Homo sapiens
  misc_feature (14)..(14): n is a, c, g, or t
tagccgatgcttanctggttgactgcatcttagaagtagtagcttgaaaaagaaaatggtattaagaagattataaggaagagaaaatatacttactattaactaagtggaagtagacgatcataaagat

SEQ ID NO: 535357 - DNA, 633 bp, Homo sapiens
tgcagtggctcacgcctgtattcccagcactttgggaggccgaggtgggcggatcacaaagtcaggagattgagaccatcctggctaacacggtgaaaccccgtctctactaaaaatacaataaattagccgggcgtggtagcaggtgcctgtagtcccagctactcaggaggctgaggtgagagggtcgcttgaacctgagaggtggaggttgcagtgagccgattgtgccattgcattccagcctgggcaacagaatgagactttgtctcaaaaaaaaaaaaaaaagaaaagaaaagaaagaaagaaaccttatgagggagacctggaaggagggggttgctagcagacctgggcatctaatgagagtgggtctagagactgtttccagccagtatcacaggtttctctggcttcagcagctccaagccttccagaagcttcagcagggactgactgggataaataacgtagtgccttctttttttttttctttttttttttcttttgagacagcatctcactctgttgccccggctagagtatggtgccgtgaacctcgctcactgcaaccttcgcccttcttggttcctacttttcttccctcactcttcttacacctctcctcttcct

SEQ ID NO: 535358 - DNA, 1349 bp, Homo sapiens
agcgggtggagcccggcgccggcggtggtgcccgggccggggggttgcggcgctcaggagaggccccggttccgccccgggcctgcccaggggagagcggagcggtccgcagccgggtcggggtcaggggcccctcccgtggaggagcgtaggagcggacaggcaggcagggcgggcgggacagaaatgtgatggaaaggaaattggcatagcctgtggaaaccaacgaaaagtgcagggaattcatggaaggccaaggttttaacttgcgagtagggtggtaaggttaaggtggaacccactttaataggtgagtctttcccaaagacaagaaggctttgttgccaggcggtcgtgaatgtccttggaggttgcataaagggaaggtgaagcagacttccccggagaaaacataggcggaattggaccatggggaaaattcggacaacaggaaacaaggttgaagccagtaattggaaaacttagaccgcaagtggacagcaggccacctccattaagggggcaccatgtaacaacattaaggggcatttacccttagggacgataaggcctgggggggaaaagccgccggccacacggaaacccaagggccacgtgggcaagaaaacgctgggttccccacccacagagttgggcagcggaattccgatcagccggcaaataggaaatttgcccgtgttaattccacaaagtccgaccctttaacacacaggctggaaaccggaacggttaagagagagagaggtgccccactacatatatgtgggcgaaacgaacagagttggggccaaggagatgaataggaaaagagggagaaggggaccaacggggcaaggagaagcaaccaggaccagaaggccgttcagagtggacagaagagccgcgcatcagaagttggttcaaagaggtgagcattggcatataggacgaaaagagaccctgtacgggagacttcgggcacacccgaggaagcaacgcattttgggcgaggcaaagacgggagtgaaaggactgggggcccatcacgtgggattacccacagctatataggtgggtagcacgatgacgtgcacaaggacaaagcactgagtaggtggcccgccagtccaattcttaccggggcagagacattagggggaagaaccagcaagggcacgcaatattacccctagagaaagggattccccaaagaggagagagcatttgtgcccaaatagcaataggccgacaggaaacaggcacccagacgtcacggaagcgcatcgacaaaaagataaagccaacaaagttaatagtgggcgcgaatagaaacaaagagagcaacaagt

SEQ ID NO: 535359 - DNA, 1006 bp, Homo sapiens
gcggtcagactgttccggcgtatgttggcttgccctgcggccggcctccagccgagccttctgccggccctgccgcgatggaggtgccccagccggagcccgcgccaggctcggactctcaagtccagcaggcgtgtgcggtgtgcgcccaagaagtctcgaggccaacttcccggtgcctccatgcatgggatctcatggcctccatggtagatccccgtgtgcagaggctggcctgcattcctcgccgagtcaccaccctcaccccaaaccatgcacgcacctcgccaggggctcaagaagcagaaagcaccaaaggacgtcaggtagtgggacaccttgattctatcacgacaggcccgcacaggacgggctgaagaggcacagcttattcccctgatccttcggacggagggcaattccgagaaattccatcccgcatgatcggtccgtgacatttccataccagaattctttcgtgatagcaagggttcttctgacattaggaatttccccccagtcgccctattgagaaaccacccaacaattgtgcggagacggcgaggacgggtttagaaaaccaaggggacacattcccaaggcagagccacagccgggaatccattccggacagacgaagtccacgaatttggccccattcaaggaccggcttcacaagatctaatagcccgggtgcagggcgcttgcttgggaccacaagcccccgatgcatataggagaaacacaattccaaccaacaagttccacaagtgcggcccccggaagagacggggacaggacaggaaagcacgaggagcagggccacgagggacagagtgcccaagacgagcttctggagggaaacgcaacaacggacagcacaatgagtgcgaatataggaacctatcacagaactgtccattggaacagaccaacacaattacacaagcattccacaaaccaaatggactctgggcaggagttgaggcccagcgcgcatcgaaca

SEQ ID NO: 535360 - DNA, 266 bp, Homo sapiens
ccagcgctggacaacatatcagaaccctgtctctacaaaaaatggagtgtggtggtatacaccttgtagtcccagccactcgggaggctgaggtgggagaattgcttgaacctgagaggccaaggttgccatgagctgagatcaagccactgcactccagctggggcaacagatgggggactctgtctcacaacaaaacaacagggaaggggaggccgggacagggggaccacaccttgtacccccggcacttgggcgacggcaaa

SEQ ID NO: 535361 - DNA, 1063 bp, Homo sapiens
tgcccataactttctcacaaagtacttcttttattagcacattcagagacattttatatatatgtcttgtgtgcgtgtccttcaaacttccaatcttcactttgtctcttggcagattgttgacacgcagcttgtctaggaaggggcatggtgactagcattctaacaattttatttgggaccatgggaatgatagttgggaaagaaaactatttgcacacgagcagattttctatgatactttttgctgtctagttttactgtaatactttattgaagcatttatgagcaaattatttattggttgtaacgcctatgaagtgattctttgagaagtttaatagagacttgaggcaaaagacagtacaaaatacactggcacttgaatgttgaatgtcaccgtatgcgtgaaattatatattgcggggtagtgtgagctttaatgtataagtcatattagactcttgaagtcaaatgaagcagagcccgggcgttggcagtgtagccataactttctgatgttcagtacataacaaaattggcgacttgaacattaaatcatgccaaggtttggatacacttgtcttacgatattaatgaaacacttcgagacagactgatgtgaaggtgtccaggatttctcacgaatgtgcggcaggtggtggaattcaggtacacatacgagccgcacaaaaccaggacctgcagaatacactctctgggcactttggccaattcccaccaaacattgtggccaaccatccgcacgttaaggaccaaagaccagtgaactgtgatacaccttgcccacgcaaaatcagacacctttgtgagagcccacggttttatatcaaccaaacaggcaaaatatttacgacagatcaaaaagaggggtcggaccaacacaatctgcgatgggagatatcacaaaatttgtcctagaatttgaaacgaatcgtgacaccaccaagctacgaaggcacatatcgacatagtgaccataatggtaacaaggaacaagacgagtaaccacgaagtctgatgagacagcacataatacgga

SEQ ID NO: 535362 - DNA, 318 bp, Homo sapiens
gctttttgtcacctaggtagtatatctatccacctgcctatcccagtgttttcctatcctgagtgtgctcgaacgaaccaagagaaaggatatcgctcaggtcctattgtcagaccctcctaaaaaacagaccacatattctagaatggttactgttcagagtctatcgttactgttgcaggaagcagatcttcatttcggaaaaggcagtaataagaaccaattcgttgacctggaattttgagcaccagagatcgcacattacccagtccttcaaagactgcagctcttgaaagatcgctgagcactgaaaactgc

SEQ ID NO: 535363 - DNA, 192 bp, Homo sapiens
tgctgctccctcttcagctgctcctcatactcctggatgttctgctgcatcttcttcttctccgcctgcaggtgctggcagtgctcctacttctacctcaacctggccctctaggtcattggcagatctctttctaattcctggcttctatggcgggtcaggcgggccccggagctccttcaagcctcgggc

SEQ ID NO: 535364 - DNA, 111 bp, Homo sapiens
tggtcgatctagagatccccactaaggcctgaattgaaatgggacatcagttattgaattatcttgcactgggaagttacagcagatgccttctaatacatgtgggatgtc

SEQ ID NO: 535365 - DNA, 488 bp, Homo sapiens
  misc_feature (420)..(420): n is a, c, g, or t
atactatgtcgaggctccttatcaatgcatgtgtcccctgaatccccttcttaagtaggagggaaaaaacgtattccatatagagttggtatgtgggaaagttgtgttttttgttttgggggtctctttagtttttttatttaagagatgggttcttgctctgttgcccaggctggataagctttggttaatgcaaacgacatcttatactataagagatacacagagatatactcacagttggggggaaatgtcttactaacattcaggtacttagtctcaaaaatgaagctactgaaaaagcttcattctcatggaggatgggaagagttacatacatgagcaactcaagggtttttttttggtggtggtggtggtaggtaggtaggttggagacggagtctctgtcacccaggctgnagtgtaagggcatgatctcggctcagtgcaacctccacctccaggggttcaagtgattcttctgcctc

SEQ ID NO: 535366 - DNA, 102 bp, Homo sapiens
ctactacccacggaacacacgctactacccacggacacacacgctactacccacggaacaccacgctactacccacggaacaccagctactacccacggaca

SEQ ID NO: 535367 - DNA, 1043 bp, Homo sapiens
tgcccttggaccataaatttttatgggcaggtcaggaaaagagccgggggtaagggtcccttccttcccatccctctacccagaaagacacccttccaaaggacagcaaaagccccagaagcctgtgctgtgccttcaaaggaccttggaggcagacaaaatggtggtagttgatcttccgtgttccctcgagcaggctgcggtagggtggcaatctccgtgctccagccggaattgtgatgtccagtgagccgtgtggatactccgtgattctgccgttcacttttcagcttcgcacattcgcccaggcgtggggcttcaattaccgtgtgattcagggccgtggattttgcgccagcgtgggcctccaaaaggcgcgccttcgcgtttctgccagtgtggtgtcttttccagagggcagcttctcagtgcctcaggcgtggtgacgtgcagctctcaactctcaagaacccgtgaaggggtgcgccgcgaggttcagataaccttcggacctgctcatctggagctgcatccggtggtggccagggacctcccggttcaatccttcagatccggcgtggtgaaccaggcttaagaatcctaccggttctgctcggcaatgacctcatatggggctttcgatgtcactcaggattctgcggaaaattggtgcccggaagcagaaatccaccttcacaatgtgtaccggtgcccacatttgggcccctaagggacagtgatatccaccacaggggactcctaggggaggacagtttcataaagcgcttaaatggaaatccagaggggatcatctggcaagggtacatgatctacgaccccgtggagagggagtatatatgggcaccaacgacgatgaggaagcagtttggtatctacaaagtggcgagagatgcgtgcgacaggatgattcataggaaccgagatgtcattgggcaaatatactaccgggatggtataggattaacgaggagcgcgaatcatgagagaataattaggagaacattagaagagtgttattctcg

SEQ ID NO: 535368 - DNA, 363 bp, Homo sapiens
tagaaacccccccggagacaactttaaatcaccaatgctcacccaattaccattatcggacattgagcctgacaactgttgggtttcgggccgtctaactaccatatgaagctagaaaatgcacaaacgatattccttatctgtaattaaaatacttaaaattggcaattgtcagatcttgataaaacgggttgcctaatttctcctcatcatgaacggaaaaaaaatcagaatttctatctttgatatctaagtgtttggaggattttaaaactgaattttatctgctataccagttatttgagaaagtttgattccaatgtaaatcatttaaaagggacaaaggtataatttccagggatt

SEQ ID NO: 535369 - DNA, 446 bp, Homo sapiens
  misc_feature (48)..(49): n is a, c, g, or t
  misc_feature (52)..(52): n is a, c, g, or t
  misc_feature (64)..(64): n is a, c, g, or t
  misc_feature (66)..(66): n is a, c, g, or t
  misc_feature (68)..(68): n is a, c, g, or t
  misc_feature (73)..(73): n is a, c, g, or t
gctgcacctccacgagagctgcgtgctgtccctgaagtttgcctcctnnggncggtggtttgtnancnccggnaaggacaacctgctcaacgcctggaggacgccgtacggggccagcattttccagtccaaggagtcgtcctcagtcctgagttgtgacatctccagaaataacaaatacatcgtgacaggctcgggggacaagaaggccaccgtgtatgaggtggtctactgagacatgaccccccttcctgtacccgaagtccagactcccaggggaatcagcagccaggacagacatcctagcagccgcctcccagccctgcctaggaaccgtacatcccatctgctctctggccaacggcttcacaccttcccctgctgcatgtgggggccgatgggcaggggacctcggtggaaataaaatgtatctatcccaaaaaaaa

SEQ ID NO: 535370 - DNA, 346 bp, Homo sapiens
taccagactactgagataagaataatgctgttattaggcataattggtacttcatagccgatgacgcatgtgagcgaatagaactgaagtgttagaaaattggtctatgcctgcaagttaaaagcatattttccatcaatcacggtctaaaggatattcttttagaattataattctcttgcacaaataaaaatttactgacagtggagatcgtggggaaagagtgaggtattaagcactgttacgttggagaaagagaaataaatcaatgagatggcagtaaagcagtttatgcagagatttaaaaatatatgtaggggaagtcctagccagggcaatcaagctt

SEQ ID NO: 535371 - DNA, 103 bp, Homo sapiens
aagccatatggtcccatcttgtttctaggttccattacaccacgaccttacttgctgggttaaattaaaagaaaatttggtttaaagcaagaagggattgcaa

SEQ ID NO: 535372 - DNA, 394 bp, Homo sapiens
gataaatcctatggtagcatgattctaggtcaggagagattagataatgtgaagccttaacaatttgctttctttctctctttcttttgtttcttttttctcttccttcctttcttcagttctttcttcccttctctttctctcccctttcttccttccttcctccatctttcttttccattttgttcttccatcaggtgcagtctacaatttttgtatatatttgataatacacaaatattaaacatgcctttatttaatcaatatttattgatcacatactttgtgcctgatgttcatctagccacaggagttatatcagtgaacaagatgaatgaattccctgtccccatgttgtttccactcagttggggaaagggacaagaaaaaaaaa

SEQ ID NO: 535373 - DNA, 897 bp, Homo sapiens
cggacggcagcgcgtgccccgagctctccggctcccccgcgtgcgtgagccgaggcagctcggagcccgagtcgcgagggctcagtcgagcgagtcgccgaggagcgagccccgcagttagctagagccatggtcgggctggaaggccatacatcgacaacgctcatggctggacgggacgcatgtcaggacgcggggcattcagttgggctacagaggactctgcccgtccggtctggggcacgctccgatctcgctcggagagaagcgttcgttcataccatcatcgccagctgtaggtgggtgtcctggtttggcaaagaccggtctcgtattttttactgtgtaatggggctagacactgtgtgtcggccatagaagtgatgctgaggtgatgtccgaggacatcgactgtgcatgctcgcgatgtgagcgaactttaagcattgcggcatccaattccgttactcataggaggacacctgagttggggacccacgcacctttcaatagtcatctgctcactcaagaactgacatacgcacgacgtagtcctgactgtattgggctaagacatggtgtccaccggatgggttatggtcaaccaagcagatgttatgatacttgggccgtactcctagccttctgggcgttacccagtaactgagccgtcgtccttgctcctcggtcgcccgttgtaccagtctaccctactagctattgctacagctcttttccttgtccgcaataatacctctgcgaatacctattgtggagtaagaactgggtcccattgacccgcgagtacccactgttattgctggcccgaaaggccaacagtgggcttgggggcctagggacctgtagtggtcagacaccttcactttacacatttgc

SEQ ID NO: 535374 - DNA, 112 bp, Homo sapiens
tcgcaaggatgagaaattgctctctactgttgttaggggatcactaattcctcctcttacctctttctcctcctcagtgatctccggtatacggtaagcatctttttgctac

SEQ ID NO: 535375 - DNA, 177 bp, Homo sapiens
gcggccgcgtcgaccagacacttactgtgtctgtttcacaaagcatgtcactacagcgccgtcactctgatgtcaccaactgcatatgctctaatgctgctcacagtcatgtcttcccatttacagcgaactcaatcccatggagaatgccacaacaaagaaacttgttccgtagac

SEQ ID NO: 535376 - DNA, 609 bp, Homo sapiens
  misc_feature (1)..(1): n is a, c, g, or t
  misc_feature (103)..(103): n is a, c, g, or t
  misc_feature (288)..(288): n is a, c, g, or t
  misc_feature (295)..(295): n is a, c, g, or t
  misc_feature (306)..(306): n is a, c, g, or t
  misc_feature (311)..(311): n is a, c, g, or t
  misc_feature (316)..(316): n is a, c, g, or t
  misc_feature (326)..(326): n is a, c, g, or t
  misc_feature (336)..(336): n is a, c, g, or t
  misc_feature (364)..(364): n is a, c, g, or t
  misc_feature (371)..(371): n is a, c, g, or t
  misc_feature (379)..(379): n is a, c, g, or t
  misc_feature (390)..(390): n is a, c, g, or t
  misc_feature (407)..(407): n is a, c, g, or t
  misc_feature (427)..(427): n is a, c, g, or t
  misc_feature (475)..(475): n is a, c, g, or t
  misc_feature (486)..(486): n is a, c, g, or t
  misc_feature (488)..(489): n is a, c, g, or t
  misc_feature (497)..(497): n is a, c, g, or t
  misc_feature (609)..(609): n is a, c, g, or t
ntggggggggggcgtgaggggtctaggtggggatgacagataccagatatgcaccgtgcatttaaacccctccccaactgccttcccaacccaacaccagagnggcacccccccacccccatctcctgccactgccctcaggctggtggctttacagaggccaggggaccagggtgagggatgctacagtttgccccatagacaaggacaagaacccttagatgagtttggctgcgaggcagggcgatgggaaggaaggtagcccctccgcggagacatgcagggggnggcccangggaccttggnagggngtgangaggtggggntgagcctggngaaaccctaccagttagaaatctaaggnaagggtnccagggtnccctccaagcntgcccacccccacacanatacacacagaaacacgggnaaaagacttacaaccctgagcacaccccaatggggttcacacgccggngtgcctcaggngnntctggggngcttgggagggggctttcctcttaggccaagactcgcgctgaaagagatgctgccttgtagtgaccaggccagccctctccaggctggggagagggacagccaaagccaggn

SEQ ID NO: 535377 - DNA, 565 bp, Homo sapiens
  misc_feature (63)..(63): n is a, c, g, or t
  misc_feature (98)..(98): n is a, c, g, or t
  misc_feature (137)..(137): n is a, c, g, or t
ggtccgataattctctcagcttgaattactccgctgattgtgacagataaatcgaaactgcantcatcattgtagaaaactgtttatccatcatctanctactattcttgcgttatcataagaaaaagaggttgtgnctgtagcccatgctgtttatcaagcaatgctcagcttgaagaatattcctgttttggagactgcctataagttaatattgggagaaatgacttgtgcccttaacaacctcctgcacagtttgcaacttcctgaggcctggtttgaaataaaacatgaggcttttaagaatcatgtgttcaatgtaggcaatgcaaaatttgtagttaaatttggcctcagtgccctggctacaactggaaatgccaaaaacttgagtttttaattgtaaagactttgttttatccccagttaagccttttttcattacatatttaagtatttccctgtcatgtcaacatgtttgcagaatccctgtatgtaaccaacagccatatttaagacatgcctggattaataaaattggtaggaatgttttcttgcccttata

SEQ ID NO: 535378 - DNA, 679 bp, Homo sapiens
gaggggaagaacctggtccttagtaacaattgtttcccctaaaaccattttctttaatgccgccttgattataaagcataagctagccccccctatggtggcgctaacattttaccatgcgtgccctttttcagggggatataacccgccggtttattgatttcaaacctactaaaagcataggtgtgttgagatttctgtgttctccactcttccgctgttatcctagtaaaagcctcaggggctgggaacaatttctttccaaagcaaaagagaaagccatgccttgggaccgagaactaagcatcacaaggaagttgcgcccaacatacagaacatgaatcctctgagctgtcctcaaaagaaagccccaaccaccataaagcacagtgttttcccttgttggtgaaaaatgtcaaggagtaaaaaacaataatgatcccatcatgataataggaatgaacgtgtctgcaactaatgggagccacatagtgcgctttcactctttcagacggcttgcattctgtggatgccagctttggaatcagagccgcctctgaaatacctgtgcttccatagttagcttttgaacagttaccttctttctggccatctttacttctgccccacatatgctttttggctttgtgcagtctttaacatgttagtgaacagccca

SEQ ID NO: 535379 - DNA, 985 bp, Homo sapiens
  misc_feature (35)..(35): n is a, c, g, or t
  misc_feature (203)..(203): n is a, c, g, or t
  misc_feature (300)..(302): n is a, c, g, or t
  misc_feature (307)..(307): n is a, c, g, or t
  misc_feature (384)..(384): n is a, c, g, or t
  misc_feature (389)..(390): n is a, c, g, or t
  misc_feature (399)..(402): n is a, c, g, or t
  misc_feature (404)..(404): n is a, c, g, or t
  misc_feature (406)..(406): n is a, c, g, or t
  misc_feature (430)..(430): n is a, c, g, or t
  misc_feature (433)..(433): n is a, c, g, or t
  misc_feature (437)..(437): n is a, c, g, or t
  misc_feature (442)..(445): n is a, c, g, or t
  misc_feature (447)..(447): n is a, c, g, or t
  misc_feature (456)..(456): n is a, c, g, or t
  misc_feature (459)..(459): n is a, c, g, or t
  misc_feature (466)..(466): n is a, c, g, or t
  misc_feature (481)..(481): n is a, c, g, or t
  misc_feature (483)..(483): n is a, c, g, or t
  misc_feature (487)..(487): n is a, c, g, or t
  misc_feature (489)..(489): n is a, c, g, or t
  misc_feature (577)..(577): n is a, c, g, or t
  misc_feature (589)..(589): n is a, c, g, or t
  misc_feature (888)..(888): n is a, c, g, or t
  misc_feature (890)..(890): n is a, c, g, or t
  misc_feature (894)..(894): n is a, c, g, or t
  misc_feature (903)..(904): n is a, c, g, or t
  misc_feature (911)..(911): n is a, c, g, or t
  misc_feature (919)..(919): n is a, c, g, or t
  misc_feature (922)..(922): n is a, c, g, or t
  misc_feature (985)..(985): n is a, c, g, or t
gtgggaagcaagccgagatggcggcagcagcgctngggcaacccggctgctcctgctcttgctgatcgcgcggtagcagcgcccagtcgagcccggggcagcggctgccgggccgggactgcgctgcgcgaggggctggggcggaaggtcgagagggcgaggcctgtggcacggtggggctgctgctggagcactcatttganatcgatgacagtgccaactctccggaagcggggctcactgctctggaaccagcaggatggtaccttgtccctcgtcacagcggcagctcagcgaggnnnacccnggccgactccgggatgtggcagccctgaatggcctgtaccgggtccggatcccaaggcgacccggggccctggcatngcctnnaacctcgcnnnncnanctctcctcctttcccccctccccnccncccncgccnnnncncccaccctntcncaccacnctcacccctcgcacntngatntngccggcaacgctggtgggcgtgtcggtggtgacgcaccccgggggctgccggggccatgaggtggaggacgtggacctgaagctgttnaacacctcggtncagctgcagccgcccaccacagccccaggccctgagacggcggccttcattgagcgcctggagatggaacaggcccagaaggccaagaacccccaggagcagaagtccttcttcgccaaatactggatgtacatcattcccgtcgtcctgttcctcatgatgtcaggagcgccagacaccgggggccagggtgggggtgggggtgggggtggtggtgggggtagtggccagccccttgtcctctgccttctgctggcagaggagcagctggactggggcttttgcacagcagccggtgncncctncgcccgcgnnccccatngccccatncancccaagggcttccccctgcccatggagtagagccgagatcttgccactatgcagtctgactcn

SEQ ID NO: 535380 - DNA, 229 bp, Homo sapiens
cagaatgccctgttgggggcttcaggtctctgtgggtgggaatgcaagtgaacttgggagagggcacgggcctgtagatcagggaaagggctgatgatcccctctctgtggatgcaacccgttgggtcccttactgcaatcccccagccctgtaacaaaaagtgcccttaaggatcaccccagcccccacagccttggaataaatttcgcaatttgtttcctaaaaaaa

SEQ ID NO: 535381 - DNA, 378 bp, Homo sapiens
ccccctgggggctccccagtcagctggaaatctttgaaaggaacccttcaaaaaagtgtgtggaatttgggttttcttgcgttggaactaccatgcagagctccaggaccaaaacctcggtcaggagcaggagtggtgtttagtaaaaacaatgggcgcccagttcttcccagcctggccccgtggggagaaacaaaacacgcctcctttcatggccctccaaagtctttttgggcccccttatttggacccttaatgggagttattattattgttattttgaaatggagtttcgctctgtttcccaggcggaggttgcagtgagccgagatcgcccccctgccctccagcctgggggctgagaagactttgtctcca

SEQ ID NO: 535382 - DNA, 668 bp, Homo sapiens
  misc_feature (87)..(87): n is a, c, g, or t
  misc_feature (92)..(92): n is a, c, g, or t
  misc_feature (106)..(106): n is a, c, g, or t
  misc_feature (544)..(544): n is a, c, g, or t
ggcctgcctcgcaaacattgcgcacgggcgtgctccaccccagcccaatctgggatagctaatgttgcaagatttgctgcggcagcngtttnggattttcagcttnccattcctgctctttcgtgccgactgccgtcgctgtattgacgatcggtgtggcggacattgtgtttgtcatgtcttgcaccgagatcgaggtactcccattttcaactctgcgcttaccgtctcgaatttgttcttggccttgcaacatcccgcccggcagttgggagtttgcaaacgtttctcggagcccgctgttatcccaaggatccattcctctggagagattatcgagagtttgctgttgtggtgcaccagtaggtccaacctgatctgcgctaacgcccggaacgttagttgaaggcatgccaatgtctgcatttgcgacattgcccccggggttgttagagacctgcatcgcacgattgccgaccccttgtgcacgctcggcgttgccgtcagtaggcccactgatggaaccactttgcatagccgaaancacaccggcgaaggccgtgttatcaaccgatcttaaggcccatagctgcgctgcttcccgtttaccttccatgccgattgatcgctggacataacgggttcgagttcaggaactttggttgaag

SEQ ID NO: 535383 - DNA, 452 bp, Homo sapiens
  misc_feature (86)..(86): n is a, c, g, or t
  misc_feature (119)..(119): n is a, c, g, or t
cagtggcttgcgcctgtaatcccagcacattgggaggccggggcaggtggatcacctgagtcaggagttcaagaccatccaggccnacatggtgaaaccccccgtctctactaaaaatncaaaaaaaaaaaaaaaattaaccaggtgagtagctgggattgcaggcgcgcgccaccacacccagctaattttgtatttttggtagagacgggatttctccgtgttggtcaggctggtctcgaactcccgaccacagttgatccgcctgcctgggcctctcagggtcctggaattacaggcttgagccactgtacccggcaacattctgtcttaaaaaaaaaaaacacgggccgggctcagtggctcacgcctgtcatcccggcactttgggaggccgaggcaggcgaatcacgagacagatcacctgggcaagagagggagactccatctca

SEQ ID NO: 535384 - DNA, 615 bp, Homo sapiens
gcggtactgaggagatagcaggacgtggagcacatcctccacagcccagattctttcatttttttgagacaggatctcgctctctcacccaggctcgagtgcagtggcatgatctcggcccactacagcttgaactcctgtgctcaagtgatcctcctgcctcagcttcctgaatagctggggctacagacacatgctactgtacctggctaattttggtattttttgtagagatggggtctccctatgttgcccatgctggtctcaaatgcctgagctcaagcaatcctcctgcctcaacctcccaaaatgctggaggagataagcagggacgtggagccatatcctccacagcccagattctatcatttttttgagacaggatctcgctctctcacccaggctcgagtgcagtggcatgatctcggcccactacagctttgaactcctgtgctcaagtgatcctcctgcctcagcttcctgaatagctggggctacagacacatgctactgtacctggctaattttggtcttttcggtagagatggggtctccctatgttgcccatgctggtctcaaatgcctgagctcaagcaatcctcctgcttatctcct

SEQ ID NO: 535385 - DNA, 345 bp, Homo sapiens
  misc_feature (155)..(155): n is a, c, g, or t
  misc_feature (181)..(181): n is a, c, g, or t
accacttttttttttaaagcttttatattttaaaaaacgtatcatgcaccaactgtgaatagctgccgttgcgcagaggacccggggaggggtcccgagaggctccccatgcaacactggaaatgactgttccagagagcgggcagacctggacnagcagcctggcgcctgagactaccancccattccgttcctgccagaaacgaccttcctgtgccggatggccatgggggcccctcgcagccaactcacccatttttggaactgcttaggaccccatgggggctgaggggggccagtgggactctggaatcttctttataataaaagcttacggacaaacct

SEQ ID NO: 535386 - DNA, 376 bp, Homo sapiens
  misc_feature (87)..(87): n is a, c, g, or t
  misc_feature (92)..(92): n is a, c, g, or t
  misc_feature (106)..(106): n is a, c, g, or t
ggcctgcctcgcaaacattgcgcacgggcgtgctccaccccagcccaatctgggatagctaatgttgcaagatttgctgcggcagcngtttnggattttcagcttnccattcctgctctttcgtgccgactgccgtcgctgtattgacgatcggtgtggattgtcagggcgcgttgcgtttggatgtcggtggcgttgagaaaatatacagcggtggtgagctaagcctgaggttgcgtgatgattcttgagctcgactgtggaaatagctttatcaagtggcgtgttcttgagtcgagtgatgcaagtgtccgcgccgaaggcatcgcaggttcggatattgcgctgatcgacagtttggtggctttgcctggtc

SEQ ID NO: 535387 - DNA, 909 bp, Homo sapiens
ggaggttcaggctacggtgagcctgaagccacacagtgagccatggaatgtgtgcagagcctcagcgagccccactgaagaggaggatgtatggaatgaggatgcactctggcagagcctcgtgccctgcactctgctccaatcctgaatggggctcgatgtgacctgtggcatgtaggtggcacatggccatgctgtgtggcagcctgcagctgagggtgatggtgtgaggcacgccagtgctgatgactgggagcctcaagcacttcagtgatgcctggccctaagtcctggcagtgtgcccccgccagcccctgaggtccaaattcggacaccaagggtcaaacatgtccatgagaaagtgattatctgcctggaccctgtcacgagcgaatatgtcactgccagaagctggagctcgctccacacaggactccaaaactcaacgccctcaatgtcatcccagaagatgattgcacgatggtacagtcgcgtgacaaaaacacacgactcgacacacagccacgagtatgcacttggtgttgcgtcaaccggatgataacggcctggcttgctctggcctgacctcctgaccccgacgagctcatggacgcctgccatctaatgatctggagacggactacctgttccagcctatacatctggcacgggactaatcaagctcatccagctagaacccttgtacctaccggcccacagagaactgtcgccatactcattaccccgggcaatacatgtgcgcccgtaagcatcacttcgctatacagccaagtacacacttagacattgaccagaattaaccatttgatcggaccccctcataaacctctcaccatgttggaccaaataatctatatatgactacagtaaaattcgcacattgactag

SEQ ID NO: 535388 - DNA, 174 bp, Homo sapiens
cgctgatccagcagctaggaccacaggcacacgccgggccacattcagctaatttttttgtatttttagcagagaaggggtttcaccgtgttagccaggatggtctcgatctcctgacctcgtgatccgcccgcctcggcctcccaaagtgctggatcagcggatcgagtgggt

SEQ ID NO: 535389 - DNA, 854 bp, Homo sapiens
ctgggtctccccctctggcgaacgagcatggtattcagagccggaatttcctgtcgaagcaccccgtggtaacacatagggtctgcgcaactgccacttcggtgctactcacacccgggtagcagaaaacaccacatatttctaaaagaggtcttcttcattggcttgtcgaaacattccccccactaggcgtgccacattgttctattgcgcacaaagggcggcgtgggaatcattcaagaccagacaaactcttgttgtatacctagaggggataacaattcccacaccccccccacttaggtatgccttcctccccatcccgggttgtggcctggagctcgccacaaagagaacccttttctaacacagggggcatgcttgccgtttcgcccgcgcaaagcataccaactacaaatgaattggcccccacaatcgcgtgcgtggtcgtatagataaacacattgccgtacctcgttccaactaaacacgtacgatatacaagaaagatacaccccttcttttttttctatacaacaaaggagtatctctcgcgcgcgaacaagattttgttttttctggaaaatacgtgtggcctgcgggaggttacaagaaacatatgtgcgcaacactgcggatcgcttattgatatacactcggaatgacgcacacccctcttaccaggggccactgctcttctcttctgatgcaaggaatcctgcgcgtgcctcacggcagacagataacgagcagcccgggtgatcattatacacggtgctgttcagcaccgcaaccatacggtcaccccgctttcgtgctgcacaatgcaaacacaaggttaaacgccacaaaac

SEQ ID NO: 535390 - DNA, 197 bp, Homo sapiens
ggttgttgctgaggtgtctagaggatcccgtacatgcccggggagactggtcttcactctcaatgcagcgcacatagatctcggcagcgtcgccacagacacggcatccctgcacactctgccaggttcagtgcactcagcgccagggttggtggcatgtgaggtgccctgcctgtgtgcttccccaatggtgtgca

SEQ ID NO: 535391 - DNA, 292 bp, Homo sapiens
ccctcccaccatcttgtgaagcacaagacatccacgggtgctctccagtttggctgcggagactatagcaagccctaaagacccctgctgcctggacttctcctgggttgtgcttttttgggggcaacataccttggacaaagctgagctgacacctaatgtttattagcctcctacctaagacacacactttgctaaattcttgacctgtggaagatgatattgacagttataaaatctcacagccatttttcccattttaatgatggggaaactgtgtcatagaggatac

SEQ ID NO: 535392 - DNA, 710 bp, Homo sapiens
  misc_feature (413)..(413): n is a, c, g, or t
  misc_feature (484)..(484): n is a, c, g, or t
  misc_feature (630)..(630): n is a, c, g, or t
  misc_feature (641)..(641): n is a, c, g, or t
  misc_feature (710)..(710): n is a, c, g, or t
gtgaattttatcctgtcattatgatgttagctggttatttggctcgttagttgatgcagtttcttcctaaccttgatggtctttataatttggcatgttttgcagtggctggtaccagttgttcctttccatgtttagtgcttccttcaggagctcttgtaaggcaggcctggtggtgacaaaatctctcagcatttgtttgtctgtaaagtattttatttctccttcacttatgaagcttagtttggctggatatgaaattctgggttgaaaattcttttctttaagaatgttgaatattggcccctactctcttctcacttgtacagtttctgctgagagatccactgttagtctgatgggcttccctttgtgggtaacccaacctttctctctggctgctctttacattntttccttcatttcaactttggtgaatctggcaattatgtgtcttggagttgctcttctcaaggagtatctntgtggtgttctctggatttcctgaaattgaaatgtggcctgcctcgctaaggtgaggaagttctcctggataataccgtgaagacgggtttccatcctattccattatccctgtcattttcaggtacatcacacttattccaaaangaccacatagnttgaagtaaagccctcctagcaatttgagcagaattattaccctgctctcagaccacagtgcacccctn

SEQ ID NO: 535393 - DNA, 357 bp, Homo sapiens
cgcgagtgcgcttgcgccggtggtgggagctgtgagacccctgtgctcggacgggacagggtcgcgggacacgcacgatgagccccgcgaccactggcacattcttgctgacagtgtacaggattttcttcaaggtgcacttcgatcggaatgtgtacccattagcaggtgtcctctttggtcatggtttggaaagagaatattttaagggggaatttccaccttaccccctggcgagattagtgatgagcccataacatttaataccaatttaatgggttacccagacacgagctggatggcttcgatatattcggacaccatatagtgatggagtcctatatgggtcccccgctg

SEQ ID NO: 535394 - DNA, 180 bp, Homo sapiens
atgactcatagaggatcccgccataagggtagggggtgataaatactattctcatattctagtattacaacacttaccaattccaccatcaggagaaaaacctatttatatgatacttaaaacattaaatctctgattgtccaccctatagggaaaaagggcaactccactatacccatt

SEQ ID NO: 535395 - DNA, 105 bp, Homo sapiens
tagctcggtaccatcaatttggtgcagccgggccgccgatacgccgacgggagcgcaggtaccgagaggagcggctgagacactcgcggaacccgtcttccagag

SEQ ID NO: 535396 - DNA, 153 bp, Homo sapiens
ctgaacacattaatttgcctgtctgtatacaaggatccaagacaatggaatcaagatgggcattttcacgtctccctttgatctcttatgatgatcacatggtgtaacccaatgtgaactgtaatgtagagataaagtatttatcgacgttga

SEQ ID NO: 535397 - DNA, 279 bp, Homo sapiens
tcaggctgtacctctgttgtctaaaattaaggcggttctttctccccttacagaggctgctgaagaggagtctgatgatgaaatagcagataaggattctgaagtgggtgatttgttccctgtatatacatcggcctttatatcctcatactctgtaagaatgagaccttcatgaatgctttccttgttggtatatcgactaggatacttgggatgaagatgaggaggcgagtgcaagtgaaaaagatgaggacgttgaaaaagggaaatggaggatgc

SEQ ID NO: 535398 - DNA, 128 bp, Homo sapiens
tagagggctgatgtatctcggtgatggcagggaatgccatatccttcagggtagatttaatgattaattgagtcagggaaagggaaaagaacaaaccctctcccatcgatgacgactcagagctatga

SEQ ID NO: 535399 - DNA, 448 bp, Homo sapiens
  misc_feature (182)..(182): n is a, c, g, or t
  misc_feature (425)..(425): n is a, c, g, or t
agcgtgtgtgtgtgtgtgtgtgtgagagagagagagagagatagagacagggaaagagtgagtttaccaaaaaaataagataggaaggttgtcgtaacatcttccatttctcaacttctgaagtccccattttcatccctggagagaggttgttctagagatagggatatctaaaggaacangagaaaatcagagtaatggaattagctaaaagggaaagtggtgacctgaagaccaaacactaaagaagggggccgagtgaagtggcaagagaagagtgcagacgcaaaagaactatgcagggtagactggggtcctatgttagtgaagggcccacagggctgcgagggtaaacccgatgcaaggtgtcgaagtttaagtagagtgaaaatataagatgggcagacctaccacagcagaaccanacacgttggcatgtttcgtgatg

SEQ ID NO: 535400 - DNA, 705 bp, Homo sapiens
  misc_feature (576)..(576): n is a, c, g, or t
  misc_feature (584)..(584): n is a, c, g, or t
  misc_feature (667)..(667): n is a, c, g, or t
  misc_feature (696)..(696): n is a, c, g, or t
ctcactctgtcgctaggctggggtgcagtggtgccaccttagctcactgcaacctccacctccggggttcaggtgattctccttcctcagcctccctagtagctgggactacaagcacgcaccaccacgcgcagataatttttgtatttttagtagagacggggtttcaccatgttggccaggatggtctcaatcacctgacctcgtgatccacccgcctcggcctcccatagtgctgggattacaggcgtgagccaccacacctggccgacttagttctaaaggttccaagcagtgctatgaatgaactaagtagcatcctggcccctctcccaaacttctcacctacaatttatcacaaaagataaaacaactaaaactgaaaatggagaaaattattgcttcagttttttaatctaagctctgattcaaattttgcttctcagcctcaccagtcccacgtggctctcaggaaaaaaaaaacaaacaaaaaactgtatacacatcgcagaagcaagaaaacagaacacgttttctgccttctagttcactccccagaagccagagtaagatgantcccgcantccaacacaaaccttttaataaccatgttaacataaatttcaataaaaaagaactccaactttgctaattttgttacaaaaancctaattttttatctgaaatgctgctttncctaatttg

SEQ ID NO: 535401 - DNA, 226 bp, Homo sapiens
tcatgacaactaagcaaaaagtgcatttatatttcatacaaaatactgtgtttattaagatcctctgaaagggcatgattgtataaatcaagaagcatctgtaatattttgcttaaaaattctttattctttggctgcagtagtctagcagctatccacttagcagatttaaaaaatgtattgttgcagaatcctccacagttcttggtatttcagttatgactac

SEQ ID NO: 535402 - DNA, 727 bp, Homo sapiens
aagtagtgttatatacatgcccccgtagagattgagtaagtccgcttgatcacaggatatttctcggaaatagatcaatctcagacacaattggcccctggtaacacacatctatacagagacagaatttcgacatcagctgattcactaagtttccaacttcagtaaactgtgagctatggaatttttctcctggaattttccccttgatcacagggtccaattattctgttctagctagttgctattgttgagatatgtcgggttgatgttttgtttttttgttttttttttaaggttcaaatataagggcagaaaaattggaccagaaacgaagtaagataggattgggaaagaagttgactaagtgtgcttagttttaataagtaattccttctcttttttacagagaaggcgcttacagtaaattgttgtgcttagaattgctggatgcatttttaccacttccacacaaacctaacaaattttgtgacccctttcaacttacctgataagtagagaaagtggattcagtataatggataaggagggaaggtggaccagaatgaaaactgtaaatatttttttaacctgatatcacttaaatccgaggcagatatagatatagacattcaatggaattatattctatgcactttacaataccaccgtcatttaaccgcgtccagtatagatccaactttaacccgggctagcttcccaactt

SEQ ID NO: 535403 - DNA, 948 bp, Homo sapiens
gaatgagaccaaagtcatcaagcagtgctatcaagatcacgacctgtagtcagaatggctcagcaccaaccttcccactatgtgccatgcagctcttttcacacatgcatgctgtcgatcagcactgccacctgggatgcggcgcagctccatccaaagcaccattcagcatcagtcccagaaatcgatctgtgaccccgcttgtcttgattacgaatgtgtggagcatgcataaagcctaataatatacaactgggacattaaagcctgacgactagggttgtggttgctgcccacgccggctggatagtcgttcctttttctggaatgtggccccaggggctgaaagcgcagtggcttcctttgtcagccagtgtggctgctgctgaagctttgcaaaaggcacctgatgtgaccacacctgccccgcgaatgtcaatgtttgtcttctttcaaggggaaactttgactacagttggctagctcgaggatggtctacgatatggcagaagggcaagtttcccgtgcagtgtagagaatgtgacgtcagtttgtggagctgggtacaggtggcttaaggaaccttcattagagctttggatgcacacagatcctgttgctcagaaagaatgagtctgtacggaacccaggtggaggatctcctggcacattggaagacagacgtggtgctggtgtcctgatgttatcctcaggaggcaaatcaggtccaggctctcccaccaatttcctggagggattgttcagctcgaaactcctggggtgtttggtgaccctctggtgcttcttaaaattttcagatatagaaggcggggaattagtgggcaccagggtgaccgaaagactagatgataacatcaagctgaaattgcaggtaggggctcggaagagacacagaagaggacacagacgcggcgtaaaatgaacgag

SEQ ID NO: 535404 - DNA, 151 bp, Homo sapiens
gtcgggagccacatggtaggtgacctcttgactcctctcagggcagccaggtacaaggactcctctgctgagtgcatgttctggcaggcattcggctcacacagcctagtttccaatataaacacgcgctgcgacctgtccaacggtgccc

SEQ ID NO: 535405 - DNA, 374 bp, Homo sapiens
tgtgggtagcaagaatagcaataatatgtggaacaacaatcatagttttttttgtttgtttgttttgagaaacagtctcgctctgtcgcccaagctggagtgcagtgagtggcactgatctccgctcactgcaacctccgcctccgaggttcaagccattctcctgcctcagcttcccaggcagctgggactacaggcgcacaccactaagctcggctaatttttttgtatttttagtagaaatggggtttcaccatcttggccaggctggtcttgaactcctgaccttgtgatctgcctgcctcagcctcttgaagtgctggaattccaggctgtttacagtttttaaagtaaactttacatacggtgaaatg

SEQ ID NO: 535406 - DNA, 308 bp, Homo sapiens
tatctgatcactacctgataaccctcgaactatgcgtcagcacattgaatcgatagtctaggtgttcacacatactagtacgcctcgaccaggcggaggatccataataatccaccagtcagctggcaatcatgtcgtagaacgctagcctaagagccctaacaggggccctctcagccctcctaatgacctccggactagccatgtgatttcacttccactccataacgctcctcatactaggcctactaaccaacacactaaccatataccaatgatggcgcgatgctactcgaaagccccaagcg

SEQ ID NO: 535407 - DNA, 950 bp, Homo sapiens
  misc_feature (950)..(950): n is a, c, g, or t
ggttcggcggggcgcgcgccggcggctgcagagtctggcagtgctgacgagagcagtctgtctacctggtcgcgagcgatggcgcccgatgcgggcgccccgggcatagcggtggtgctggaggctgccgagggcccctggcgcgctcggccctcaccttctccccatgcccttgcgtagtagcccagccctggctcaggaccagacaagtgggggttccttggaagcttggtgcgtcgtagtcggtgctggctctccgtaagcaccgggatggctggtgcacgtccgacggtcttctgtggcaattccacgtcgaggaggcagtaaggatccctccatccattgtggactgctggggacagacccaggatctccaggtggacggttgcagtatgattgtctatcatgtatttcacttgcctgatgaatgagctcaactgaggagatgttgctgaatgcaatcttgcaggagggattggtcacgtgtagccccaaagtgaaacggccacgtgctcttcacagtgtgggtaactccttgaaccatgtctaaagtgattatagaatcaacgttgttttccctttgctcccatcgcgcatcctcgtgcgaccaatgggtggtccattatacaacttgttccatttgtttatagcggtgaacccccgaaactgtcttaagagaattacgagataccttagagtgaggccctaacacttcctcgtagcggtccatcaagcaagtaacaggcgtttgcaatagcttattccgaaggggcgaagtgaacaaagggtgttacgctatggagagcggttgcccccatagtggaacaagcaacgttggtctcttttccaacatgtttggtaactctaaaataggtccttatattggccgcgctaagcttttgggaataccttaacacagttatgggtttgtacttttaagaagaccacan

SEQ ID NO: 535408 - DNA, 592 bp, Homo sapiens
  misc_feature (559)..(559): n is a, c, g, or t
  misc_feature (576)..(576): n is a, c, g, or t
ttcaaggagcttatttcgtccatgcgagataatgcctgaccataacacaatcattaagcaacttattatccaaatgggccgttcactcattaatgccgcattcacgatgattaccagggccaaccctgtcaacgtcatcataatgataaaacggtgagaaccaggatcaacattaaataataaaccggccagcatactgattaaaaacatcgcgcccgcagtgctgaacacgatgataatggcatatacaggaactaaacttgcaacgacaatcgccaccaaagagagtaaaaacagatatattacgcccgcgatggcggcatttatcttgttgatatccttacttaagccatacatacaaagtaataataaccctatggcgacatacattggtggtgaatcatatttggttgccgtaatttcgatatacttagctccccaggctagtcctgcggttgccaccaaacctaaagcggtaatgagccatataccgtttaatatcctggcctcgtgctgaaaatctaatttattgctggtttgcgagtatgattccattctnttagttatccttagaanaaatattaatattcac

SEQ ID NO: 535409 - DNA, 340 bp, Homo sapiens
  misc_feature (35)..(36): n is a, c, g, or t
  misc_feature (45)..(45): n is a, c, g, or t
  misc_feature (58)..(58): n is a, c, g, or t
  misc_feature (80)..(80): n is a, c, g, or t
  misc_feature (93)..(93): n is a, c, g, or t
  misc_feature (95)..(95): n is a, c, g, or t
  misc_feature (123)..(123): n is a, c, g, or t
  misc_feature (160)..(160): n is a, c, g, or t
  misc_feature (225)..(225): n is a, c, g, or t
  misc_feature (239)..(239): n is a, c, g, or t
  misc_feature (241)..(241): n is a, c, g, or t
  misc_feature (251)..(251): n is a, c, g, or t
  misc_feature (290)..(290): n is a, c, g, or t
  misc_feature (313)..(313): n is a, c, g, or t
gaaattgtggaggatttaattaacattccctttcnncgggcaaanaatggaggtgganaagtaaatgtggtcaagtgttntttaggtcaaccncncatagcatactttgaagaataggcttancagaatcatgaaaactatagctttttaacccggattnctgtaaatgtttgccaaaaatgaatatgcttttccttaaaaaatgaaaactttaatttttccccnccctttatgtttananacaaaacttntttccatgtttttgaattttttttgtttcaaatggggcngcatgttttcaactccaataagngccctgtaataaaaagttttgtttata

SEQ ID NO: 535410 - DNA, 428 bp, Homo sapiens
ctggaggctattatcttaagtgacaactcagaaaaacatagtacaataaagatttttaaagaaccctcagaaacaaaaaaaataccacatgtttccacttacaagtgggcgttacccagggtgtatacagggtcatggagtgtggaataatagacactggaggcttggaaaggtgggagggggcgagggatgagcaattacctttagggtacaatgtacagtattttggtgatggttacactaaaagcccagatttccccactacacaatatatccatgtaacaaaactgcacctgtgaccaggtgtggtggctcacacctgcaaccccagcgccaaggtgggcagatcacctgaggtcaggagttcgagaccagcctggccaacatggcaaaaccccgtctctactaaaaatacaaaaattagccag

SEQ ID NO: 535411 - DNA, 666 bp, Homo sapiens
  misc_feature (366)..(366): n is a, c, g, or t
tttgggctgaccccccgccaaaactgttgcgaatacagcgagaattttccaacgaagaaggattgctcggtggattcaataaagagagtcttgtcgcttaggtaatcgccctgaagagcccccagcagggaccctcaccaacaaaaaagggtggatccgagtggatttactcccgtagattctcccacaaaagagtgttcaggagtgttgtgaaccccgcgcccagggtgtccccacacgctgcactctatgttgggcacacacacttgtggtacccaccactccgtgtgagtaggtaaacaagtatatgtacgcgcaatacaaggtggacatggatgtatacacacacgctgtgaaaattggtangtacccaacacactgacacggcgggacgacatacaatgtttgtgctaagaatacattcttagggagaggcactcagcccctccctttcttgagggaaatattgttgtaaagggaggttcctgtgctgattattttatacactactccctccgtacattctctaccacttatataccaagtctcttttagatacacacaccctgaagttatattaacacgcagagttattaccccccatactcccattactcaccccagaaaaaaaaaatattatgcaacaccccccaatagaacaaaaaa

SEQ ID NO: 535412 - DNA, 160 bp, Homo sapiens
ctgggcagatgagctaaaagatatgattcgccactctgaagattttcgcccctggtctttgtactacatgcctccagaaaccatgagctggaagcctgtagctggcctgacattggctggagatgcagcccacgtcgcaactccaaacggcgaaggtgta

SEQ ID NO: 535413 - DNA, 345 bp, Homo sapiens
  misc_feature (69)..(69): n is a, c, g, or t
cttcaccttctcccacttgaatgtcctaatataaatgtcaaaccttacatttccaaccctggtgtgggntgttacgcctgtaatcccagcactttgggaagctgaggcaggagaattgcttgagccctggcatttgagaccagcctgggcaacatggcaaaaccatatctctaaaaaaaaaaaaaaaattattcaggtgtggtggcgcactcctgtagtcccaggtatttgggaggctgaggtggaaggaattacctgagcctgggaggcagagtttgcagtgagcagtgttcacaccactacactccagcctgggcaatagagtgaaaccctgtctcaagcaaa

SEQ ID NO: 535414 - DNA, 689 bp, Homo sapiens
gtgttgaacgaagcaactttttatttaaaaaagctctgccctgccactgtatgaaagtctctttatgatcgtttgtttttttgtccattttgttcttttacactccagaaattttaagtttaaaaatatgcgcgaggaatgtatattggcctcctgcttcctcatcacgggttgctataaccctcggtgacctcggtatataaaaatgtattaaaaactcggggtttgttaccccccttgcctgtaactcttgtatatagaaatttttataaaattgtatatggcttcaccgaaataaattttattttttataaaagacaaattataaaggttttataaactcaccactccactattacaccccttcccccctgagaatgtataggatccctcttgtcatccggagatccaaaccccccgttcccttgtgaagtgtgctatatttagaacacgtcttaaaatgtacacgtgtattttatagaattgagagtttacacttcttattttccagagaatttatggagcgttgtagaaatgtaccaaagcatttcccaactgccttaacgcttgtatttttatagacaagttttttaaaaatcctaagtttttaaataactatggatttgtgtattttttttggttatttgttttattaaacatgtacatccgtaaagagttttaaaccatga

SEQ ID NO: 535415 - DNA, 957 bp, Homo sapiens
  misc_feature (53)..(53): n is a, c, g, or t
  misc_feature (152)..(152): n is a, c, g, or t
gagaagaggaagaagcggacacacccaccgcaaaaaaaaagcccaacacctcnagagtgcacagactctcttcttgaaccaccgcaacaggttttggagatcatattcattggaggacactggaagatgggaagaaagaagcagctgccagnggactgcccctgatggcgatcatccataaatcctgcccgtggagctagccaagccctaaagcccacatatccacaacctacaggaaattgcacaaccctcccataacccaacgaacgtcaaccgttttttttaaaccacgaaccccgaacaacacccacaaagggtcagccagggagcccttcccccccgcctccccttcacctgcccacccagcgtccccccgccccccccccccgcgcaaccacaaaccacaaaccgcacacccccaagccccccagcacttccgcgcacccgccatcctagacagagtaacaggcgacaacaaggcgcgaccggaccggcgcacgcaccgatgcgattcccacgcatcagtctccccagcccgccacccaccaacccaccgcgcccccccccccaacgtagtaacacggtacagtataagccacgccaataacataaccacacctccagcgcctcacgcgcggccggcgcacccaccgccccacccgactccccccgcgcccaccgccgtccagcgacacacccgaactgttccaagtgcaaccgcaacgaccaacacactgcaccgcaccacgctacacctctccaacataatcatccgttacaaccctaccacggccaccggacaggatcacgccccgcatacctatctcacaacctgaccgcgacacgcccccccgccactccacccgcccccgccccgaccacaccccacccatccaaccatctacagcccacatacgccccaccatcctctcggagcccacgcacacgaaacacacg

SEQ ID NO: 535416 - DNA, 503 bp, Homo sapiens
tataatggactcatgcccaaagctgtctctgagtttacagtgaggccgagaacagagtaagtggagtggctttaatcaatgagatgaaattataacagctataactgaagtctccaggcaggaggctataacaactcagtcagtgctatatcgtgcctccattttacttccaggacctgactggcatcaccgttcttgatgctttctacaaatataaaaatctctgcaactgtttagatacacattggaagaaaaaaaaacagcgccaaagctgaccataaaaccaacagggggttgggggagcgcagagccaaaaaggccaagtatacatacacatagttcaggaaagtccaggattattgcagaaattaaaatgaccaaggacaagggcagcgccaataaaagccctaaagctagcaaatgcctaactggttaattcagagtcctccccacaatgttcatagggcaggaacatcatgtactttgaaaagcttcaaaagtaa

SEQ ID NO: 535417 - DNA, 257 bp, Homo sapiens
ctggtacgtgacagctgcggcaggtctaggtgagagacgttctggaccagccagctggggtggtaggtcgggaggtagatgtcacatgtcagtgtcacttggcctgaatggtttctcggatccagttcgtgtatctgcagacgttgtgtgtagactccgtggcttctcctattgatccacagggcgatgttaccccactgacacaacggcctcggaggatggtctccacattaccatgcgtgaccccacagaactca

SEQ ID NO: 535418 - DNA, 217 bp, Homo sapiens
aacagtagaaccgcctctagaactctcattactattaccaacgaggaaatctgtactcaaggaaataccttctcagtgatccatctgcgagtggcactactcctcagtgtattatacaggccccctcccttccctacacatcaagctcgaggatttgccccacccaggactggcaaattacctttactaaacctgccctgagtcagataactaaaat

SEQ ID NO: 535419 - DNA, 308 bp, Homo sapiens
tagtgatcataaagcttggaacaaggaggtcttctcgaggccgagacagtgttctgggctggcacagttgacttcacatggggcaatggcaccagcacgggcagtagctggcaccttattggccagcaacatgtccctgtatctcagaagaggatcctccttgtgtgaacacaatagccctacattcccccgtgatatgtaggcagcagatttctccacgagctggagttgttttccacggtgccctcgagatggccttgcgcagtcatgtgtgttctatgcgtaatcacctaccaggtaattctccg

SEQ ID NO: 535420 - DNA, 169 bp, Homo sapiens
ttttcagaatataatagtgatgagttatcaaaagttgttggaaaatatttggaagaatatgaatatggaagtggtggtttgatattttaattgcagattgtgaattcgtcccctcccccgcccccacctccgcctgccgaggcgcggaataaaggatgagttcgctcca

SEQ ID NO: 535421 - DNA, 875 bp, Homo sapiens
  misc_feature (594)..(594): n is a, c, g, or t
tattggggggggttatattttttttttttttttttgggaaaaggatttgtggccgccacccgggggggagaggggggtccccggacccccccccccccagggtctgacagaagttcgtctggccgccccctccccctaatacgtgtagagtggccgggtcgtcccccacagttccccaatataatattttgtgattatttggggaaccaacaacgtggttcacacacattggtggcgaccaggagtggcctacaacctccgtagagacctgtgtggacaaccgcgccgtgctgctgggcctcccacaatgttgtgggagttacacggtgtgatgcacacaacgccccgcatggaatcacttataggtgggggttctaaaaacaacatcttttaatatggcctcgcggggcccctgcagttataaaagaacagtggtttaacaagcgggtcgccgcaggaatcttctaatgatcattccacaaaagaccctctggtgggcgcgactacaatagtgagctgttcccctcccacgcgagtagatcacacacgccggagcaacttagtggtcagccgagtagtggactaactagcggnggagaattttggtggcgccccccaactgggcggggggggtgggggaacaccttctctccccagaagaatttaaaagagagaggggggaacaaacaacgtggcccccagtcgcgtcctcatgggagaagctagtgatcggcggaacatttttttcccccgcgggagaaagacgagctttttccccgaaacgggggcccactcactagaggagaaggggcggcaccaccaccacggggggcgaacccacggggggcaccaaccaacccttgagcgagcttggg

SEQ ID NO: 535422 - DNA, 364 bp, Homo sapiens
  misc_feature (257)..(258): n is a, c, g, or t
  misc_feature (264)..(264): n is a, c, g, or t
  misc_feature (267)..(268): n is a, c, g, or t
  misc_feature (271)..(272): n is a, c, g, or t
  misc_feature (274)..(274): n is a, c, g, or t
  misc_feature (277)..(278): n is a, c, g, or t
  misc_feature (353)..(353): n is a, c, g, or t
gtttttttctcatttaatctgatgtggcattttcgtcatctgaagcatgagtgacaagttgggaatgatgtggtgatttagaatgcagtattggccaagtccaagttgtcaacttaagcgtctgtttaccaaagaccgggaacaggggcccaaacatgtccagtcctcttcttccctctgctggaacctttggggacactcaagggttccagcagagggaagaagaggactggaacccttgagtgtccccaaaggtnnagtttnacnntgnncnggnncatgaggctgcccagagaaagcactgcttctgtatgtctcttgtggtattggaacaataaacccgtacaacctgnaaaaaaaaaaa

SEQ ID NO: 535423 - DNA, 211 bp, Homo sapiens
ttccaaagccgtagtacccaaaaaattgaaataagaggcaggcgcagtggctcgtgcctgtgatcccagcactttgggaggcagaggtgggtggatctgagaccagcctggacaacatggcgaaaccccatctctaataaaaacacaaaaattagctgggcgtgatggctcatgcctgtagtcccagctacttgggtactacgctttggca

SEQ ID NO: 535424 - DNA, 107 bp, Homo sapiens
  misc_feature (65)..(65): n is a, c, g, or t
  misc_feature (86)..(86): n is a, c, g, or t
gatctgtaaagaatgactttcaaggatagttcttaggggactgtgaaagtgttgggtcttactcnaggatgcctgcatgggacccnacccggagctggtgtggccat

SEQ ID NO: 535425 - DNA, 770 bp, Homo sapiens
agcggacaggatgtcgatgtttcaagtcactcttacaccattaatgggttgaagaaaatatacagagtatagtttccgagtggtggcctacaataaagcatggtcctggagttgtccacacaaccatacgagcattacgaagcatggtgcggactgatacgcaggtgtgtgctaccgtctagcatctgctgctgcattgggcaaggtgtagaaataccaacggagtgtagatagtatgtcaaatggacggaggcaagaatgcttgagggcacagtaaaatggggccgataagtggactatcacaggatcttcgcgtacccgatacaggtgcctcacccgtagagagtacgatgaactgttcagctgcacgtaacccttgggttaacgacggggaactacgagcgttggtcctcgaaaactgagtttgaagaaggtctagaattcgggcggtgagcatgtaggtaatatgactttctctgaatgttggggttggctctacacacggggtcccaacgtgtgtgaacaaggagtccccggagtacacaggtagtactagtggtggaatagttaggagtcggaaacttatttttgaagattgttcgaacctgtgagaatagtaaaaacctctggaagtttaacgtgtaggcgttggcctcttagatttcgtccctaattgaacgctaatctgcccccggcattcatggttttggacataggtcatttacaagtaaagatgtaagcctgggaaacctacccttcccaagcataaa

SEQ ID NO: 535426 - DNA, 190 bp, Homo sapiens
ctgcttgtcctgctctgcttgtcctgcctggcgcgtgggctgatgggggagagggacccagcccattggcagaggcaggacaagcagaggcaggacaagcagaggcaggacaagcagaggcaggacaagcagatgctgttaactgagaatgggaaaaggagatactgaggtaccagaggcaggacagcag

SEQ ID NO: 535427 - DNA, 586 bp, Homo sapiens
  misc_feature (378)..(378): n is a, c, g, or t
  misc_feature (443)..(443): n is a, c, g, or t
  misc_feature (448)..(449): n is a, c, g, or t
ttcatgcaaactttatttggtgtgaggaactactgaggatcagagtaatccaagcaaatgtgaatcattttacctttgacaaaggtaaatcagactatgaagttttttttatacaggatgatgactatggaaagagtactcttgtttccttatattatggaggcagttttttggtgtggaaattgttacaaactgtagaagccacggggttctgcgatataagtgtctgtttttcataaagcaggcagaactcatctaggtaaattacagttcctagaaataataaacattgtattcagagttgatgcatgtacatataattgagtgctgtggttaggtgcaactttcttctaaagtcactgatcaattcatacacancaccgctacggaccctctcctaaagagaaacttaggtacaatggggcagatccaagcttagtacnccttnnaccataagaatagagcctttaactctccctgttttaaagctgggaaattaattatttcccgacccctcttctccccggattatccccgacaaccacgcacccggcaatactcgggcaaacaccgaagcgtcacacat

SEQ ID NO: 535428 - DNA, 226 bp, Homo sapiens
gctggtatctagaggatcccaattctgcaccacagcagcaggtgcctcacgccacacctgcaccaccacgacaccgcaccagggaggaggctccacgtcctgccaccaagcccacccaggggccagctctgccagcgagcccaggaagcccctccaaagccagcagaggacaagaaaaaggattagtcgagactggtcctcacctgctccgggtccggcgctgcgg

SEQ ID NO: 535429 - DNA, 104 bp, Homo sapiens
atatgagaccagaccttgtgctacatggtgaatgtcctgtctctgctgaaaatacaatagatattagctgggtcgatggtggcaaacgtctgtagtcccagcta

SEQ ID NO: 535430 - DNA, 300 bp, Homo sapiens
  misc_feature (107)..(107): n is a, c, g, or t
  misc_feature (257)..(257): n is a, c, g, or t
ttaagtcaaaggctagaaatgattaaacttagtgaagaagacatgtcaaaagccgagagaggccaaaagctaggcctcttatgcctaacagtcagaaatgcaaaagnaaaattattgaaggaaattaaaagtgaaacaaccttattgctgatatgcagacagttttaatattctggatggaagatcaaaccagccacatttccttaagtcaaagcctaatccagaacaaaatcctaactctcttcaattcttacganggctgagagaggtaaggaagttgcagaaaagttttgaactagc

SEQ ID NO: 535431 - DNA, 916 bp, Homo sapiens
gggcatgtgccaccacacctggctaattttgtattagtagagacagggtttcactatgttggccagactggttttgagctcctggcttcaagtgacccacctgcctcagcctcccaaagtgctgggattataggtgtgagtcaccatgctcagcctatttatttatttttgagccaagatcatgccatggtactccagcctgggcagcgagagtgaaactctgtctcaaaaagaaaagaaacagaaaagaaaaggccgtgcaccaccgcacaccggctaactttgtatttttagtggagatggggcttcaccatgttggccaggctggtctcaaactcctggcttgatgagatccgcgtgccttggcctcccacagtgctgggattacgggtgtgagccaccgtgcccagcctaagtactttgaatgtcaatagtactggttctctttctaaatatactttttaaaaattatcaaaagagccaggagtggtggctccagctctttgggaggcagaggcaggattattgcttgagcccaggagttgaaaccagcctgggcaacatagcaagacagatctctattaaaaaactttcaaaataatgccttaaaacttccacagtccaacggggttctagtggacagtgatcattccagcatgagctctatgtcttaccctctgtgaagggaactatgggtacgagttctaaatacctttccaagttcacctcctgtttagacacccaatggtctgggattaaagcgcgggttcctttcatgaaccaccctgactttcctgttcacattggggttcacgctttgagacctccagttaacaaacctcaggccattaaaaatgtcaccccaaaaaaaattacggaaccatcgttataaagccaccatgccctcgtgcagact

SEQ ID NO: 535432 - DNA, 178 bp, Homo sapiens
  misc_feature (92)..(92): n is a, c, g, or t
  misc_feature (153)..(153): n is a, c, g, or t
tcatgagaggtgttcacagacgttagcagggcatcgcatggaccgcagtagggcagattcggaccactaggcctgaaatgacatttcactanaagtctccaaaacatttctaagactactaaggggcctttatgtaatttctttaaatgtgtnattcgtaagaattcaaatttgtata

SEQ ID NO: 535433 - DNA, 1724 bp, Homo sapiens
  misc_feature (163)..(163): n is a, c, g, or t
  misc_feature (601)..(601): n is a, c, g, or t
  misc_feature (868)..(868): n is a, c, g, or t
  misc_feature (1084)..(1084): n is a, c, g, or t
tagtacaaacttagggctctttattcaggcagtaaagtagggaacagcaaagggggagggtctacaccattcaccaggggcaacagaaaagccctcaaaaacattaaagttcccttcgaactttagtgttgccgggtagaacctcttctccatagccctcganggagaaaaccacattttataacgtggcgtggaggacaaggtccgaggcagccgggcgccaccactgtggggaagagggcaagcgtggcacgcgcgggcctctctgtggttcgagctcctgtggcacagtgtgcttgtggcgtgcgagggctctctccagagccagagctctcctgtgcggtctctatctcagagccccacactctcttctcagagacccccggtgtaagacgccccgcggagaggggctctctctatatcacaggactactgtggcggccacccagtgttggacattctgtgtgcccccaggggtgtagaacctcttgggtgctggagtgtgtggggtgtgtctatcacaggagctcctctctctttctctgagagtataattctccacactctctgtgggggagccccctttatgtgggtcttctcntcccgagaaagagctctttaactaatatatatgagagtgtgtgattaactctctctgggagcgggaaacatctatctcacctccttccgagggggatgtggtgataatctctgggggtggggcggtacaaacaccaaaggtctcccccttattaaaagaatctcccttattcccccaacaccgaaggggagcgcccacaagagctctcttatcatatttctccatctgtgggctgtctccaaaccccctcttgggcggcgccacacntgtgctgcagtggtgtccccaactgtgggcgttgtggtcccccgggggctgctcacaatctcaaaatatctccccagagtgggccgcaaagtgggcgccttcccaagagggtgcccccatagaaagtgtgcgctgtgtcttagcagaacacacaggggggggggtctccctccacaaagaggcctgggtgcccacttcttcctgtggtgctattcngttcgcaaaggcgggaaaaggcttcttctcccaaaaaggggatatagaagccctttcccacttctttgtgggcccccaaccgttgggctctcctggggcaatgtgttgcccccagagggaatttttctaccagggcgaaaagggggggccatcttttcccctcgttttaaatacaatcacccaggccaacgccgggggtcaacaccacaacgaacaccccggctggtgggaccagccctcggaggaggagagaagtcaccgccttgtggaaaatattcctcgtggcggcagttccacacacaccttttcctgctccccgtgtgtgtgggggcccacaaaaagggcgcgcacaacaaactgggggcgggggaaggaccacgccgacgggaggaggggtgagtgtcagctcttgccaacagtcgtggtaacgccccccccttgctccacaaacacatgtagtttgagtgcagaacgacaatgatgacgaggggtagagcccccaactctacaacgaaggagcgccgcttggtgttctaaaacacagcgcggggcgctgcacagaagtaggtctctaccaatcacacaagcgaggtagacacaacacgcagacaacacagctgagtcaacagcagacacctgt

SEQ ID NO: 535434 - DNA, 246 bp, Homo sapiens
ccgtagtttagaagtttcaatagcacctacattaatcaggtattatcgatggacatttttgtagaccacttttgaaacacttaattattttgcaacatagacaggactatacaactttcatttaactattaggttactgatttaagttgagtgtgcatatagagaaaaacctagaaatatatctcatggcagatacattaaaaagtactatcagaagacctttatgctattgaaacttctaaaact

SEQ ID NO: 535435 - DNA, 921 bp, Homo sapiens
aagtaaccccctaattaaaattaattaagccagcgtcattcatcgacctccccaccccagtccaacatctcccgcatgatgaaacgttcggctcactccttggcgcctgcctgatcctccaagatcaccacaggactattcctagccatgcactacctcagcagacgcctcaagcgcctgttcagtcaatgcgcccacatcactcgagacgtaaattatggctgaatcatccgctaccttcacgccaatggcgcctcaagtattctttatctgcctcttcctacacatcgggcgaggcctatattacggatctgtttctctactcagaaacctgaaacactcggcagttatcctcctgcttgcaactatagcaggcagccttcataggctatgtcctcccgtgaggccaaatatcattctgaggggccacgagtacattacaagcttactatccgccatcccatacattgggacagacctagtatcaatgagagtctgaggaggcgtactcagtagacagtcccacaccgttcacacgattctttaccgtttcacttcagtcttgcccttcattattgcagcccatagcaggcactccaacctcctattcttgcacgaaacgggatcaagagtaaccccctaggaatcacctcccattccgataaagatcaaccttccaccctttatacacaatcaaagacgcctcggtgtacttctccgtccttctctcctaaatgacattaacactattctcaccagacctcctaggcgaccagacattatacctagccaacccttaaaacccttcccaattgaagccgatgatttcctatcggcctaagaatttcgatcggcctacaaaatcgagggcctgccattataacacacattgaaaaaccataccaatttcaaaaagaaatg

SEQ ID NO: 535436 - DNA, 327 bp, Homo sapiens
cccgtatcccaagcactagcaatctaggtctactaaatacaaatctctgggtggatgatcttctagatacggtatgtattaaacttaacggagtgagagttgtaatgaaatggattgtagtcggtttgccgtaaacttgtggttctttaaatagtccttacggtgatatcttactatttttaagctgtctggggtttcagatatggggatttcagcccctggttaatcagtcttgtccctacaagtccctgatgcagtatgtttatttgtgatgtttgaagaacatttcttggctgggcgctgcggcttgcgcctgtaatctcagca

SEQ ID NO: 535437 - DNA, 426 bp, Homo sapiens
  misc_feature (187)..(187): n is a, c, g, or t
aacgttttatgctttggtggtcttagcccttgggccctgtgataagagagaatctcacagaagaacctcaaaggcagagcaagaaaggagccagaactcctaaattccaacaggcactgtcagctgtgggccagcagctccctccatcctcctccataaagggccaaaggccttaggtcaccatctntgggcccttttagcccagactcagactcaaattcaacttccaggcacactgtaagtcccgtttagtcctcagaagaatgatgtgtctatgtgtggttctgtttacagcaccatttggagtttgattgcttctagatgagaagaaacaatttgagttatagtattgtgtatacagggtccaaatatcaatacaagacacataagcaagagagggcttaataaaggggttaaccaattcca

SEQ ID NO: 535438 - DNA, 333 bp, Homo sapiens
  misc_feature (78)..(78): n is a, c, g, or t
  misc_feature (248)..(248): n is a, c, g, or t
gtggtggttatccctacaaggctgtttcctctgctaaggaaaaaaacatcaagagagacagggggttagttcgctctntacagaaagtcaaagaatatttttatgggcaccccctccaccccctaaacagagaccaaataagatgctaagcagacagcttgggtgccccatgccccaggctgtctatgcagcaactgagccccaaaacacacagcatgtacgtagaagtagctcaggtggacaaaatnccagcccaagctaggcgccagcaggtggtggtgtgtccacagcaggctagtgcctcttaaacaagtcaggtggcctacttcccac

SEQ ID NO: 535439 - DNA, 357 bp, Homo sapiens
gcgcgctgcaggaatcggcacgagccgactccctgccctccccagagtgggtatttgaggcctccccaccatgacgtgcttcacatggagggccccccccacccccctttgtaggaccatgaagggcgcctggtcaacatccggcccgcctcccgaaggatttcttcacaccactctcccccacacggcccctgctccccgcccccggcccagcccccccccctccctggaccccactcccgccccccgcccctccttcgcccgccctccctcgccccccacgccccccatcactcccctcccccttcccccccccgcccgcccccccttccccccccccccccccccccccccccg

SEQ ID NO: 535440 - DNA, 183 bp, Homo sapiens
cctatcactcatcagttttgtaccctatgatgagttattccctggtcttttagtttccaccacgcctaaaaggtatgaaagtgaaataatgatactttacttcatagaatggttacgaggataaataaggttaatacatgtggagtacttagaacatcgcaattatgggcaagacataggtaa

SEQ ID NO: 535441 - DNA, 363 bp, Homo sapiens
  misc_feature (21)..(21): n is a, c, g, or t
  misc_feature (50)..(50): n is a, c, g, or t
  misc_feature (61)..(61): n is a, c, g, or t
  misc_feature (151)..(151): n is a, c, g, or t
tacaccttcttagaagagatngaaaaggttgcggattctgctagctcttntggggcccagnggggaggcactgtagtatcagtcagtccaggaatatccttctctcctttttttacaatgggctataccaccatcttaattataaaatttngtttgtgggtgttagaaaccaaacgcatcccagcacctccactagattcaagtccaaaagaattgagagcagggacttgaacagatgtttgtgcaccagtgtgtcatagcagcattattcacaagagccaaaaggcaaaagcaatccaagtgcccatcagcagatgaacagataaacaaaatgtggtatatacacacagtgggaaggtgttc

SEQ ID NO: 535442 - DNA, 396 bp, Homo sapiens
tacggactctggcactatggtagtgggtggagaggagtcaccagttacaaagatcagactctgtatcaaaagtaactttgccctataggaagagtgagtattggagtcatcttatctattactccaaagcctccctttttatttcttgagcctggcttggaccttgagctaccgttagaattccttctaactggaacatttgtgtcgtatctgtaacactggccctgaactaacacacacacggataaaagacatctttccatcttgtactttatggtgtaggagtgaagccttgtagctaccatacccctatgtcagaggaggtcttacggacaccatagggtcggactcgcctttcctcagtctgagacattggactcttttaaaagacgaatt

SEQ ID NO: 535443 - DNA, 637 bp, Homo sapiens
  misc_feature (28)..(28): n is a, c, g, or t
  misc_feature (38)..(38): n is a, c, g, or t
  misc_feature (65)..(65): n is a, c, g, or t
  misc_feature (91)..(91): n is a, c, g, or t
  misc_feature (97)..(97): n is a, c, g, or t
  misc_feature (101)..(101): n is a, c, g, or t
  misc_feature (108)..(109): n is a, c, g, or t
  misc_feature (116)..(116): n is a, c, g, or t
  misc_feature (161)..(161): n is a, c, g, or t
  misc_feature (199)..(199): n is a, c, g, or t
  misc_feature (215)..(215): n is a, c, g, or t
  misc_feature (629)..(629): n is a, c, g, or t
tactcatcagagttactccctcattccngactactccntgctaaagcaggtctcagtactatcanattttatatagactgtccatatcagnaagacnagcnaagatgnnaagctanggatacattacatcacacactgtatctgtctctctgcttatgctntgccacagtgatatttcttcatatagtgcaatgtagtntgtaagctggttttanatccatgagatctcaagtactctctgccttataggacagatgtagatacggttttggtctttctgtttttacagttttataagagtacaagtgatgctgttttatttgaagcctgagagcttctggttccataaccagaaattgctacctggctcttctaatggaatggagggcttttccattcttagaccatccaactctgaacttgctccgaatctcaaacctttctgttcacagaacaaacgctcaagggctttcaagagtgtttctgtagattaggcttattagcatcaacttcatgacttctaaaatgtgactgctttcatgtccagatagcttgaatacaggtatctaccagtgatatggggtggagaattaataatgcttggttacataaagtcagtgttgcttatntctcgtgc

SEQ ID NO: 535444 - DNA, 398 bp, Homo sapiens
  misc_feature (1)..(1): n is a, c, g, or t
nttaggaggggtaaccccaccccacaatatgctcgggatttccctctgtttgtcagcggaatgcgcattatgggcgtatttgtaggggcgagcgttgcagcaacaaggaggtagtgaggaacgttagagtcagataacaccgcagtcctcaggtgtgttctaaatagaggtgcacctctctcttgtatgttctcgctggggatattcagccccccgtcttgttttattagagatgagtagtgcgaatgggtggttgcgtggtttccaaaattgtgtggcccgacccgcctcccagagtgtttgtgatttgtgtgttctcttgttgctcccacaggaatatgatatatatgcggttataataaagcgccgcactggcgcgatcaaaagacagaagaaga

SEQ ID NO: 535445 - DNA, 301 bp, Homo sapiens
cgccctctgtggtcgcatggtggcctaggttcatattacagacaacgtttagggattaaactacacaaagagccttactcatactatatgcccctttgacttataacatattctcaaagagaagtgcaagaaacttgtattctttcttgattagatggagttacaattgccataataaaagtccaaggtccaattctggttttgaaactaaaaaaggaaaagatgttattatcagtaatgactttgggaagaattctttaacacacagagaggggcggagcagcagagaggggcggagcag

SEQ ID NO: 535446 - DNA, 798 bp, Homo sapiens
gaattgatgacataagcgagctctataagaaaagctgcggtctctgtacagtgaacacagctcatctggagctcagtgatgcctctgtctcactggagacctcgctagttcatagtagagcactggtcgcacgcagggcatcccaagctacgtgctgttgcaccacaaggcacacagctcgcgtgcactatcgtacacagcagaagtactatgcccttaagccagcgcagagccaatgttataccatctagagaacatgtctgtctgttgcacagtgtgactagcctaggtgggtcactagccgtggcgccaagtttcgtaccgccagatccagcgactactacagtcagtgagatgaaagcctggaactggctcctctaccagagcacacctctacactcacaaggctccggtgactcgccaggtgggtactggatagcttgccagctaggtactgctaccggccaggcgagcagctgccagcctttgccaaggacctgtctctaatcctcaggtcccgagctaacgctctacggagggatgcttcgattgctcaacagttgatgaagagacatcttagtccagagattatcacagtgagcttctgcgggttggtcctgtgtcctatggcggtctccgagacaggcaatcacagaagcaggagacacagcctcagaagggtgtgtctcacgtcaaagaaggccctgtcctagcaactagttgcaggagctggtgtatttaaagattgggacgactttcaggttttctgttgcagcagacgggtgcccagcaaagagg

SEQ ID NO: 535447 - DNA, 210 bp, Homo sapiens
cccgtcacgaaaattagagtggagcctctttgcactactactgtcactaaattttaaatcagtcggatatttaagcattttttaaaagctgagattaaagtaaatctataaaaagtgtaacaaactgggcacgacactaacttttatgtgataatcacacatattttatacatctacctttatttgagctaaaaacatatattatagcta

SEQ ID NO: 535448 - DNA, 105 bp, Homo sapiens
ggggctttggaaggacaagcaggaccagcagaacattccagattggatgcgcctcggagaaggacaggttctctgtcactggtgtgaaggcactcttcccagaga

SEQ ID NO: 535449 - DNA, 1016 bp, Homo sapiens
atggagatgaagatgaggaagctgagtagctacctggcaagcgggcagctgaagatgatgaggatgacgatgtcttgataccaagaagcagacagaccggacgaggatgactagacagcaaaaaaggaaaagtgacactaaaaaaaaaaaggccaccgtaacctattcaccctccattgcccgtctcaaaatctaaaacgtggtcaccttcgatttgagaggcccgccgcccaccggggggagaggagtgccacccgatagtatgacagcgcggctctccagcaaccaactccaaagcatgtagaatgtgcccagccggggagccagaaaaagaagcaagaagttccaaggccctgctttgttacttaagatgtcctttacatattggagactgtgtctgtaattaattaatgtctacaccttgaatattttggtgacgctagttggttagggatcaccccattgcaatgatcctcggtattaccaaataaggccttcggagcgtgcatcgttgtcctagctgggctgaactttgcccttggtggcgtgaccatagtacacgtatacgtctcacagtggacgaaagaaagagcttgtgcttgaaggcagcaagttggcgcccgagaaaacaatcttattccgagcattccaggtaacttttggtggggactggcttaggctggactataggaagtcggttcgtatcgaaatggttcgacaagggccaccgatacaggcttcctctgtaaccctttggcagcaaggtgcgataatatggggcgtttgaggctgtgtgaacacgtgtccccacataaccggattaattgcggcctgttctcacaaacacaaaagggggggggcaaatacccggggcacactagccccgtttgtaaagggcccagcaaagattaaacgcgcgcgtaaactgcggaagtgactagtagacaccttggtgaccccccacgtcatatggtacccggcctgttaaataatagccgtctctacctcctacatcg

SEQ ID NO: 535450 - DNA, 950 bp, Homo sapiens
cggctaaaaaacgggcccaccgaggcaccggcaaataagagatctgggaaaaccaagggggacccactgtttggacgagggtaggaacaaccacccacaccaagttggcgggggacccccccagacacccggctgcgtcccaaatatggtggcgcccccgatagcggaggcaactaactgttgtggggagcgcgaaacatcgttcggcgccccccagtcgtccgcgtaggggtggagcgcccccatagccagttgcgtcagaatacaccctcagcagccaccacagacgaggagtagttagtgcggcgtggatccacgcacaggtccggcccaactgttgtttgcgcccgagggcgccacaaaataggttggaaaagcagtgggactacacacgaaagggttttccaccagagagagagtgtgagcgaggcccaccaagaagaggtggcccccccgtggaatctccaacacaggggggcccaaccccaagcagggtctctggcgcgaacaacgcacccggccaccatccgcaccacaccatggggccgggcccacaggagggccgccccattacgcgcacgggcgccccacacacaagaagagaggaggacggttctttcttacaaacacacacacaacagctcagacgctcggtttgtgggcgcacacacaacccaactctctcgtgccgaggacttgtgtctgtcgtggcgagggtcatacttgcgaggagcacacacacgcgtgtcctgtatgcctgctctctcctctttcccgcggcgggaggagcttaaaaacactcctcctctcccggcacagtgcgtggtatgaagtccacgatggattgttttatcattgaccgcccacgcggttcgcgaggagggatgccgaaaaacagacccgtttcttgtttcgccccaaaaaaaagttttttttctttcaacaaaaca

SEQ ID NO: 535451 - DNA, 172 bp, Homo sapiens
accgtcccaaagtgaaaacagacacatcttgccatgatctctgactggacggacgcgaggaggcggccggccgcactgggagcagcgcggatttctcttatctctactcactctacttcctttcattactagtattctattattatattattctactactctctacgtatcg

SEQ ID NO: 535452 - DNA, 233 bp, Homo sapiens
  misc_feature (2)..(2): n is a, c, g, or t
  misc_feature (14)..(14): n is a, c, g, or t
  misc_feature (53)..(53): n is a, c, g, or t
  misc_feature (84)..(84): n is a, c, g, or t
  misc_feature (197)..(197): n is a, c, g, or t
anttactgaaaaantaatctgaaagcttaatcctcagctttagcttctttttntgaaagatggacagatgttgcaggttaagancactaatgggccaggcacagtggctcacacctgtaatcccagcactttgggaggctgaggcaagtcgatcacctgaggctgggatcacctgaggcatggagaaaccccatctntattaaaaatacaaaattagccgggtgtggtagcga

SEQ ID NO: 535453 - DNA, 285 bp, Homo sapiens
gggcaactcctgatctaactgtgtcatggagtactagggctgagcttgtacaccacagaaagagatctaagagaagggttctctaaatatggtcccatagccgatgtgtctatagtatatgaccagcagtctaggcgttcaagaggatttgcctttgtctatttcgcaactgtagatgatgccaaggaagctaaagaacgtgccaatggaatggagcttgatgggcgtcggatcagagttgatttctctataacaaaaagaccacatacgccaacaagcgcctgg

SEQ ID NO: 535454 - DNA, 421 bp, Homo sapiens
cagcaatccaactccagagcaagtactattctacatctgtagagaaataggaatttctgagtgcttactccacagtcatgtttggaagaaccttttcattttgagtctttctttagcaaaattaagataatctttaaacttgtataattaagctgaccatatcttttagagtccaaaccaggacccctttgagattgaaaggaggcattattaataattggcctgggcaacagctataaaacggggctgtcctgggcacatcatatgtgtagcatagtgtttaagttatcttcagaagcagtattttgggagtcacatttacctcctcccaacatcattatcctagatttttacactctttgaatggaaaggacagatgagttgacgtgcattaggacccacaatagtggttgaaacaggt

SEQ ID NO: 535455 - DNA, 345 bp, Homo sapiens
  misc_feature (18)..(18): n is a, c, g, or t
  misc_feature (61)..(61): n is a, c, g, or t
  misc_feature (100)..(100): n is a, c, g, or t
  misc_feature (149)..(149): n is a, c, g, or t
  misc_feature (194)..(194): n is a, c, g, or t
  misc_feature (220)..(220): n is a, c, g, or t
  misc_feature (249)..(249): n is a, c, g, or t
  misc_feature (255)..(255): n is a, c, g, or t
  misc_feature (261)..(261): n is a, c, g, or t
  misc_feature (292)..(292): n is a, c, g, or t
aagctaattgttgacagngtcaaagagtgtggatagcaagacaattagagcccaacttagngattattcagatattgttactactttggatctggcaccnccaccaagaaattgatgatgtggaaagagacaggaggagtagaaaaacnggttttctttacctgctcagcctttgtggaataacagactactgnagctctttacacgctgtcttacaccncttgtaccagaagaccttaggaacaaggngggaanggaggngaggcagataatttgggatgaattcctccanagattttgaaaatccagaggttcctaggagagggaccagcaacagcaggcttc

SEQ ID NO: 535456 - DNA, 404 bp, Homo sapiens
ttagagagaggtggggtggcttttaggtagtggcgagggacttcctgtaatcgaattcgactctgcatattcgtgaatgatagtaatagaaagaatcgaatgtgtcaatcaaagtcctcggtcacattgtgaactgagggggatgctagctccaaccgactgctgtcaccgttcaccgttccagtttttaaatcctgagtcaagccaaaaaaaaaaaaaaaacccaaaacaaaaacaaaaaaaacaaattaggcctgtgccattctcattcgggttttgggggcaggttagggttgggctcaaaaaggggtgtaccgcaattaagctcatagtccggcctaaaagctttggcgggggagacgaggagaggggcgggactcgtcatactcctgctggctgatctc

SEQ ID NO: 535457 - DNA, 1699 bp, Homo sapiens
ggaccggccactacctggtcctgagtctggctccagcgccaccaccagtggcctgtggcctcgccgtctgccgtcgccccccgtgagcctggacccctgcgctcccgcaccagcccccgcctcccgaccctgcagaagcccaagatctggtccctcgctgtgagactgccacaatgccctggacaaccctgctgcctgctcgcctccctggctgcgtgggtgtggtctccacctgttgtggcatgctggtcgcgccttcctgcccgtgcatgctctctccgtgccgccagcctgcctgacctagtcctgctcacatgaacttgtgtcatcaagcttgcccgggctagggcaaatagttccccctgtgcatttgtgaaccaaaacccagtgcactgattatccaagtggcccaacactatgaaccaggggacaccaccaggagcagagaaaacacaggagtccattcccgccgttgctttagtagagctcccaatagacaaacggaacaatgagacgcataggcgtgggaggaacatatcgccgccgagaaaagcgcagagaaaggggcacaaacacccagaggagatagcacgagcggcgggccgcaggaacgaagcacccaggacaacacggagacaaaacaggacgagaagaacgcaccgcgggggacagacggggaggagcgacagacagagcgacgaagcgcaggtagaagaaggaatgagcacattcaggagacagcagcaggagacggaaagcgagagcacaggataacacggcccgagcagggcgaaccaggatgacatgcgagccacggaggccaccgcacgagtcgggcgccgccacggagcaacggggcacccacagcaaggacgaagcgctccaacgtcacgtcgagcagagaccagccgacatgcgagcacgagacaggaaggccgagagcagacgcgcagagacgcagcacccgtccacgtaccgcgagccaaaggatcgacgggaaacgcagagcacacgatgagcagaagagaggcacacgacgagagaacacaagcgagacagagatcggacaacgcgacgagcaagacagaagagacagaagaagcggatatggccatgatcgagcaagcggtctcgagggagtgggtgcgcagaggtcgggagcgcggcgcggtatcagtagcgagagagcgaggacggacgcctcgcgagcgggcgcaggcaggatggagtaacgactagcagaacagacgcagcgtagagcgagcagccgcagacgatagcgcagcggggaggcgcagaggcgacgagcacaggtgcgaggagagagacgcaggagaagcgtcgactcggggaagagacgacagaggaaagagggggaggcgagcaagagaagacgaagcaaacagagaaggcagagaaagcacggggcacacaaccggacggcgcagcgaacacgcaagaaggagccgagagacggagaaagacgtacggagcgacaccgggcaaagcaacaggggcgagagagaagcgggagtacagcgcgcagaggacacggagagagggcgcaaaggaagaggcggaggcgacaggtgggagagagcgaggcagcgacgagtgagacgcaagagaccaagagcgcagacgagcgaacagaggagaacgagtagagagagaaggcggagcgagagcgagcacaaga

SEQ ID NO: 535458 - DNA, 818 bp, Homo sapiens
ggacgcgtgggcagcgagcctcccccgccacccgagacgcggcgcgcgacgctccggcctgcgcccggccgcggccattggcggccccccggccgtctcccgcgatctccgtttcggtctcggctccggctttttactgccccgcagaagaagttcggccctgtgtggtggtcccaagggcccaagagtgaattcccttccggcccggggacatgagagcctcccccggcacccggggcccagacgcgcacagaatgggccgggtgggcgacgattcccccagccgatgcccgagaacgagttgaccctggctcctgctcatccctcttgacagggcgactggcgaccgattgacgaaggggatgcatcggggcgaggatgccctggcgggaacgcatcgagtcactccgtcagcgaacgcaaatcaatggaccgatcgatgaggggccagtctattgagccaaaaccggacctggtcgaccaagcgcccacgcgaaacggacggggggtccttggagcggaactggcagtgcagagcgactgtgccgggacttcaccaaggaagccacggcactgcaacccagactacaagccaccagaaatgaaaggggggaaccccactgcgcatgggcacgcgccaccgaacctggcttgcgcagcggcctcgaacgtccgtggggctcaacactcaagggggctaatataaccagttagacaacaaatacgctaggagcagcgacgcatcacaggcgctcttccaaccttccgggccgtctcgactccagggcacgcactagggtacagggcccccgttccag

SEQ ID NO: 535459 - DNA, 159 bp, Homo sapiens
  misc_feature (100)..(100): n is a, c, g, or t
  misc_feature (116)..(116): n is a, c, g, or t
  misc_feature (130)..(130): n is a, c, g, or t
aaatagcgacgcacgtgcatggagttacaagttaaacaaataaattgaacataacaatcccattaccaatttaatttgtgagctaaaggcagtagctgtngtcactgtgctttagnagacccagcaactngaaacagactaattttcgggtggtttgcc

SEQ ID NO: 535460 - DNA, 1046 bp, Homo sapiens
cagtgttttcattttggttagtgcttttgtggcttaagaaattctttccaggctgggtacggtggctcacgcctgtgatgccagcactttgggggcagaggcaggaggattacttgagctcaggagtttgagaccaacctggacaacatggcgaaacaccatctctacaaaaaatacagaaattagctggacatggtggtgcgtgcctgtagtcccggctgctcgggtggctggggtgagaggattgcttgagcccagaaggtcaaggctgcagtgagctgtgattgtgccactgcacttcagcctgtgagacagagtgagaccctgtctcaaaaaaaaaacagaaacaacaacatacaaaaacacacggaggacaacccggtgtgaattttttcccactcccagggtcctgtgaagaattggttctctggagattatattttcgcggaaacatcctttatagctgtgctacacttccccatatttagggcctttaaattccccctataaattggggctatcgggcactattggtcgtgaacgcgtcagggatttccctttcacatgtttatactcactccattagggttatacacacaccgtgtccctatcaagtgctcggtacctcctacctgtgctgtgcgccaatttgtgcaatggccaccttcttgcgtatgttgtccccgctttttgacctctttgtcgaaactcggcaggggggatctctttccgtctggttaccatagtctgtcctgtcctgtgtggtccattttcaaggcgtgttcattatttcccacttgtgtcttgacactctgttacaaggtaacagtcctttttgcccacccgtttatatcaccttcttgtgcgaaggcgggctttgcgacaacatctcgagcccacagggcattttacacggtaaagggtattttccccagaatataggtttaaaaccgcgcttttctacttcccacacagtgtgttcccttatagtgtgcgacttgtatatcaccctataaccggttggggaaaactttgacttcttcaca

SEQ ID NO: 535461 - DNA, 234 bp, Homo sapiens
gccctttttttttttaaaaattatggtgccaaaagcatttgttggggtatttgttttgggggcccccctctaagtttttaccgcccccttcattgttttcaaagaaatgggggggtttggtttttaaaaaaaactattttgttttagatcataataggcataaaaccgtacagaaattttttgtaatgtgttggtttttaaaaaaggacccgttaataaagtttttaaaaaaaa

SEQ ID NO: 535462 - DNA, 429 bp, Homo sapiens
  misc_feature (9)..(9): n is a, c, g, or t
  misc_feature (11)..(11): n is a, c, g, or t
  misc_feature (159)..(159): n is a, c, g, or t
  misc_feature (353)..(353): n is a, c, g, or t
taaccccangnggcaatggtttgggtgactcactttcccctctaaggtggtgcccagggctggaggcccctagaaaaagatccagtaagccccaagtgtcccccccagccccccatgcttatgtgaacattgcgctgtgtgctgcttgctttggaaacntggcctgggtccaggcctagggtgagctcactgtccgtacaaacacaagatcagggctgagggtaaggaaaagaagagactaggaaagctgggcccaaaactggagactgtttgtctttcctggagatgcagaactgggcccgtggagcagcagtgtcagcatcagggcggaagccttaaagcagcagcgggtngcccaggcacccagatgattcctatggcaccagccaggaaaaatggcagctcttaaaggagaaaatgtttgagccc

SEQ ID NO: 535463 - DNA, 430 bp, Homo sapiens
  misc_feature (76)..(76): n is a, c, g, or t
  misc_feature (258)..(258): n is a, c, g, or t
  misc_feature (270)..(270): n is a, c, g, or t
  misc_feature (280)..(280): n is a, c, g, or t
  misc_feature (287)..(287): n is a, c, g, or t
  misc_feature (307)..(307): n is a, c, g, or t
  misc_feature (339)..(339): n is a, c, g, or t
  misc_feature (363)..(363): n is a, c, g, or t
  misc_feature (371)..(371): n is a, c, g, or t
tacacttgctgcaacctgggggctgctgcgaatgaaacagtaagcgttgcttctaatcatatcttgagctctgctncttatggacatgacgtccaggccgacctccaatccttccctttccttaagtgtcagacactgtcccctccattttcctttccagcagtgccccagagactccctattacacagaacactagggtaaagatgggcttggttatcccaggagctcacactctcaaagtgcattgatagcccgcngcgatttgcccngatacacacnatatgtnaatacttctccttgcccctntattagtttcagggcacatcggaggagtctanaatatattctgcttttgccccggnaggctttntttaattcccttttaatgcattttgcccactatcatttggttcttcgtgatcaactgca

SEQ ID NO: 535464 - DNA, 253 bp, Homo sapiens
taattattgaacattcacattagtacagtagaacaataagccaatacaaacatgatttcattcgaaccattgataagatctctattgttattcttcatttctcttcttgtctctctattttctttttctgttgtcaaccagataactctgttattgtatccttcttcttttccaattttatactctgtttttccacttctgctcttcgttctcttgttcttgtctgtcctgtaaaccaggacccaggttatgc

SEQ ID NO: 535465 - DNA, 392 bp, Homo sapiens
taaatttcttgggaactatgaattctttgcaagcacagctcgtttctgcagattatttcccaaacgtttacaaaatggacccaaaacggaaaaccccttaaaaacctgaagaggcgcaactattaaaagctacgatttatccagtagcaagtgtcccagccttcagttgccagccgcttcctctctctttattcccaagtattagcgggatgaaaactttcttccccgcgtgtattgtttcctattccttttttctccggcttctgggcttgcgcggttcagcaccttgaggaagtcagacttttccccccgcattcgttttgtgaatttaggccttaaagcacttgatgtgttagtgcaggttgccccggaacgtgtggactcaggttgat

SEQ ID NO: 535466 - DNA, 829 bp, Homo sapiens
agcggctgttaccagagggctgggacggggcgacgtggccacggcgctgggaagaaccaatcggccgagaaccctggggaagtgaactgggtccataaagaccaagtggaggagtagtgggcgcggtcaggatgctggaaggcagagtgaggatgcaagcccctgggctgagaaactggggggccctggcctgggagcaagagcaggtgggccggtggcctggagcaagagcaggggcggggccccggagaactgggcgagacccaggtacagtaccccaaggccccttggggcagaacccctgagctgaagtgagcacaggcgtgcgaatacccaagagtaagaaacgttgcggaagggcgctggggttgccacacgaaggggtttggtgggccacctaagcccggtgtgttgcgaaatgttaacaacctggttgttttgccagagttccgacatggtgcaaatagaaacggccagataaccggtggggggacacctttataacagcaggggcgtgggcacggtgcttcaaacacccgtaagaaaacaattaggtagagagtccaaaagtgaaacccgaggcgttgcagaaggaaggccaacaagtgaaggttggggtacacttacccacgtgtggcatgcggcgatggcccgtgcactttacaagtgggaagtcgagagagggtcttcgtaaggcgcaagcggtatacattgtttggcggtgcacccacagccccggagtgtgttaaccccgttgggcgggtattccataccacggtgtggggccccagagtaatgatctccggaatgttcagtgggccagctggtg

SEQ ID NO: 535467 - DNA, 352 bp, Homo sapiens
  misc_feature (77)..(77): n is a, c, g, or t
gaacccccccccccccgaggggggtttttttgttgttataaaaaataaccccccgcgcctggggggggtgtccaaantttttcgcccaccccttggggcactttttttgtgttctccaccggcccaggcggaattgggtaaaccctttatggccccttgaaaccccccggggggggatttttttttcatttgcaagaaaaacttttttgtgaaagggacgcccccccgttttttttccctttccccgttccccggtaaaaccattttgttctttggggcttggtttggaattttttaactggacccgtttttcgccttaaataaaaagtaggttagcctggaaatgaaatta

SEQ ID NO: 535468 - DNA, 756 bp, Homo sapiens
agcggcctagatcacaccactgcactccagcctgggagagaaagactccgtctcaaaaaaaaaagtaattatatttcccaacataaatgaatacgagccattaaggaaaataacatggagattcatcagaaattaaaaatagaattactgtatgttccagcaatcccacctgtgggtgtatagctaaaggaattgaaatcagcatactgaagagataactgcactaccatattcactgcagcagtatccataatagctaagatatgaagagccaacctaggaggccaggcattagatgaatggataaagaaaatgtgatatatattacacatacacacacagacagtgcacacacataaaggaatactatttactctttatgttatttagttttattttgagatgtagtttcactcttgttgtccaggctggagtgcaatggtgtgatcatggctcaccgcaacctccacctcccgggttcaagtgattcttctacctcatcctccccagtagctgggattacaggcatgcaccaactagcctgactaatttagtactttgagttagagacgggttaactccatgttggacaggctggtctcgaacttgccgaactcagggtgtactccatccgcctacagacacatcccagaagatgctaggaattacagggcgtgagccatcattacccgatggtaactcatttactgtaaaatagttctcctgtgataatgagttcacagcactctggaccca

SEQ ID NO: 535469 - DNA, 109 bp, Homo sapiens
ggagtcggcccgcattatagcctcgcagcgcggtacttccagctccaatagcgtatattaaagtggactcattccaattacaggacctcgaaagagtcctgtattcgag

SEQ ID NO: 535470 - DNA, 91 bp, Homo sapiens
  misc_feature (74)..(74): n is a, c, g, or t
gagccaggtcggtataagcgccagaccatcgccgcagtcaagctgtccacatccctggcctcagccgccacatnacctgacctgcttacgc

SEQ ID NO: 535471 - DNA, 172 bp, Homo sapiens
gttgatcttgtattagccactgtactggaattggttttatcagttcaaatagtttttgggtggagtattgtaagatctccaatatataagatcatatgatctgcaaacaaggataatttggctgctgcttctgtcaatttctgtgcccatttcaagggggatcctcgtagag

SEQ ID NO: 535472 - DNA, 138 bp, Homo sapiens
tgtactgaacggggtcagcgcccagaaacccatatcatgatcctggaccatgagactcacctaaaggccagaaaggtaggtgctgagagcccagattctattatttttttaaatattaaatagagtttggagtcttgt

SEQ ID NO: 535473 - DNA, 214 bp, Homo sapiens
tggggggggggttttcccccccggttttctcaaaagggaaaaagttttcccccctttgtggggttttcaaaggggggggcccccggccctgttttttttccccgtgaaaagggaagggggggtttgtttttccttttttttcccccccctttttgggggccccccccccctggggggggggggggccctttaccccttttccttttttttttta

SEQ ID NO: 535474 - DNA, 864 bp, Homo sapiens
gaccggtcagaattactgaatggagagaagagtgaaagaatatcttactcatggtaggaagaattgacatcctagaaatgcagtgaacaagtgaataccattagaagatcaagctatgagggcggaatcgattaggcagtggcactgcatcttgaggtgggaccccggattgtcaagtagagaacctttgagaatgaatgatcatatggattggaccaatgatggccatctgggtctgacattcttgtggggcatccagaaggtaatttacagtctaggcatacgttgccatattcgttgtgcactaatggcatcgtgcctcggagatctggactgttcggataccatggcatcagaccaactaggatgtatagcccgatgaaataagaggagctgtctgagtagggactgaacaacggggactcgcgcacatggttactggagtgacttgaaaggctaaaataaaggctcctgccagtgagaacctgtattgcccattatgggggggatggggatcaaatcctacaaataacacggaccattcacatggaatgcgtgtaggagctgaccttctacaacccacattccggtgactgattaattgacacccagcatggaggttaataaggggacccgtgcctaagggggcggggaaaacctgctgatcgggttctcaacgcaagggcaaacacggtactgagcacgtggtttacgccaagtgcaggaaaacgaaaaccagattactgcagtacaagtccactgggagaaggaggggagggactagaaactgagtcagagagtaaccaaagggtgaagggccccaaaggggtagggcggaatcgaaccgaggaggagaaaacacgg

SEQ ID NO: 535475 - DNA, 124 bp, Homo sapiens
atcacaggtggggacagagcaatctcttatcaacatcaagcatcttggtaagatttgaactcttcaatctctgcactcaaagctgtaaagatagttaagcgtacataagttgcccgccaatcga

SEQ ID NO: 535476 - DNA, 188 bp, Homo sapiens
tttttaatctccaaataggagttagtcagctattaagaatatttggctaattggttaccaaatatggattatccagggcgagggtctaccggaaatttccccggtgaaagggacagggttcagtgagttggaacatggatacactcagttcttaatcgtctttctaaattcagggatgcccaacaggg

SEQ ID NO: 535477 - DNA, 146 bp, Homo sapiens
aaaccagtatcaagatgaatttagcctctgaaccccaggaggtcctgcacattggaagcgcacacaaccaaaagtttgacgtgaatagaaagatagcccttctgcatgtagtcaacaaataccagcactagactgggtttcgaggg

SEQ ID NO: 535478 - DNA, 158 bp, Homo sapiens
tataaaatgggttgagcgaagaaggtcttggtatagcttagggagatgtatcatattgcttatagactcgaaggcaatgggtatggatgaggtaacagaggcagtgatgtagaaatgagaaaataaaaataaaataataaaagtgattgttccccgct

SEQ ID NO: 535479 - DNA, 106 bp, Homo sapiens
ctggctacgtgatcacgcagcagcgaccgccggtctgcggcacctggttggcctgcgccaggaccgacgtgccggcctgctgcaggatctgggccttcgacttgtt

SEQ ID NO: 535480 - DNA, 427 bp, Homo sapiens
cacgaggagagagagagagagagagagagagagagagagagagagagagagagagagagatacagagagacagagagccagtccgctcggacgctctctaccacgcgccgagcacgtattgagttgggcagctgataagatgtttcttggctccacagcatacgcggcactgagaacgcggttgcacgcgcgtgaacgcacattcgactaccttttgcctacgctgacaacaggcgtgaccttcagttacacaagcgtcgggatgccgctgggagactgctatgccccagacggggctgatggcgcctgtcctaaaggaaagcctggccattatatagggacagagcgcgaccctggttattactgttcgaaatatacctatgtgtgccccaacgagatcagaatcttgggccgtggcagatatatc

SEQ ID NO: 535481 - DNA, 92 bp, Homo sapiens
cggtacctctactcccctgacacaaaattcattcaagaagaaatagataccagcctgagcaacatggcaaaatcccatctctacaaaacatc

SEQ ID NO: 535482 - DNA, 118 bp, Homo sapiens
cgttgccgtcggaggtcattggatccccgtctacccgcgcctctacatatggaccgacccggacgccaccatcgtccgcactgcccgcgaggccaacatgacgatgccccagtaccgc

SEQ ID NO: 535483 - DNA, 129 bp, Homo sapiens
gagattgcgaactgcactccagcctgggcgacagagacagactccatctcaaaaaagaaaataaataaaaaataaataaaataaaaactaatctttcaggcagggcatggtggctcatggctgtggtcc

SEQ ID NO: 535484 - DNA, 522 bp, Homo sapiens
gtcattttcctgcctttggctaaaacacactagatttattgtgggtgcacctatgctctgtgtggtggtttgaatatgcttggcccatgggaagtggcactactaggaggtatgtggccttgttagaggaaatgggtcgctgtggaggccagattttgaggtctcatatatttgctcaagtctagccagtgtgaaacggtctccttccgctgcctttagatcaagatgtagaactctcagctccttttccggatcatgttcgcctggacactgccatgcttcctaccatgatgataatggactgagcctccgaaattataaaccagccccaattaaatgttcccctttgtaagagttctcttgatcgtgatgtctctttacaacaatgaaattcctaattaagacactcactccctgctctgactagcaccccctcccctcctccccactgatatcttagcttctacccccaaactttttctggttctggaccaagataaagtaaaacttccacataacatc

SEQ ID NO: 535485 - DNA, 150 bp, Homo sapiens
tcgagctcgtgaccgactgcatctgtgctcgatccagattgtaatgctgccttccccaatgcttggttctgggtggcgctctctcctccctcatgctgtggggtatgaaagcagttgctctctgtgattgctccagagcctccctctcaa

SEQ ID NO: 535486 - DNA, 306 bp, Homo sapiens
  misc_feature (208)..(208): n is a, c, g, or t
  misc_feature (210)..(210): n is a, c, g, or t
  misc_feature (214)..(214): n is a, c, g, or t
tggatagtaagacttactgcagtcgatttgggatttgctaagtagttttacagagctagatctgtgtgaatgtgtgtgtttgggatatatacataagtaggggtagtacttgtttcacacccggggggagggagaaaaaatctttacagttgtctttttcttatttttaataaaatagaaaaatatgcacttgcgcgtcccccccccncncacntttttaaacaaggtgttacttgtgccgggaaaattttgctgtctttgtaattttaaaactttaaaataaattggaaaagggagaaactgaat

SEQ ID NO: 535487 - DNA, 957 bp, Homo sapiens
  misc_feature (462)..(462): n is a, c, g, or t
  misc_feature (467)..(467): n is a, c, g, or t
  misc_feature (471)..(472): n is a, c, g, or t
  misc_feature (477)..(477): n is a, c, g, or t
  misc_feature (531)..(531): n is a, c, g, or t
  misc_feature (847)..(847): n is a, c, g, or t
  misc_feature (886)..(886): n is a, c, g, or t
gacctagcagtggatctaataagtattgtaattttgaataatgatgtgcataaacacatttttctaggtatctacatcagctgtacaatgatgaaactatctatgattcctattggtgatcaaagttataggaaccttatacctctgaagtttgttgcctgcattttaatagaaggaaacgctaaatggtagttagagattggtggaaatctctaactacaattcattccccatccaagttgacaggcacaccaaaccacagatctgtgtgggtcagcagattgcatgttaagaatccctgatctaggagctttagtttaggctgtgagactgacacttcagtgggtagttatataataattgaaacctgagcaggggttttgtctcatttatctttacatttttataatctcacagtgtccagtaaacattaaacagttagttattaatagagctagatanataanttgnnggtantatatgggagattacttctgttagaagaggtagcattgagctgtattctaaatntagtatacattggaattttcaggttggatgaagtaaggaagaggtactcagaattgaggcatgcccataggaatagcatcaggaagggtatgacaggtttgatgattattgagagtcaagatacacatttaagggaatggcaagagatgagaggttgagataatgctggggctcagattataaggagagttttgtgtatactaggcaactggtaacttacaatgatatggtacaatcagctttgtgttttaggaagttatctcagttgatgtcatgacagaaaaatgggacagagtgggaagaaattagaagcagnggccagtgaagcactgttgcagttattacaggttagagngggcagggtcatgatggtagcagagagatgggaaacagcgatccatatctgggagaagaggattctatgct

SEQ ID NO: 535488 - DNA, 236 bp, Homo sapiens
acacttacgagtaaaaaaaaaaaaaaaaaatctcttgtcctcttttctttgaaacctttgagttcagtctttgcagtttcttttgctgccagtgtccacttttacccttagaatcattttgcctgtcactaactctgtcatcaagcccaccttgcacattggaacacattctaaagtttgcaaagttacctcctccaaaaatttttgaaaattgttccgtgtggcttttgtgtgaa

SEQ ID NO: 535489 - DNA, 1623 bp, Homo sapiens
  misc_feature (339)..(339): n is a, c, g, or t
  misc_feature (526)..(526): n is a, c, g, or t
  misc_feature (709)..(709): n is a, c, g, or t
  misc_feature (1293)..(1293): n is a, c, g, or t
gggtgtctcctccccgccaacccccccggcaatataagacgcggggggtctgtcccgtccttctcatacatgtgactcaggagcaatcgtttgtggcgcctccgttttattcagagcaaccctcttctttggggggcgcccctctttcttcttaggggcgccactcctgctcgaggggtatcaccccccatttcaatgttgtgtcatttcaaatgcgtggttttgtggccgccacttgtgtgtgtagcggccctgtcgagcgcgccgcgcgctgtgtattcttgtgtgctcactatacaattattaaccgggtcgatatcatgctttatataaaggcgncccgacgggggggagctaaaccccacgacacatgtgggggctgcttgtggggagaacactctctacattacacgaggggtgttatgtgttgtcgcataatgtattagaagagaccgggttgttttttcacgcggggcgccaacacaacacacgaaggagacgcgttctccttttttcgcgcgcgacnactacattttaaagaggggaaggcaaagaccattttgttgtcttccctacactccccccgcccgcgcctttttttaattaaagaagacttttttctccgcgcgcggtgatatagtacctctccagacgtatggttgcgcccctctcttactatttttctctggagcgcacacgcctgcgtggngaaagagaacaacacgaggcgagggggtgttgcgacgcccctcttttcttaagagcgcgcacgcgcgcggcttcatggagcccgtatatatatttctgtttgtgctgtgtggagagagatataatatttgtggtgagattatcttatattataagcgcgccttatgggcgtgggtctctccatcaatttctgtgagaaaggacatgtatagttctgtgtgttcgcgaggagaggtgtcttttcctcacacacacataggtgcgtgcttcacagcataatatatcgtatatgtctacatagcacatcatatatggcgtacacacggggcgggtcccgcccactctgcggaggggtcctctacactactcacacaatatagcgtgccgctttattatatgttttgtcttctgcgtgtagagtggggagataggtgagtaatatatttttcctgctctgtagcagtgtgggagtaacggaagagatacacaccgcctgggagtaaatagcatatgtgttagatagcaggcggtaatatatataggcagatagatgtgtatcactacatgcgctgggcccactagtgnccagcagtaatgttgacccgccggagattgttgtgacaagtggtttgttgttttctccggtgccgccccgcgggtgggggagatggacacataatagggggataccccctggaaaaataatattaacgtatcgtctgagaaattcaaaatagatgcacccaccgtgggaatcacagagtctttctttgaagaagggcgtaaaataatttggcaagagaagcccgggtgtgggaaatttttttttaaaaaaaattttctccggttttttttctcccaagagggaattgtgggttggtggggaaaaaaacccccgtgtggtgtgccccctta

SEQ ID NO: 535490 - DNA, 174 bp, Homo sapiens
actgacaaaataggactgtgcacaatgatcttttggcgtacgactgaagatggacgagccccaggctcctcacgagaccacatcagctccccctacgaaagacatcatagggatcctacgtttccatccagcagctctggcttccgggactttctgctgaagccggagctcctg

SEQ ID NO: 535491 - DNA, 382 bp, Homo sapiens
agtcgtgacggcggattgacaaatgatagctcttactcgaattccgggtgctggtggtgcatggccgatacgttagattggtggacgcagatttgtctggttaattcctgagtaacgaacgagaatctggcatgctaactagttacgcgagccccgagcggtcggcgtcccccaacttcttagagggacaagtggcgttcagccacccgagattgagcaataacaggtctgtgatgcccttagatgtccggggctgcacgcgcgctacactgactggctcagcgtgtgcctaccctacgccggcaggcgcgggtaacccgttgaaccccattcgtgatggggatcggggattgcaattattccccatgaacgaggaattccc

SEQ ID NO: 535492 - DNA, 349 bp, Homo sapiens
tgaaacaacaacagaacatgacacacgtcgagctcagtttacataacatgagaacggtatgttctcttttccacacacacagctgctgtcggatctagaaggtgaagaattttttcatgtatatatagacatatctatataaattgtctggctgaggcagggccttcagctatcatttggttaataaatacattttagtatttgcatttcctactgcctgcagagtttcaggtgcttgtagtgtgaaagttctgtagatgtgtgcaaatttaacgaaatgaaattgtatgtgtaaaaatgtacgattatacactgtgcaactgtaaattatacatacaaaatataattg

SEQ ID NO: 535493 - DNA, 116 bp, Homo sapiens
catagaggatcccatggctgtaacctaaatggctgttactaaatggctgttacctaaatggctgttacctaaatggctgtacctaaatggctagttacctaaatagcgacagcagg

SEQ ID NO: 535494 - DNA, 153 bp, Homo sapiens
gcttaaaagaatcttaaatgaaattatgctctgtgtaggacttcatcgaggtcccatttggcattatatatacagattagagctttattcctatgtgcccatctactgagatatgtgttagcattcccaagtattttacactggcaatctggc

SEQ ID NO: 535495 - DNA, 216 bp, Homo sapiens
ggtcaccatgtgctggctggacacttaggtcactttgaagcatgttactaaatgtcactgattaaaaaaaaaaaaaaaaaaaaaaaaaaaaaaaaaaccccattttttttttttggggccggggggggggggggtgggccccaaagggggccccgggggccggggaagggggggggggcggcgctcggccccacaagagtgccaggccaagggggg

SEQ ID NO: 535496 - DNA, 221 bp, Homo sapiens
ggtcgaccagaaagcctcctctttagactttcccagtagacacatagcagtgacaatttaaactgtggtcagtagccaggcatggtggtgcacttctgtagtcccagctatttggaaggctgaggcaggagaatcgcttgaacccaggaggcggaggttgcagtgggccaagataacaccattgcactccagcctgggcaacaagagccaaactccatctc

SEQ ID NO: 535497 - DNA, 246 bp, Homo sapiens
  misc_feature (2)..(2): n is a, c, g, or t
  misc_feature (33)..(33): n is a, c, g, or t
  misc_feature (59)..(59): n is a, c, g, or t
  misc_feature (78)..(78): n is a, c, g, or t
  misc_feature (105)..(105): n is a, c, g, or t
  misc_feature (107)..(107): n is a, c, g, or t
  misc_feature (117)..(117): n is a, c, g, or t
  misc_feature (162)..(162): n is a, c, g, or t
  misc_feature (164)..(164): n is a, c, g, or t
  misc_feature (183)..(183): n is a, c, g, or t
  misc_feature (198)..(198): n is a, c, g, or t
  misc_feature (208)..(208): n is a, c, g, or t
  misc_feature (214)..(214): n is a, c, g, or t
  misc_feature (221)..(221): n is a, c, g, or t
  misc_feature (234)..(234): n is a, c, g, or t
  misc_feature (238)..(238): n is a, c, g, or t
cnttcgtgtaccacaaggtcacaccgtacacgncgttatccccatacgtaggttattantcgaaaccatcagcctacntcagttcaaccaatagcccgggggcgnangcgctaagcngcgtaacattacgtgcaggccacctactcatgcacctaattggangngccaccctagcaatatcanccattaaccttcccnctacacttancatctncacaatnctaattctactgnctancctagaaa

SEQ ID NO: 535498 - DNA, 615 bp, Homo sapiens
gaaggggaagggaagggaagggaagacaattaaaaaaaaaaaaacaggcaaagaatatgaacaggcaattcacagaaggaaaacccaaatgacccacaaacatgaatagatgttcaaccacaatgacaatcagagaaattgtaaaaataaagcagcaacaatatatcattttacatttatcagctaagcaaaagctaaagtctgataatcccaattattggatggggtgtgtagaaaaagggggattctggacaacatgctgggtagaagtgtcaagtagggtataaggcccttggaagagcaaaaacagagatattcaccaccgctcttggtcccaacgcattccacattactaattctacgttaacatatcttggcagagagaattccaggcactaggtgctatagaaatttttttacagggaagtgtttatgggaacaatgtgtttaaaacaagaagaaaaaaacagaaacaaagtaaaggttcaccaacaggagactggataaacaaagtataaggtataatggaatatgttgtagcagttaaaataaataaagaaaagctacatgtatcattatagtctaggtagtatcaacttggataaacctcaaagg

SEQ ID NO: 535499 - DNA, 367 bp, Homo sapiens
  misc_feature (41)..(41): n is a, c, g, or t
  misc_feature (343)..(343): n is a, c, g, or t
aagcctcccttctttcttgggacacagcaatattgaaattnaggcccaattaaaaacccttacagtgggacaggcgcaagtggctaatgcctgtaatccccaacactttaggaggctgaggtgggcagatcactttgaggtcaggagtttgggactagcctggccagcatggtgaaaccatatctccaccaaaagtacaaaaaatagcccaggtgtggtggcgggcacctgtagtcccaactacactccagcctggacaacagagggagactgttttaaaaaaaaacagaggcaggaggattgcctgaacctggaaggtggaggttgcagtgagctaagattngccactgcactccagcctgggtga

SEQ ID NO: 535500 - DNA, 168 bp, Homo sapiens
cggaggaagagatatttctctggagaattaacgtttcattgaaaaggagcctttggacctgagagtaaacagactttagcggtgagagttgggtagatggaacaggaaaaaagtgaaatttaagaaaatatatgccaggcgtggtggctcacgcctgtattcccagca

SEQ ID NO: 535501 - DNA, 415 bp, Homo sapiens
  misc_feature (103)..(103): n is a, c, g, or t
  misc_feature (117)..(117): n is a, c, g, or t
  misc_feature (131)..(131): n is a, c, g, or t
  misc_feature (228)..(228): n is a, c, g, or t
gaattaaaaagtagaaggttaaaaaattaaaaataaagaaatattatatatggaaggaggagaggttaaagattactttgaaggattaaaatctgagtttttntttggtttaccttntatactctttttantgattatgcttgatacattgatacatgcattccttgctacagtggctttcgtggctgttcggctgtactgtacagtgtaactctttagggtggaagntgtgtggaccttggctctttcttggccaatgactttaattaccccatggttccctccagagggcagtgggcagtgcagtgggtcacccacacgtcccattttttagaaaacctgcagccatggatgcctaacttctactgtggagttattcatcgtcgacgcggccgcgaatttagtagtagtaggc

SEQ ID NO: 535502 - DNA, 320 bp, Homo sapiens
ctaaggatcccccattgagcccctgagatgccatgagcccctggatgcatggatggttatgaccctgattgtttttaggaaacagccaatgctctctaggtgttctcagcaaatgcaaggtatagtgggtcctgcatacccagggtattatttgacgccatggtaagcaaaatcagagtactgcttatgccctccctatagagctagttgtgtgggagaggccagtcaaccatggtacggcaggagcgagctcctgctttgccgtctgcagtagtcctccacatgttccctcattccagatgatttcaacgtgccaagcc

SEQ ID NO: 535503 - DNA, 187 bp, Homo sapiens
  misc_feature (164)..(164): n is a, c, g, or t
  misc_feature (178)..(178): n is a, c, g, or t
gatttgatacacagaggacactcataacatgtggtctcacagaggtcattagatttcacatctgcacaaaggtcattatgatttcatgtctgcacaaaaagctctattggacagtaactactataaacataaaagtgcgttttatccttaaactcttaggaatngggaagacacgaanggaaggttc

SEQ ID NO: 535504 - DNA, 101 bp, Homo sapiens
aacctatgattatggtggttttacaattaatgtttggatggaccgtcgcggacgcccagtggggtttcccattgaggggaagaaggtaaggttttgacaga

SEQ ID NO: 535505 - DNA, 423 bp, Homo sapiens
  misc_feature (201)..(201): n is a, c, g, or t
  misc_feature (215)..(215): n is a, c, g, or t
  misc_feature (250)..(250): n is a, c, g, or t
  misc_feature (259)..(259): n is a, c, g, or t
  misc_feature (289)..(289): n is a, c, g, or t
  misc_feature (292)..(292): n is a, c, g, or t
  misc_feature (314)..(315): n is a, c, g, or t
  misc_feature (352)..(352): n is a, c, g, or t
  misc_feature (365)..(365): n is a, c, g, or t
  misc_feature (370)..(370): n is a, c, g, or t
  misc_feature (392)..(392): n is a, c, g, or t
  misc_feature (395)..(395): n is a, c, g, or t
  misc_feature (400)..(400): n is a, c, g, or t
  misc_feature (402)..(402): n is a, c, g, or t
ttcagggccaggttggcccccgtgggcgacctggaggaaatccagcgtgggcacccaaagtacctgcacaaggccgttttcaggggcctgctcccggaaaaggcggggcccgtcattaaagtcatccccagcatttttaaccttgtggtcaagttccgcagccaggttatttcccaggcctgggggccccctgggggcccncggggggcaaagcnccccaactttgcactcatgcagcagtcctacaacnccttcaagnactactcccccttttttttcaaaatggtgnccnaactggtgaaccccggctaccnnccccccctggaggacttttttttgggcatcaacttcnacaactactaccnggacncctgagggtgcttttcgggggncgngcccnanaaaggggtttttgggccctta

SEQ ID NO: 535506 - DNA, 440 bp, Homo sapiens
tggggaaacaagcagcaagactcaacctcaaacaaacaaacaaaaagcacaaggtgctagagtcagctttcaccatcccccaaaaaacagatcatcttttgcagggtaagcattgtgttctatagcaggaagtcaagactacggtccagggtctgacctccttggatatctccgggagggctgtgatgagggccactgatgcggggggggggggtctccatttcccggcctctcacccctgcaccttcagggcacacgccacctttcctttttgacatggcagactagctgtgtctgcggggggccacgtagctccagaggggtggttttaagtaggtacagatctactaggacctttcattcaattaacgcttctaggaacggaaagacaacaggagacagagcaaaaaaaaaagaaagcagggggaataaaaagataa

SEQ ID NO: 535507 - DNA, 250 bp, Homo sapiens
ttttattttttattttacccatggctttaatttaacttcttgaaaaaaattttaaactaaaggtcatgtgcaactaaggtcataaaaacctcactttaacacattaattcaaggctggggaatatgaccattcggtattccaataaacacaaaaggcgtgaatttcattaacatatgcctggaataaccagtttttatgaaacctgtaaggcgatcctttaatttctgtccatttaaactgccctggggc

SEQ ID NO: 535508 - DNA, 152 bp, Homo sapiens
attcaccagtctttgattaaacataaatacagcacaattacttcagatcattcttcatatgtatacacacaaacccatgaacataatctgaagtaattgtgctgtatttatgtttattcaccagtctttgattaaataaaaaggaaaaccag

SEQ ID NO: 535509 - DNA, 1416 bp, Homo sapiens
tgttggtgtctctctctcggtgtgcttattgtttcctatggtatgatgtgtctgatttacatgttgacagtgtctactcatctcgcttctgcataataactaaggtctaatcaaaggctattcagacaatccgccaatgtgcatgctatcccaaacctatcgattgatttaccgactcgtatcgataggctatagtattttgcatggctctaaagtgagtctaattatggaattgtattgggattgaccatttttggtctatttacgtagacgcaggaaaaaatatgtaacaacttggtggataattttgttgaattatgcaagtagtgggatggttagtaattatctaacagaaggcttttttctggacgttctcgtgttgtgttactcaccatttagacataaaattgctcgaaatttaaagcgtacttgtatatccctcctctttgtatgaacaaagtatgctagtgcgtttagtggcctgaaattattgcatatattttgcatcgtgtactagctgtgggtagtacactgaggaggtaatgattgcatatgtgtaatataactgtattctggtgattaaatgcacataaagaagtaactgggtgaatttattgtgtgtctctggctgtatatggggttccttttctgggtgaagaacactacttgttgtgagtgtttaccctccctttcagaattggctccacgtgtgcatactatcacgggttacggatggattgttacggtttggcagggacatttacccaaataatttgttcacctaggctggcttgaaatgcctaattgcttcctcttcgtgtacaggcttcggacctatctatggggtttattgcaaatctctatcaaaatgaagcggtataggttctccatggaagagctttactccattcgctgtaaattattttgtccactatcgtagagggctacccaacgaaggaagaaatcatggggtgtcgcaggtgagcgacgcgacttaccaatttacggtgaaattgttcgcagtggcagcgtctaacaagttcaaagggtttgcgttccacttggccttaccgtttatggcctcgggatttaaattattttaccagggtactttcagggttgtcctagataacaaagctttggactccaagagggtcactccctgcggggtaatttcagcgcgacccgagataaatccatagaaaggatccattctgtgagagcaagaggactctaatgtgcctggtggccctgtcatcgaaacatgtgaagggtttcccgtgtttgtggtcccattgaattccgcgttacagtgggccctaccctcgactggtgataattgggaggagggtttacggaacaaaatggcgacactcgtgcagagacgaagaaaacaaagagtgaccgtgactgtaa

SEQ ID NO: 535510 - DNA, 196 bp, Homo sapiens
tggctctcctacacggggtcttctcagaggctgacatgcgcctctatgcggccgacatcatcctgggtcctggcagcaccatgcacgcaccgcttcgtgatctaccgggacctgaagccagccaacatccttctgcgacgagcattcgccacgatccgcgattctcggcaccttgggtccttggtcctggtgcact

SEQ ID NO: 535511 - DNA, 1214 bp, Homo sapiens
cgtctcatgtattccgcttgctactctgttgcctcatagccgcgccgcttctccttctgtttcgccgcgctacttcttgcactgctggctctccggctgtgtttgggcccttgctcttttttctaatagcgcggggttcgccgcccgttccgcggtgttgggtccaccccccccctccgctcgttttttatcgcggcgccccccctctgtcgttgtttgttgctgcgccaacacaccgttttttttgcgccccccctgttgggtggggggggccccttcttcccgcctctcgttgttttgttggagtgtccctcctcttttatttttctctgtttctccccccctcctctcggttcttttgtagtagtgtgttccccctccgcccctgcgtgtgttggttgtgttttctccccccgcgccccttcttgttggttgccccccccccctccccttcctccctcaataaattgcgtgtgagaaaattataaataataaggaggaggagaccccaccactatatttgttataaataaaataatagaaaaaagaaagattgctcccctcccccctcccctctgtctcttccccccctcttctttcttctcctaaataagatatatataatatcaagttggtgtgggctcccccccccccctcccctctctcggaggaaagtatttttttatataaacacacactctcttttattcccccccctctctcacactctcctctatacactccgtcctcccctctctctacactccctcttttttttcgcggggttcttccaccactccccctctctctgccccccgcctgtgttgtttgctccccccccccccctctctagaagcggcgcctctccccccctctctctctcccccgcgcgcgcgtggcgcccctctctttttacccacctcccccctcttttggcgcccctctctctgcgggggtgtctctctctgtactcttctttttttctcccccccccgcgcgcccccccccccctctctctctccccctccctccccgccgcgcgcgctgtatctcctctctcttgtgggccccacccctcgctttttatattttgatagcccccccgctttttgataaaaatctcccccccccccctgcccccccccccaaggagagggggttttattataataaaattttttttttttttttttttccctctttttttttgggga

SEQ ID NO: 535512 - DNA, 2890 bp, Homo sapiens
  misc_feature (115)..(115): n is a, c, g, or t
  misc_feature (2121)..(2121): n is a, c, g, or t
  misc_feature (2129)..(2129): n is a, c, g, or t
  misc_feature (2132)..(2132): n is a, c, g, or t
  misc_feature (2138)..(2139): n is a, c, g, or t
  misc_feature (2145)..(2145): n is a, c, g, or t
acgccgcacgagcggtcaagtgctggaattacaggcctgagcaccgtgctggccgagttattaacttcttaagagcaatgtgctaataaatactcattgatgaccagctcaaatntaggtcattcagacatccagacactggggcacatattctgcaagcaatgctgagacccctgacatagagaaagcaaaggatatgcctatgattagtctaaaatgcagccatcaccccccatacctcttctatggcattcatcctaacatcatggaggcctttgtcctagagaattatgtgacttgccctagagaattagtgaatgaccaaaaagagactttccatttatcttcctttgacttaaaaggcatgaaaataaggcaaaaaaatcaataaaataattttcctgaggaaaggttaagagatggcactttcctttccgggcccagagctggatttctctgaggtttgaccatctcaggactcagacagactccagtgctattttctggacatttgtggtgaagcctcagccaccatgttcaaggtggtttgaatgaaaacatactcagattgtcacatttatagcagggaaataaaaactcaaattaggcatcctgcagcaggctactctgaaaataacattaggcaacatcagagcttcacttgcaaagaaatgttaaaatcattttagggaaatcagtgaagtctctttagaaacagacatcttgtgtatggcgtaacccagtcttggggccctcacggagaagagggggaagtcttttcattgattggtcaaaacaaatctctcatttgcctgatttgaagcatttcaacagtgcctggagagtacattattttcaggggaaaaaaaggagagagtcttttttatatgccagctgggatcatgggaacttcgaatgccaggaatttactactgtttctggtaattctgtgtgtagtcatttgaaatgttgaagtgtgaaaagagaagaaattgggcacttcttgcggcgggggaggggggaggggggggcggtggctttccagattttatgccagttgcaccagcatgcagaatatttgtaatgcatttcaaagtggatataatggcacccttgtcagaatcacaaagctcactgcggactgctacaagaggacactgaggaaaatctggccctatgaacctagtcaaccccaagcaaaaagaatgactatgtgtgtgagtgcagcacatggccagttcgtttctcactgttttggaaagccctgtgtgccaaaccaaggacgtgtctttcagggaaaggttaattttccgaagtttattaaaatagaacttggaaaaccaagcattttgaatttattccagtcctctgggcatcattcctatttcttctgccatgtcaaggagaaattccaagcctgcattctgtcatgctaaaataaccagcccatacttctcggtgaccttctgttgaacgtacctgagcctgcaaatgtaaaaatgattgtatctgaatttgcactaatggtgtctgagagcaaaaagagtgtgacctctattggaaacctttgttcaaattcaataattcagagatgctacatacttctgcaagcttcctgattatgttcactgtaatattaatgacctaagtttgaatgtatttccttacagtccattaatttgacatccatcttttacctggggattattacaattgcaataagtcattaatgttttcttcacacagcttcttaaaccaagtttctctgcagctctttcggttctgcttacagtgtgtgggaaatctgatttttttcccctagtaatagtttgataagaaatttagtgtattgactgcctcagtgacacaatttatctttaaaggtgtggaagctggtggggaccaaatgttacctgtgtttttgctgttgattgctattttcagaagcaaaccatgtttttcacttacagtaggagtcaacaaatttgggattttagaagggggaggagggagctatttgtgtaagactgctgtcatatttgactacatattaaaaacagtaaatgagcatttgttttaatttcttaaataccttgtctttcaacatacgttttgtttccnttcttccnttngtgttnnaaaggntctacccttgtggaagaaattctgtgtgcagaattcagaggcacaaggctgatggcaagatagaaagttattttgcttctaaacccaccccgatgtggaaactgatactagctagagggagctgtagaaaacaaagatttcaggattgcacagtgtgtgggcaatgggatggagactttttcccctattcccagccacagtgcccaagcgttcaagtctcctggatcagacagatgggattttagctgctgctttaaatcctagtgctggaataagtcaaggtacttcagttcagctcttgcctctgtcactaatcttgctttatgaactcctttgattttctgaataagttccagaaggttctctattattctgtccttcttccaaactggaaatggctgtatctaattctcaggatattttggatgtgtgcctcaggtaatttatgtggaatgtgtaaagcaagatgtctccaattctgaatattccttccccttttcccaatcctccactcttggactacctttataacaacaccgagtacgcacagacctgaacccatgcccaagaagcacacacaatgactggagctgtcgggaattcctgtcagtggcattccctgagcactggctctgtacaactcaattataattttttaagaatcatacctctgtatagatcttttggactgtactgattaaactttgatattgtggagtaaattcagaagtgcaattttgaaaaa

SEQ ID NO: 535513 - DNA, 2070 bp, Homo sapiens
  misc_feature (115)..(115): n is a, c, g, or t
acgccgcacgagcggtcaagtgctggaattacaggcctgagcaccgtgctggccgagttattaacttcttaagagcaatgtgctaataaatactcattgatgaccagctcaaatntaggtcattcagacatccagacactggggcacatattctgcaagcaatgctgagacccctgacatagagaaagcaaaggatatgcctatgattagtctaaaatgcagccatcaccccccatacctcttctatggcattcatcctaacatcatggaggcctttgtcctagagaattatgtgacttgccctagagaattagtgaatgaccaaaaagagactttccatttatcttcctttgacttaaaaggcatgaaaataaggcaaaaaaatcaataaaataattttcctgaggaaaggttaagagatggcactttcctttccgggcccagagctggatttctctgaggtttgaccatctcaggactcagacagactccagtgctattttctggacatttgtggtgaagcctcagccaccatgttcaaggtggtttgaatgaaaacatactcagattgtcacatttatagcagggaaataaaaactcaaattaggcatcctgcagcaggctactctgaaaataacattaggcaacatcagagcttcacttgcaaagaaatgttaaaatcattttagggaaatcagtgaagtctctttagaaacagacatcttgtgtatggcgtaacccagtcttggggccctcacggagaagagggggaagtcttttcattgattggtcaaaacaaatctctcatttgcctgatttgaagcatttcaacagtgcctggagagtacattattttcaggggaaaaaaaggagagagtcttttttatatgccagctgggatcatgggaacttcgaatgccaggaatttactactgtttctggtaattctgtgtgtagtcatttgaaatgttgaagtgtgaaaagagaagaaattgggcacttcttgcggcgggggaggggggaggggggggcggtggctttccagattttatgccagttgcaccagcatgcagaatatttgtaatgcatttcaaagtggatataatggcacccttgtcagaatcacaaagctcactgcggactgctacaagaggacactgaggaaaatctggccctatgaacctagtcaaccccaagcaaaaagaatgactatgtgtgtgagtgcagcacatggccagttcgtttctcactgttttggaaagccctgtgtgccaaaccaaggacgtgtctttcagggaaaggttaattttccgaagtttattaaaatagaacttggaaaaccaagcattttgaatttattccagtcctctgggcatcattcctatttcttctgccatgtcaaggagaaattccaagcctgcattctgtcatgctaaaataaccagcccatacttctcggtgaccttctgttgaacgtacctgagcctgcaaatgtaaaaatgattgtatctgaatttgcactaatggtgtctgagagcaaaaagagtgtgacctctattggaaacctttgttcaaattcaataattcagagatgctacatacttctgcaagcttcctgattatgttcactgtaatattaatgacctaagtttgaatgtatttccttacagtccattaatttgacatccatcttttacctggggattattacaattgcaataagtcattaatgttttcttcacacagcttcttaaaccaagtttctctgcagctctttcggttctgcttacagtgtgtgggaaatctgatttttttcccctagtaatagtttgataagaaatttagtgtattgactgcctcagtgacacaatttatctttaaaggtgtggaagctggtggggaccaaatgttacctgtgtttttgctgttgattgctattttcagaagcaaaccatgtttttcacttacagtaggagtcaacaaatttgggattttagaagggggaggagggagctatttgtgtaagactgctgtcatatttgactacatattaaaaacagtaaatgagca

SEQ ID NO: 535514 - DNA, 1056 bp, Homo sapiens
taaccgggatcgcgctcggacctcttccggccctgctcgttcggctctccagcttgggatggcctggcgttagctgcgggtcgtgcgctcgctctgcaggagcctcaggctctgctggcctggtgcctgtggcgccggcggccctgacatgtccccacctcgcaagagcagccgatggcgccactatgtccgacaaaaggatcaaggtggctgaagcccgtggtggagatggatggtgatgagatgaccctgtattatcttggcagttcatcacgcgcgaagcatcatccatgcctacgtggacatccagctagcatgtattttggacctcagtgctcccaaaccgtgaccagaacgtgatgacgcaggctccccattgcactcgtgctactggccacccagaaagtaccagtgtggactgtacgacgtgtgccacccaatgactcgcctggatagcaggcgcatgctgctgggaagcagtttcaatgcgtgcagacacgatggtggacacagctcccgtaagttgggcagactttatcacgctgaaaccatccagtggacagcgtggacaacggatcgatcacccgcggcagaccacgacttatgtcgttgcataacatgcatcacgtcgctccacgtgcacgtatgttcaccatacgaccttggtagccaagcaggaccgccaaattagccccgattatgggcacagtgaatatcgccgccgcgttgggcacaaaagcatatgctcacagtcacgggccgccgagggaaggcttcagctcctagaggccaatagagccattatttaactcagagctcgactcgttttcacgacacagctgcgcataatctccattgtgcccgtaaaaacacgctgcgtgttaaggggcggcctgcgtgcaaccgtgcaaggcactagtccccccgacaccatcgcatgtccagacgcttacgcacacgcgactacaacctcgggtgcgcgttcgcacgcagccactattggtgccactgtgatccaagaaagagaacccagaccgctgctcgttgccacgcgtc

SEQ ID NO: 535515 - DNA, 626 bp, Homo sapiens
agcggatgtgggcggaccgtgcgggctggaggtgtgaggatccgaacccagggttggggggtggaggcggctgctgcgatcgaaggggacttgagactcaccggacgaacgccatgagggccctgtgggtgctgggcctctgctgcgtcctgctgacctgtcgggtcggtcatgagctgacgagtgaagttgatagtggagtggtacaagtacgaagaggatctgggtaagaagtagagaaggatcaaggacggatgatgaagtagtacagagagaggaagaagctattcagttggatggattaaatgcatcacaaagtaagagaacttagagagaagtctggaaaagtttgccttccgaagtccaagagttgaacagagatgatgaaaacttatcattcaagttcattggtagtagaagaagtaaaggagattgtgccgtgagagaaactgactttcacaactgcctgtctggagtgctttagagtaaggataaggggtaatatccactgactgatgaaaatgctctttctggaaatgaggaacctaacagtcaagaattaaggggtgataaggagaagaacctgctgcatgtcacatgacagcggtgtaggaatgaccagagaa

SEQ ID NO: 535516 - DNA, 853 bp, Homo sapiens
ggaagtcactgccatggaagctttcctttaatatttcttacacttgtggcgcagctcgatctttgttttataccacatagccaaaacatatctccttgccttctaatgtgtgaaactgcgattttctctaacgtgagattcaagatctgcctttgtaggacctgcgctttgtgacacgcagaaaaccgatcattctactacgagctacctaggaacgcctcgaaggttgagacgcagttcataaacatcgatcgcatgcaccagaccatgattcactcagcggtcgagcgaaccgtagctgagttagtaaaacacaaattcaccatatggccctatcaatggagcacagccaactatgttacttttacctgttgtccaaattttagatgcacattttactaacaattttaaaccatatttcttccttcttcatactccactttctaactccatcataacctagcttattgtttaccatataatactttgtatacaattcagcgaaggaaagttttcaaagcatcactgtctcatttgatatccacaacttattgtcaggtaggaaagcagagatgtttttcccacctgtcagatgaaaaaactgaagctcataaagggcttgacttgaccatacagctaatgctgacagatccaagacctagacctaggtcttttgaactcaagtccagcattctcaactatatcaagttactgttcagaatacttaatatctcctctcttcataattatcaatagccccaagctcatggatgacaaatctctgctttatttcttgtctctatttttacactttatagctcctgttattaatagcaagttaaatggtataaag

SEQ ID NO: 535517 - DNA, 100 bp, Homo sapiens
gatatcggaccagtcagcggtcagtcagcggtcggttcgcctgctgggggtctgttgtgttggaagaagacagaggtgctccgcttactgagcttactga

SEQ ID NO: 535518 - DNA, 561 bp, Homo sapiens
agcttatccagtgtagaacgagggatcagtgatgtgatactactttgtcatagccgtgtcctcgatgtatagcggcttagctgtttccccagtatatgtctcggtatctttctagaaatagaaaatgagttcactgtagatgtgtggatttgtttctgagttctgtattctgtccattggtttatgtgtctgcttttacgccagaatcatgctgtttaggttactataactctgtagtataatttgaagtctgataatgtgattcttccagtttagttctttctgcttagtatagttttgggaattctggaacttttgtagttccgtgtaagttttaggattgttttttctatttctgtgaagagtgtcattggtattttgatagggattgcattgaatctatagattgctttggatagtatggacagtttaacaatattgattcttccagtccatgaacatgaaatatctttacattttattggtgtcctcttcaatttcattcagtttgcttttcagattggtcactgtcaatgtttagaaatgctgctgactttagta

SEQ ID NO: 535519 - DNA, 204 bp, Homo sapiens
tgggatgaggagaaagatgataacagtaaacaaataatactagtagtgatagctgacatttatatggtgcttactgtgtgccaagtcctgtttgaagtactctacattattcactcatttaatctttgaaataagcctgtgagatattagtatccctatctgacagatgaggaaaactgagttccagggagattaagtaatttg

SEQ ID NO: 535520 - DNA, 156 bp, Homo sapiens
  misc_feature (15)..(16): n is a, c, g, or t
  misc_feature (20)..(21): n is a, c, g, or t
  misc_feature (24)..(24): n is a, c, g, or t
  misc_feature (27)..(27): n is a, c, g, or t
  misc_feature (37)..(37): n is a, c, g, or t
  misc_feature (64)..(64): n is a, c, g, or t
  misc_feature (112)..(112): n is a, c, g, or t
gatcctccacaaaanncacnncgngcnaaaagcggtnattcagtcggtaccctggacaagaatngatgatggtgtgggtggagggaagcggcaactagggtagaagaatgtnctgagtggggaagcagcagccccactgtgtcctagtagcagcct

SEQ ID NO: 535521 - DNA, 530 bp, Homo sapiens
  misc_feature (12)..(12): n is a, c, g, or t
  misc_feature (29)..(29): n is a, c, g, or t
  misc_feature (35)..(35): n is a, c, g, or t
  misc_feature (44)..(44): n is a, c, g, or t
  misc_feature (64)..(64): n is a, c, g, or t
  misc_feature (78)..(78): n is a, c, g, or t
  misc_feature (471)..(471): n is a, c, g, or t
  misc_feature (476)..(476): n is a, c, g, or t
  misc_feature (507)..(507): n is a, c, g, or t
  misc_feature (516)..(516): n is a, c, g, or t
ttcacaggatgncaatcattgtgtcactncactgncagcctagnaacttcctgggtgctcaagnccatgcctgctagncctcagctacttgggaggctgaggctggaggattgcttgaggtcaagtattggaggctgcagtgtaccatgatggtgcctataggaatagctactgcactccaacctgggacaacgttatcaagaccccatctcttagtaaaaatgccaaaattaaatgcaaaagaaatgggctgggcatagtgattcatgcctgtaatctcagtaccctgggaggctgaggtggaaggattgcttgagtgcaggagttcaagaccagtctaggcaacatagtgagaccctgcctgtaaaaaaaataataaaaatagttggatatggtggcatgtgtctgtagtcccagccactctggaggctaaggttggaggatcagtagagcccagggaggtcaaggctncagtnggccatgatcatgtcactgctctccaacctnggcgacatncagaccctgtctca

SEQ ID NO: 535522 - DNA, 178 bp, Homo sapiens
gctgacctcagatgatccgcccacctcagcctcccaaagtgctgggattacagcgtgcgaccgtgcccgaccagtgtattttatatgtggctcagcaattcttccagtgttgctcagggagcgaaatattggacatcctggagacactcatactgaatgaggtttaccgataggcatg

SEQ ID NO: 535523 - DNA, 406 bp, Homo sapiens
ctcggggtctaatattgcatgtggaattaggtccaaggatctccagagggtgaaacgctggcgtctgtcagtgtccgtactgagacagcacagccaacctagctagcaacattggttaaaggtctgaacaatatatacttatagaattcagtcaaagatacacaatctgaaacagctacaatggggtgtactctcaacagtagttgcaatgtattagaatgagcacttacttctctgctatctagatctgacactccgtggctactttacttagtacaagccccagccaaaggaaagccagttacattaaaagtgggctcagtgagtctaagcagcttaacctaaaattattgagcacccgaaagggggtaaccggagcatcagaattacgtcaatcccttggtct

SEQ ID NO: 535524 - DNA, 339 bp, Homo sapiens
  misc_feature (63)..(63): n is a, c, g, or t
ctccacccgatgggtggaggtgaggtttggtagaagatgactcgtgttgaaatgtgctccccnagtgctggtggtgaggtttggtagaagatgactcgtgttgaagtgtgctccccaatgctggaggagaggtttggtagaagatgactcgtgttgaaatgtgctccccaatgctggaggtgaggtttggtagaagatgactcgtgttgaagtgtgccccccaatgctggaggtgaggtttggtagaagatgactcgtgttgaagtgtgctccccaatgctggaggtgaggtttggtagaagatgactcgtgttgaaatgtgcaccccgtcgggtggag

SEQ ID NO: 535525 - DNA, 166 bp, Homo sapiens
atgtaaaactttcttgagctgcaggacaagctggtgctactcttcctgtagagccaaaagctaaacctccaacttaagaatttgtaccttggtctcctctaatgacatactactcttccatactaccttatacttaccttctctcctgtaacttaccttaatactt

SEQ ID NO: 535526 - DNA, 873 bp, Homo sapiens
gctatccctcggtctgggcttctctgagagctggcgagagatggtcaggtctggagctcaaccgggccaggtgttatcttcaggaaggcacactggacctgctaacacttaacaaatggaaagaaagcgacctatttaagaagaaataccacggttttaatgcagacttctggctagttccatccattctgagttcagaaagtcaggcctgacaactgtacactgggccttgactgcgttgtgacttcatttgctgagaggacacttcttgagacaatgacagatttcaggcttcaagacaagcagccactactgttagaacaaaccaggactcgtaactttcgtacggaaccgttataggaaagacgcaacaaggaataccgcgaattcagacacacaaaggtacacacagcaacaatgaacatagacagcaatttaacgttaatttccgtgtatgggataagcttccaagcaaagagccaccaccgagttccagtcgtttgcaagcaagttaaagtacacgcaaacacgccaaggaattagccttaacgtggaaacgccatatcctttcccttacggaaacgccttggaacaccaggaacccaaaccaatcatacttctaggaaagcccgattaggccaaggccccaaagcaaaccttggagcgttcaacttctggcctagcacgtaacgtcccagtacaaacttaggaaaacctggactcgcgttatcccaacgcccacaatttaacagcgtaacgttagaccccataacacgacccggcaatcccttggcattgcaaaggccaacccaggataggagcaacgtaaacaacgtccaaaagaaaagttgggttccaacccgttggaaacct

SEQ ID NO: 535527 - DNA, 340 bp, Homo sapiens
  misc_feature (155)..(155): n is a, c, g, or t
aagcagaattcggcacgaggctttggcagctcgggactaagtccaagattaagcatgtttcttcagaggctctccaggttctcctctgtaattcggtcagccgtttcagtccatttgcgggggaccattggtgttaaagcagtggcatttattanggaccttgatcctttacagaactctttgtggcagattagagatacaatctaagcgacaccatctggggccctttgatgctagttcagagtacaacagactgagaggagcttttagctcagaaattttgtatgcgcatgattcattcccctctattggggaccatttgggcacgaacccgggcctg

SEQ ID NO: 535528 - DNA, 143 bp, Homo sapiens
  misc_feature (142)..(142): n is a, c, g, or t
aattatgacagaatattggtgaaagttagagatttacaaatgctgacaaaatatttcctagcatcagtagattctggcatatgttctgctagctatatatttaggaattcaaagcataaaactttggctacatctaccgtgng

SEQ ID NO: 535529 - DNA, 179 bp, Homo sapiens
  misc_feature (117)..(117): n is a, c, g, or t
gcctgggattttccaaacaattttaatttcctcagagtcttccttaatccgtagggaacaaggaggctggcactggaagtagggcccagtatagggggctggcttttctactccctncccccacaatataaacaatactagacttttttattttttattttttattttattttctctta

SEQ ID NO: 535530 - DNA, 274 bp, Homo sapiens
acttacttcgggctcttatacaattgttaagaaatatgaagtggacttttgttgtagttgttttcagatatacccagtctgtcacccgtaactgatatacaaagggaaaacagtgaaaaaaagtacatattctgtggcacatgcacgagatcagaacaaatataactaaactgttatgacattaacagttgccatgcatgtagagtttcacatgttactacgaacttattataattacacaaggtttgctaaacatgctaaccatctacatgca

SEQ ID NO: 535531 - DNA, 189 bp, Homo sapiens
gacgtgagtcttggtggctggtctggctgctcctggcgcacactcgcgtaggtggctggttgctgtttgagccagcttggacttgcttggactgcacaggctctcagtgcaacacactgtgctacaaactggagccacagatgaggaaacgagccgcaggttcaggagcagtgtgtgctctcgcctttt

SEQ ID NO: 535532 - DNA, 1091 bp, Homo sapiens
tggatactgagcagtaacaaggaacgtgggcatctggttgaaaggagaagaccagatctgaattaggtgacgactgtggacaaggtaggtctagcactaggcaatctgcccacccccgcatgggtgttaggctgccgactagagccgggcctatgctcactagactagtcaccaacgtgctacatcttactatctggtgcttggctatttctgctggcgggctcctacacttctcctaaaactactcggctggcgacaagttagacacgacggaggacacaagccactgtatgacgactggctgaagaacgacttactacgaccgtaggtccaagagaccactctaccgctcgcgacctgtggagcacgagacactcggacgccgctactccactactgtacggcactccgtgccaacgtagacagcagacacgcctctgactcccataccacagaacgaccagagacggcagcactagacacgacgttgtcatcgggacacagaaggctgatcggcagcttccatgagcacatcacaaaccgaacatccccggcaatcccaggacagagcaggatccacacacagacagattcgacatcaagcacgcacgcggaccgaactgacactggagtagataggccacgaattggccgaccataccagaccccatacatctaccacattatccttctatgaagcataccaggacagacaggacttacaacgactcccccgacgcagcatgaggcacgcacatcctgaattatccccattggagcatccacagtcacgccgctgcatgtcccccctcagaggtacccacaggcagccatgtaaatgttcagccaatgaaaagcggccccgaccatcgccggcacgcaggggattccgaaccacctaagcgggccactattgacccgaccgagttgtcacgactagaaaaaagtatctcacacgcaaaccattataggacccctactttgtgcaccaccgttatctgcacgaagaatccaccttactgactatacacccttgagagaacacaaccggatagtatcaccacaaacaaagtaggagatcgatcgagccc

SEQ ID NO: 535533 - DNA, 763 bp, Homo sapiens
  misc_feature (488)..(488): n is a, c, g, or t
  misc_feature (576)..(576): n is a, c, g, or t
  misc_feature (595)..(595): n is a, c, g, or t
  misc_feature (605)..(605): n is a, c, g, or t
  misc_feature (647)..(647): n is a, c, g, or t
ctggtgtgcagcctcagtgacgtttatcagatggagaaggacattgccatggagcaagagaggaatgctcgctaccgaacccccaaaatcttggagcccacagccttccaggaacccccacccaagccgagccgacctaagtacagaccccctccgcaaaccaacctcctggctccaaagctgcagttccaggttcctgagggtctgtgtgccagctctcctacgctcaccaggccctatggagtatccatctcccgttaactcactgcacaccccgaccgtctccaccggcacaatgtcttcaaacgccacagcatgcgggaggaggacattcatccaatcaccagcagcctgagaagaggcccagcagcgtgtggagaggctgaaaaggtcaaacatgcggcaaatcctggacgaacagcagaagcagatggtggaggactaccaggtggctcaggcaggaggagaagtccctggaccccatggtntatatgaatgatacgtccccattgacgccagagaaggaggtcggctacctggagttcacagggcccccacagaagcccccgaggctgngcgcacagtccatccagcncacagctaanctggaccggaccgatgacctggtgtacctcaatgtcatgganctggtgcgggccgtgctggagctcaagaatgagctctgtcagctgccccccgagggctacgtggtggtggtgaagtgtggggctgaccctggggctcatcgggagcgtggatgagc

SEQ ID NO: 535534 - DNA, 568 bp, Homo sapiens
  misc_feature (293)..(293): n is a, c, g, or t
  misc_feature (381)..(381): n is a, c, g, or t
  misc_feature (400)..(400): n is a, c, g, or t
  misc_feature (410)..(410): n is a, c, g, or t
  misc_feature (452)..(452): n is a, c, g, or t
ctggtgtgcagcctcagtgacgtttatcagatggagaaggacattgccatggagcaagagaggaatgctcgctaccgaacccccaaaatcttggagcccacagccttccaggaacccccacccaagccgagccgacctaagtacagaccccctccgcaaaccaacctcctggctccaaagctgcagttccaggaggaggacttcatccaacccagcagccgagaagaggcccagcagctgtgggaggctgggtctggctcaggcaggaggagaagtccctggaccccatggtntatatgaatgatacgtccccattgacgccagagaaggaggtcggctacctggagttcacagggcccccacagaagcccccgaggctgngcgcacagtccatccagcncacagctaanctggaccggaccgatgacctggtgtacctcaatgtcatgganctggtgcgggccgtgctggagctcaagaatgagctctgtcagctgccccccgagggctacgtggtggtggtgaagtgtggggctgaccctggggctcatcgggagcgtggatgagc

SEQ ID NO: 535535 - DNA, 1229 bp, Homo sapiens
caccctcccgcgcgtgtcattcatcccgggtcgttctttttctgtgaccccttcatgattctcctcgggtatccgcccattcagccgtgttttttgctccctcctttttgtgttgtctcccgggtgagccggttttccatgtcctttcggtgacgttctagcctttgggtcctcgtcggttgtccggtattatactatgttgtgcacacacctgtgtatatcgtgctattgtgtacccttttttgggcccctatttttaggggttaccatcttttccgctacatgtttgtgttccatatatagtcttggctctgggtaccctggttcccgggtattttcccgtggattctgtcttcctgctgtatcttgctgtggggcggcttcttgcaatgtgagatcttggattaccttcagcctgtgtctagccatcatctgatgggcaagaatcgttttgcgtgtcatcgtggggcctgctcccgcctctcatcgcagaccctggtatcagattcggtacaatcgaaccgatagtccatgaggtgcctcatgatgggccctatgtgtgacctcctctggttctgacccagtaagtactacctacaggtctggtggcgtgtagcccccgtaggagtccggctacctatttggcagtgtacgtggtggcccagttccaacgctagcctaatgtactattgacatgatcctgccgtgtccctacctatctggtgatggaagggttacaagtggcacttctaatgagtacggtgctcactgtgtggtcggcacccaactatctgctaccgctgtgggtaatgtggcagccatcttggagctggtacgagcatctcctagtaaagattgtcatctatcttttgagtgcatgctccccttagagacatcggggcatcgcctctccatagaaagcccgtggccgtactacgttccatgtgaccccgcctcggcccctgccccctcctaacccttctggcccatcgcaccactgtgaatctgccaatcttccatcagacggaggactgggagtggggggagagtctgtcctggctctgctgtcccccaagagggtgattacgagggtgaggacttctcatggagaggcctggagacatagacatccatgttcatcatcctctctccccaacttgaaaccactgaagtttccaataatttatttttcatttttttccttcttttactctgttggtttatagatt

SEQ ID NO: 535536 - DNA, 230 bp, Homo sapiens
actctacttgggtgaaggagtgacactggtgtggtatacagttgtctgcacactgttgtggctcatataagcaggttctagagccttctttcctgccaggcgtttcccaataccaaccgctggttcctcaccgtgcattaaccatgccccagttcctgggctgtcgttgggcgaagtgaaacgtgtgtgagacagatggcccatgtttgatagctaaaaatgtttgcaga

SEQ ID NO: 535537 - DNA, 248 bp, Homo sapiens
  misc_feature (32)..(32): n is a, c, g, or t
  misc_feature (86)..(86): n is a, c, g, or t
  misc_feature (197)..(197): n is a, c, g, or t
  misc_feature (204)..(204): n is a, c, g, or t
tcacgggcctcgtggcctgcttcattgacatngtggtggaaaacctggctggcctcaagtacagggtcatcaagggcaatattganaagttaacagagaagggcggactgtccttcaatagttgatgtgttcacgctgaacgccgccttcgtgctcgtggactctgtgattgtggctttcatagagccgttggctgntgacagnggaatcccccagatcaagtgcttcctcaacgtggtgaagatccc

SEQ ID NO: 535538 - DNA, 461 bp, Homo sapiens
ttatttttatttttttgagatgagtcttgctctttttgcccaggttgaagtgcggtggcacgatctcggctcactgcaacctccgctcctgggttcaagcgattctcctgcctcagccacccgagtagctggaactgcaggtgcccaccaccacacttgactaatttttgtatttttagtagagatggggtttcaccatgttggccaggctggtctcgaactcctgacctcaagtgatccacctgccacagcctcccaaagtgtggggattacaggcatgagccactgagcctggccgagaaatattttcctaatacaatatataatatgagctctcttgaaagtagcatctgagaattttgaaaagaatgaatacattgtaccccctaagaagaggagcagtgtggaatttttagtttgtttaatctacccattgccgttgaaatggtgctggttaatag

SEQ ID NO: 535539 - DNA, 526 bp, Homo sapiens
  misc_feature (500)..(500): n is a, c, g, or t
  misc_feature (510)..(510): n is a, c, g, or t
ctcttgctttgcttatcatggtgtccaagagctcgcgcggtcccggcatggccgccgccggcagcgaggcggaggaggcgctcctgctgccggagcgcgtcgccggtgacgcgggggcgcctcccggcaacgcgtccgtcctcggcgcggtgttcaacgtgtcgacgagcgtggtgggcgccgggatcatgtcgatcccggcggccatgcgggtgctcggcgtggccccggccctggcgctcatcgtgtgcgtagcgctcctcgccaacgtcgccgtggacttcatgctccggtacacccggggcacgccgtcgtacgcggcgctgatgggcggctcgttcggccgcgccggcgccaagctgctcaacgtcttcatcgccttcaactgcgtcgggaccctcaccgtctacctcataatcatcggggacgtgatgtccggccccgtgggcagcggggaggcgcacgccggggtgctgccggagtggttcggcccgcactgntggaccggcnggatgcggtgctggtg

SEQ ID NO: 535540 - DNA, 117 bp, Homo sapiens
gtgaatgagccaatttattaacccagcatggtgtgggggggtgcttcttgttggcagctgccacctgtccggcgattctgtccagatctctgggtcgcttatgtcgtaatctaacag

SEQ ID NO: 535541 - DNA, 460 bp, Homo sapiens
aagcagtggtatcaacgcagagtggcattatggccgggggggggttaaaaaaaaaaaaaaaaaaaaaaaggaaaaaaaaaaaaaaaaaaaaaaaaaaaaaaacatgtgtgtggggcgcgcgcgcgcgcgggccccgaagaaaagttttctaaagaacaccaccgcgcgggggggcgcgcgggggcgcccaagagagggaagggagagaaagggggacacaaagcggggttctctctaagagagagagacacccgggggcacagagagaaaagggcggggggtttctcccccaataaaaaaaacgcgcgcgcggggggacgaaccggagggggttaggagaaaaaatacccacaagagggaggttctggggggcaaaaggggggattattaataaagggggagaccaaaaggagggcccgaaattaaaaattacccccgagggggggggataaggaaggag

SEQ ID NO: 535542 - DNA, 236 bp, Homo sapiens
ccatcctcccacaaaaacctgtacacaaatctcatagcatcattattcatagtggccaaaaaaatacacttaacccaatgtccatcacttcatgaactgacatgtaaaatatgatatatcacaacaatggagttattcagcaataaaaacacaggcctggcatggtggctcacgcctgtaatcccaccactttgggacgctgaggcaagtggatcacccgtgggcacgaaaatcac

SEQ ID NO: 535543 - DNA, 150 bp, Homo sapiens
  misc_feature (107)..(107): n is a, c, g, or t
  misc_feature (119)..(119): n is a, c, g, or t
gagaatgcagcgacgatgtgcgaaggtcctacggcgcgggcttcgttagcgggccctttgtcaccgacagcgaacctcaacttcgtcgagtaagaatgtttaacccnctgtgtcgtcgngtaccgcgaagcgtcgacgcgaaatggtctg

SEQ ID NO: 535544 - DNA, 102 bp, Homo sapiens
ccctgtgaagtaaccaactggtttttggtttttttttccccccccgttttaatgttatgggtaatggatttaaacccctatttaaataaaacctgttttcca

SEQ ID NO: 535545 - DNA, 619 bp, Homo sapiens
ccggtcaatcaaattagtaaaattaaagagaagttagaaaactcaatataggatgcagcatagctacaaaacccactctacttatgggactattacttcgagaaaataatttaagagaaaagccgggtgggttgtggtggctcacgcctgtaatcccaacactttgggaggctcaggcaggtggattgctttagcccaggagtctgagactagcctgggaaacatggcaaaaacccatccccacaaaatattaatatatagaaattagccaggagtggaggcacacgcctgtagtcccagctactcaggaggctgtgacaggaggattgcttgagcccaggaggtcaagacttcaagtgagccataatcatgccactttccagcctgggcaacagagtaagaccctttctcaacaaaaacacaaaaatcactgtttaccttctctaacccttatcattatgtaaacataatttaatagtttaatcagtatgccttattattattttttcctcttattcatttagtatcattttttaaagtatatttctataggcactatagaaccctgctgaaattggctgaggatactcttcagtggggccagaagttcttagcatta

SEQ ID NO: 535546 - DNA, 715 bp, Homo sapiens
gggttgatgggaatcatcatatttggtttcattataagaaggaccattagccacacaacggttgatatcattttggcaaatccgggttcttgtatttggtagatcttgcagctgtgtgtcagctgaagacagcggacaatgctgacaaatgctaagaagataattgataaatgcatgttgatatatatgaggcaggctgttacttggcactgtattatccttagctcgcaaggtgccacacccgagtttacagcagttttcattggtcaagccagagtgagctgtaaatcggatgtaagaagattatgtaagtagatgctcacacacctgtgattcgtattcttgacgataaaagcccactttgcataacaccttacacatattccaattcaacatccttattcatctagcatgttttccagcttgctccagcattctatctatagagcaactttctctattctaccggtattcgagttcaattggcctaattgcccaattttgagtgttactacaattaattgctcgatgacataatcttatttactgttgagattttgcgtatacgtcctaatttgccgtatttccaaagtttttaaccttttgcctaatggaaattggctctgaccgtttgtctaaagttccgttaatttttggttcattattctattttctacccgtagtttgtctctagcccgttcttattcatgtttcc

SEQ ID NO: 535547 - DNA, 597 bp, Homo sapiens
  misc_feature (597)..(597): n is a, c, g, or t
gggggtaaatagtaggtgcatatatttatggaatatatgagatattttggcacaagcatgcaatgtgtaataatcacataatggaagatggggcctacatcaccttaagcatttatgcattgcattacaaacaatccaatgatactcttttagttattacaaatgtacaattaaattattattgactatagtcaccctgttgtgctatcaaacactaggtcttattctttctatttttttgaattcatcagccatcctcacttaccctccaaccccccactacgctttccagcctgtggtaactatcctactaggctctatgtccatgagttaagttattttgatctttagatctcacacataacttagaacatgtgatgtttatctatccgagcctcatttatgttacttaatataatgacctccagttgaatttattttgtttaacgatattcttttaacataggtttttgagagttagtaagtatatgccagtcccagcataccaaacattgcaccttaagaaatagagtccacgcttggtacatagaaagcgtacagccaaatctttatttgcatgttctaagacttctaaan

SEQ ID NO: 535548 - DNA, 385 bp, Homo sapiens
cataactcataccctgtagttcaacaatgtgtagccagtcactgatcagtattacttcagtaaaccaatgaaaatcctgacaaacaactttgcatcagcccactccttgtctcccctgctcttccacctactttttttggtctttgctacctgcttgtaataaaggctgaactgaacaggagcttatatccaaggttacttggatctgagtcttctgggcaattttcttagatttagctcaagtaaattcattgaaattatattttgtgcctcagcttctgcctttaggttggacaaagtttatttaactttgtgatatgtttagatttaggtacttttttcccaaacaggcaatggggtgttttcctccaaaatcaaagtgccc

SEQ ID NO: 535549 - DNA, 236 bp, Homo sapiens
cccccaaaaaaaaaaggggggcagaaggaacaataaagtcaaaacgggtgggaaatttctcctttgctctgaaaattttacttctttgggtctcaggtccccatttcccccccaaagacatgcaaaacgattttttcttgaaatccctcgggaagaagacatgtttattgaaactgttccttcagccttaaatacaaaaataaaactgaaactgctccagaaagcagctttttcca

SEQ ID NO: 535550 - DNA, 320 bp, Homo sapiens
  misc_feature (19)..(19): n is a, c, g, or t
  misc_feature (66)..(66): n is a, c, g, or t
  misc_feature (77)..(77): n is a, c, g, or t
  misc_feature (88)..(88): n is a, c, g, or t
  misc_feature (253)..(253): n is a, c, g, or t
  misc_feature (282)..(282): n is a, c, g, or t
  misc_feature (285)..(285): n is a, c, g, or t
  misc_feature (288)..(288): n is a, c, g, or t
agaagtagttacttccttnagaatatcctcaggaatcttatgatccaacaagataacctcctgatnagctgcatccnacgtgttcctnagtattaatctggacgctggggaaggcggtcttgagcaggtagaacatcttgcggttggacagcacgtcgccgctggtcatcttgtcctcggctccctcgcgcgtcttccccttggacttctcgtggaggacgttgctctcgggacgcgcctcacctcgttcgcncgcggactgcggccagcactgacacagcnaanatnacgcgcaagtcccacggtgcccacacgacgcc

SEQ ID NO: 535551 - DNA, 1019 bp, Homo sapiens
  misc_feature (50)..(50): n is a, c, g, or t
  misc_feature (112)..(112): n is a, c, g, or t
  misc_feature (123)..(123): n is a, c, g, or t
aggagagtgcgcctgcccctgccccgaagagttaggtatcttggaaaganggtcatgtaacttgagacaatttttgactgtattctccagcagcactgcggtggctctgggnacattggtggngagaggtccttttggataggtttgaacgaccaagtgcatgctggccactgggagtggatcggtggtgaacctgttgccttcaccaatgggagaagagggccctctccacgctccaagcttggaaagagctgtgttttggttcatatacaagggagaagggaaacaaaagactgtaggagagccaaacctgataattatgtgtgttccagaatactctaaatataacagaccctacggggggccatttggaaatttgtcacctatttaattccgaggatgtggcaaatatggctctatacgaaaacaaaacaggcagaatggactggggaaacctttgccaacagtgtgcgagggagacggggagctctaggagagggctagccacactaatctattgtctagtgcttctcttacctgattactattatgagctgacgcctgtagcatccgaaaacgcccacccagcagatatttcaagtgatgttttacaattgtttatgcatctcacaccacccgcccgtgtatttatatgtagaaatgtcacttggtttgtacaacctgtgaaaaaaccactctattctgctttcgtggtaccactgggaatgggtatcacacagaacggtacttgcgagtgcctccccccccaaacgagtagggattgaaaaagtgacacatagggttggtagtaagacagaaaccacaccatcagacactggagtgccatcgccagacactttgttcatatcgtggatagtaagaatacgggcgaacgatcaccgtgttttggatctgctacctcacatctagcactccaccggactccgcattattcctgcccggcgtcgcgtttattctactctggtgaaggtggtacgcgtaaacttacacaaatatgg

SEQ ID NO: 535552 - DNA, 421 bp, Homo sapiens
ggtatagcgagtatgtcatgattaccggtcatcgctttattgacatctgacatgccatcatacctcgacgaattggcccgtcaagaatgacctgaggtcccgatggacgaagacttcaaactcggcaccctgaagcgtctgggcctgcctcactcgacccaagctgacgtcggtaaggcctggcaggccatgctggcacgagtacgcgactggcacgatttagacccccgctttaacacggagatggagaaacttatcgatttcgtcacgcgtgaccatgtcgacgagctggacaatggggagatggcatgagtattgacgtcgacacggtgtctgacctcatccgggatgtgagtgccagggttatcgatccccggttccggaccctccacgatcatcaaatccaccagaaaaagcccgg

SEQ ID NO: 535553 - DNA, 567 bp, Homo sapiens
  misc_feature (421)..(421): n is a, c, g, or t
ggaatgtatttttaatccgcagcccattttgcctgtgggaagtttttttaaagagcggcttgtccagaccttaaaaactattgaacctgcagaagcccaaaggcctcttagacctttctagaatgtaactaagtatctggaaggacgggtggttttggatcaaagccattgtttaagaactgaaaaggtgtggctacatctactggccaacaaaaacagggataatccagctgctttgaaagctgcacagaaaaccttacttgtttcacctctgcagttgataataatgaagcacagaaaaaaaaacaggaggcattgaaacttcagcaggatgtaaggaaaaggaaacaagaaattttagaaaagcccatttgaacacagaagatggtaatttcaaaactggggaaaaaaattaccaaantgaagatgaggtcaaggtggtttttctggacgctgtttccaaaaaggttaaaaaccagactcagatgcccaaggaattacctgcccacgactgggtttatatgcaggtcggggaagaagcacctgtccttatggagggttccgcct

SEQ ID NO: 535554 - DNA, 819 bp, Homo sapiens
ggagaaaggtgtacttaggtacacatttcgctaagtgggcgttactgtgaacggttgaacctgctgagtggcgcgttgtagagctccagtgttcacgttcagtgtcaacaccattcaacagctgtgtgcacatcttcgtacaacataatgctggctttggtgccccgttgtatgccgaccgtgtagatataattgttataagcaggggtcccacaactctactgcaaatgatctgtgaacaggttatcagtggatatgagttgcgtcctagaggagtcaatattgtatccgtttaaggggttttctaacttgttgctatccctcccgcgtgatccaaaatagaagggggggtttactagaagtttacacatgataaacggaacacagaggagtggccgtggggctctcggctcatgcttgtagtccattcaacacttgcaggaaatggagcactaggccctcatgggagctcatagcaagagcttgaatgaatagcttgtcactcgtggagtcgagaccgttggaaacaatccaaaagattaggagaagcctatgctgtctctttgagggacggggggtcagaggatttgcaaatctaggggggatcggatgctgccattggattccttgaactcgaataagcgagtggacgaaggccatttctatttgtagtgccacggaaaattgtctgcgtattgaggtgacctcccagtcttagtatgtggccgattgtattcctaccaccaagaaatcctctggaagacgccagaagcaatgcttcaagaaaggctctaaccccaagggcgtaaatagagctcc

SEQ ID NO: 535555 - DNA, 897 bp, Homo sapiens
  misc_feature (7)..(7): n is a, c, g, or t
  misc_feature (202)..(202): n is a, c, g, or t
  misc_feature (240)..(240): n is a, c, g, or t
  misc_feature (252)..(252): n is a, c, g, or t
  misc_feature (262)..(262): n is a, c, g, or t
  misc_feature (266)..(267): n is a, c, g, or t
  misc_feature (276)..(276): n is a, c, g, or t
  misc_feature (284)..(285): n is a, c, g, or t
  misc_feature (289)..(289): n is a, c, g, or t
  misc_feature (310)..(310): n is a, c, g, or t
  misc_feature (319)..(319): n is a, c, g, or t
  misc_feature (331)..(331): n is a, c, g, or t
  misc_feature (341)..(341): n is a, c, g, or t
  misc_feature (351)..(351): n is a, c, g, or t
  misc_feature (361)..(361): n is a, c, g, or t
  misc_feature (388)..(388): n is a, c, g, or t
  misc_feature (396)..(396): n is a, c, g, or t
  misc_feature (403)..(403): n is a, c, g, or t
  misc_feature (408)..(408): n is a, c, g, or t
  misc_feature (411)..(411): n is a, c, g, or t
  misc_feature (414)..(414): n is a, c, g, or t
  misc_feature (422)..(422): n is a, c, g, or t
  misc_feature (425)..(425): n is a, c, g, or t
  misc_feature (442)..(442): n is a, c, g, or t
  misc_feature (445)..(445): n is a, c, g, or t
  misc_feature (448)..(448): n is a, c, g, or t
  misc_feature (454)..(454): n is a, c, g, or t
  misc_feature (465)..(465): n is a, c, g, or t
  misc_feature (504)..(509): n is a, c, g, or t
  misc_feature (515)..(518): n is a, c, g, or t
  misc_feature (520)..(520): n is a, c, g, or t
  misc_feature (522)..(524): n is a, c, g, or t
  misc_feature (526)..(526): n is a, c, g, or t
  misc_feature (529)..(529): n is a, c, g, or t
ataatgnatgtaaactgaatacaatacttcaaatcattctgcacaaagaaattacagatcacattgtgttttaataacaaaatgtctacttgtttaataaaatgtttttaggaacttacaatgttcaaaaccaaagaataaaaatattaaatatatcactttatggcacatgtgacagacataaatttatttttgtaacacngcaggcaaatttttgtgctagaaacaggatggagaaanatctaaattaangcaaaaagtnaggnnatgggtgtncataagtnnctgnttaactgtgactcaacatttnttgtaaganacggggcctctnaacatcagantttgtttatnaaaataaaancttcctccctgtctctgctaaaaatanaaaaattngctgggngtggnggngcntgcctgtngtnccagctactcgtggggntgnggnaggtgnagcctggcganagcagagtctgcctcaagaaaaaaaaaaacaaaacaaannnnnncccccnnnngngnnngnggncatcagattttttcacctcagcaaatactttttcctttgataattcataatcctgctgttcatttgtcacatttatgaatatctggtaatttcataaacaactaccaatggtacacttcaaatgctgattctgttgaatcttcttattttttttcccccaatgaacttagggcctatgatagagaagatactgaaacatgctaagataataattggtcttagaaagactttacagcaagtatttaatgaaagccactacacttccagctctaaaaagagccagacacaatccctgcttccagagttcaccattcagaatacaggaggtcaagcactgattctgaatcattaatgggctttgatttcgt

SEQ ID NO: 535556 - DNA, 442 bp, Homo sapiens
  misc_feature (275)..(276): n is a, c, g, or t
tgaacactggcagttttgaaaacttccagtctcttagttttataaatatatatgtgcagagtatttgatcacaaaaattagtcacgaatccaacgcatgttactacaaatctggttaaaatctggtagtcgctcaataggacccagagcagcaatagctgggcttttgtcatgaatgtacttggtgcacactcgtccgaaccgtctccgcatccacagcatcaattcttgcttcaagctcggggataggaattctcctattatagcatagcatcnngcctaccaatgtcttcacaaattggagttgacccatcaagctgcagcagcatgtttgttttcagaagattttttgcacgtgcaacctcactctcagtcacatctgtacacagacgcttccattcgttttgtacaacgtgcagcatgtcagcaaccgtggcttgttc

SEQ ID NO: 535557 - DNA, 249 bp, Homo sapiens
ctctacaggatccccccagttcctgcttcttgaaataatggacgttcacccctgcaataccaaggcgtagtatctgtctcgtattgagggcggcagtgagtgtgatattcaacttatctgggctatccttatttggtaagtgagactgtggaacaggatgacaccataaaaggggagcaaactcggcgcaaatactcccgccgtgagcttgcagcggtcaggccctggtttcaagaagcaggagactgg

SEQ ID NO: 535558 - DNA, 607 bp, Homo sapiens
agcggatggtgccgtgcgctggagccgagtttcgctctgctgcccaggctggagtacagtgatgtgatctcctgacgtcaagtgatccattcgcctcggcctcccaagagttctgggattacaagtaatacaaaatacagttaaacataaaatgtcaacctcctggagtgatcggttacagaagtgcagcagatatgcctgctaacagtggataagcatgccctgaacaaagtatcgtcgagaagccgtatcatcgggtgtttgtgaagccgaagtttagcaagtggacaacagataaagtgttctcggtcttcgactatggattatacccttgctgtgtacagagtccccagaagtatgagatcccgttggattgtatgaggcttactggtggagagattagtttctattggctatccccaggagtagctcagctttgcttactgattctacattccctacgcaggggacttgtcatttgacacactgctatggcaacatcttctcgcaaagtcgagtgcctatggaaacctcttggatctgtgcaccatggcatttaacctcttataaggggaccgagaaactacacgaacagtatccacaatac

SEQ ID NO: 535559 - DNA, 101 bp, Homo sapiens
ttgctgttctcgaggatctccgattgtgaataggtaggtggattgcttgaggcaagagtataggaccagcctgagtaacaatgacactccatccctaaccg

SEQ ID NO: 535560 - DNA, 296 bp, Homo sapiens
ttttttttttgagatggagtttcactcttgttgctcaggctggagcgcaatggcacgatctcggctcaccgcaacctccacctcccaggttcaagcgattctcctgcctcagcctcccaagtagctgggattacacgcacacgccaccacgtccggctaatttttctatttttagcagagatggggtttcacatgttagtcaggctggtcttgaactcctgacctcaggtgatccacccgcctcagcctcctaataaaatttatcttaataagataatatgttaatataagataga

SEQ ID NO: 535561 - DNA, 375 bp, Homo sapiens
catatgtaacatatacaacagcacggtatattcaccaaactgaatgcaggttgttgagatcagtgctgaggtcatagtactgaagccattagagtcccttccacattagtgttgctggatagctaaatttctcctgggtactagggtataggtcagacaacagatgcttcacaggatataagtaagcctatggtttgtgatatttccttattcattaactgtggctattaataggataactatgtgccccgccatacgaaatatggcctacaaactaaagcaattagactaatataaatagtactatgtttttacagtacctcactactagaaagcagaccctaaataaagcaagtcttgatatcagaatatcta

SEQ ID NO: 535562 - DNA, 310 bp, Homo sapiens
agctaattaaaaaacttgtaaactctcagcggggcaatgactcatacttgtaatcccagcactttgaaaggtcaaagtgggaggatcgcttgaacccaggtttgagaccagcctgggcaacatagtgagacctgtctctacaaaaaatacaaagattggccaggcatgctggcatgcacctatagtcccagctacttgggatgctgaggcaggaggatagcttgagcccagaatgttcaggatgcagtgaaccaaggttgtgccagtgcactgcagcctggacaacagcatgagaccctgtctccaaatc

SEQ ID NO: 535563 - DNA, 1443 bp, Homo sapiens
taaccaacacactaaccatataccaaatgatgagcgcgatgtaacacgagaaagcacataccaaggcccaccacacaccacctgtcccaaaaggccttcgatacgcggaataatcctatttattacactcagcaagctttctctttctatcagcaggacttatctaactgagcccctctttacccactcccagcctagccacctaccccccaacttacgagcggccctgcgccccccaacaggacactcacccacgacctaaactccccatagaaaagctcccacatccatacaccacactcccgctactctacctcgccactcaccgcagcctatccacactcacccctcgaccctccccccacactacctcataactaccaaacaaccaaccgcaaccccccacacctacccctcacaccccccctagaccccactccaacaacttctctaccatcggcatcctcccactctctacaccaccctcccctcaccacagcccctcacacagactacctctcccacactcctcacccctcccaccccaacaacccagacaccagcccactcctaccgcgacgtcacacacacatacaccccacgctatcccaccccacaccatcaccacacagcgcacccctctccaaccgctccaccctacatctagcaccactccaacactctcacacctccacctacctcctacgacctcccacaccacacccaacacctacactactcctcacccttcacccctccccaccaccactcaccctcatacgacaccctcaccacacaagcacctgaacccgcccctcagcaatcatcctctggaccactttccctccctccaccactctcttaacatcataccaccctcaactccaactagagcactaatcaccttcaccacttcccacatctcacacataacaacacatcccattaacactcactcaacacccacaatcatcaccacccctcattgacacacataaccccatcaatcccccgctcgccgacaccaaccgcacctcactcccgctctcccctctcactccctcactaccacgtccgaccacattcaccagtaatccactctaccgaccaccgatcccaccacctacccacgttcgccaacacccagccaacatcgcagcccacaacaaacagaacgggccgagcgagcgaacgcacaggatcacgagcacaaaagaaagcggcagagagccggatgtcacaccgaacaaacaatatcatccagacagcacacggaccaggacgacgtaagcaacaccaccagacaggcgcgacacaaacaacgccgaagagcccaagcacatcataccaccatggactccacacacacatcagcagaaccacagcctctcagcaacgcacgacacacagagaaacacacgtgagatactccatcgagaagcg

SEQ ID NO: 535564 - DNA, 225 bp, Homo sapiens
gggtgatctgaggatccctcataggttcgcaggctgagaggaatggggacggggagtgattgcataatgggtacagagtttctgactgggatgatggaaaatctgggaaatggaaagtgatgatagttgcgcaacattatgaaagtactcagtgccactgaattgtatactcaaaatggttaaaatgataaattttatgctatgtatattcctgcgaacctatga

SEQ ID NO: 535565 - DNA, 420 bp, Homo sapiens
cccagggccttaaccaacgcattgcatgcctcttgtttatgactgtccatcatatgaagccaaacgcccggtggaatacttcctcaatccagttgtaatcttacttccacttattggcacggggagaaatcatgtttatcacaatcaacattttatggtttaaaggaactggcttcaaacttgccaaatcctccttggcacttttcttgaaaaattgctctccctttaaaacacctatgcctgtgttgaccttattcacaaaggtccaaactgaaaaagtttgttgggtgaagaaagttgtccattaaacatcttaaatttttgtactcacacaacagcacttactaagttttctacccagataccttattatctcccaattaccaaagagcttgatgtatttgggtctttggcccctcc

SEQ ID NO: 535566 - DNA, 172 bp, Homo sapiens
tgtctgaggtgatctagaggatcccgactgcatcaacgccgccagtgtgcgtcacatgcccggctaattttggaattttttgtagagacacggtttcaccttgttgcccaggctggtcttgaagtcctgggctcaagcagtcttcccaccttcagcctcccaataagtgttg

SEQ ID NO: 535567 - DNA, 228 bp, Homo sapiens
  misc_feature (6)..(6): n is a, c, g, or t
  misc_feature (23)..(23): n is a, c, g, or t
  misc_feature (27)..(27): n is a, c, g, or t
  misc_feature (66)..(66): n is a, c, g, or t
  misc_feature (102)..(102): n is a, c, g, or t
  misc_feature (208)..(208): n is a, c, g, or t
  misc_feature (222)..(222): n is a, c, g, or t
aactgnaagcagttattgttgtntagnctcttgcctctatgtatgccaaaacttttgtaaaagganccataaacacacaactactctgtacacaatgcaacnccctagctttcctgctccccagagctgtgcatgaaggagaatactgctttaaaatgcaatacttctgtgacactgtgcatctaataccataaattccaaaatatgncactctattgtccncatggc

SEQ ID NO: 535568 - DNA, 145 bp, Homo sapiens
ttatatgtaagcatttagaagatctggtgctgctattctgctggaggaatgaatagatggctggtttcaggttaagctattagtaataaaagtgaacattgctactatctgaagctacatacataaacttgtgtgattcaataac

SEQ ID NO: 535569 - DNA, 208 bp, Homo sapiens
tgtcgcgggctggaattatgggttctccgaagagggcaatctgaccccggacaagctccatgagcggggcattggcagttatctgctcagcgaatcctgtcggcagaagggcagtgagaaggctcgtggtgtcatgcagccgtgggacgccgtccgtactgatctgagtaacctggctaagctcaccggcaatgaaccgaccgggaag

SEQ ID NO: 535570 - DNA, 185 bp, Homo sapiens
ccaagactataagcatgcctcccagaaagactactccagtggttttggcggcccgtatggagtgtaggccgaccgagtagacaagagcgcggtgggcttcgactaccaggcaacacggagaatcacgagtcacagagagattactccaaaggtttcggcggcaaatacggtatcgcattcggtct

SEQ ID NO: 535571 - DNA, 367 bp, Homo sapiens
caagggcagtttctgtttagttattttttctctaagtatcgtgtattatcctggttcttcatatgccttgtgatttttttgttgaaaactggatatttgaatcttaataatgtggttacattggaaatcagattctctcaataccccagagattggtggcttttgttatttttgcttgttgattctggttctgattgttacaggctttctatatgccaaagatcagcctcagcctaaggtataaacttaaagtcttctcagatcctttctgagcctgtacctttttctgggcatccattgtcactttctaactctccatgtgtatgcagttgtttttgaatatgctggtctttaatgtctggctccc

SEQ ID NO: 535572 - DNA, 469 bp, Homo sapiens
ctcattttccagttttggcgccagtggtttctaggttctgagtgaagtgaaacagaatctctcagggcatgtggtacagataatcccctactatgtactgcgtagagttcacagagcagaggcgagagcatgaagataaaccagtacactccgtcgttcacataccactaactaccatgatactcccctttgcttcctggtgaggtcagttactcaatcaatccactgatgtcgctttttaatttccatcacatcctttaactgtcttcatatcaggtcattgcaagcagtcaccataaaaggccatccattttctacattttgaacaatagttagagacaactaatatcttctccatcattacagtcttgctactgtctcatgcagttccccaacatagatatattatctgcctgcagacgtcatgggccaatgtcacactttacttggttaggctaattatatttct

SEQ ID NO: 535573 - DNA, 230 bp, Homo sapiens
  misc_feature (105)..(105): n is a, c, g, or t
  misc_feature (123)..(123): n is a, c, g, or t
  misc_feature (207)..(207): n is a, c, g, or t
gccaacccgatgaggatccaagcgttgtccggaggaatacaggtgctggtcacatatttttatcactgatcatatataccttgtcttatgtgtgtttctgcttgngacactttatttaatatntacgttgattcattaactctgactctctaggcaacagattataactctgccttacaagcttatctaacacacacatttcctctnaggacatccagcctcttgcactt

SEQ ID NO: 535574 - DNA, 487 bp, Homo sapiens
ctccctcttcgttcacaaagtggatccccgggaaggatgcccactccaccctgctgtccaggaaggaaaccagcaacctctataagatccagtttcacagatgtaaagcctgaatacgctggatgcctacaacatgcctcacggaggctgtgctgcccaagcttcatcctggtatgaggacatacccagtgctcactcgtgggcaattggaacacgtggtatggggagcaggaccaggcagtgcaccttgtggcgattctcaggtggctactccagccctcatggactgcagtgaacaagctctaaaaacaataatggagtaccttggagttccgaagggagcggagccagaatgctgcttgatccaggagtaagaccatgctgcgtccttgaggttcagcttctggaagtgagccacatgcccagtaatgggtcccaacatcgtatgagctgaggacatacaagctcaggccaggaaccatgatcg

SEQ ID NO: 535575 - DNA, 746 bp, Homo sapiens
atgttcttttccgatacaaaaaaggctagcttggtttaagcacacaagacacctttaaattgttgtcttgtggggggaaagggcgcaatactgtcacctacaatagaaatggtctcccgaaggctggacttgaattgtcggaagaacacgaccgtttcccgtttctaagtctttgagtgacttccgtcctttggctcccaggcaggagggatttccatgacgtatggacacacactaggccacccgttggcgacaaaagccttgatcggtatagataacgacatttggtttactgtcctcttctcccgtttgccatcgttcagcattagacgtgaactcccttaaggcccgagacatttcggtgagacctgacccctagtcatgtggttaccagtgtgtcaggcaatctgaactttcgcagtgatgccagcgtgagatggcacctgtcaaaagagcagtggttccattatcttagattgttggatcttcacgagaaaattcggccattattcatttcacttcccatgaaagtcagggtcggcttgtgaaaagttgttaaacaacatgctaaatgtgaaatcgtcaaccctcactgctaaactttccctgattcagagcatcagatgaagacttcattgggttgtatagtggctttctgatttttggtagtccatgaagaagggagttcgaaaagcttgcttgtatagctgttaaccgacttgttctgtaccatggtcctgcctgca

SEQ ID NO: 535576 - DNA, 323 bp, Homo sapiens
ttgtggattagaaatatcctgaggatctcaacgcctaaacgaatttgattttcagtgttttgatctgctgatcgagtccgattcacccctaaggtcataatcggctgaggacgagatttagctttgagctgctcgatattggcttgttgacgttgcgtttctaattgcaaactacgctcaaacaaattctcaatgttttgttcatcagtcttcacagctgtggctcttgcccaaagctcattgacagttggtgcaatcataaattgattcgcatcactgccccagaaactggctaattgtttctgtgcgactggggatcctct

SEQ ID NO: 535577 - DNA, 160 bp, Homo sapiens
ccaaaacctggtcgcttttgtcctggtttgggttttttttgaaaggccgaatttcccccttagtttttgccgatttttagggacgtaaatttttttggttgcctttccccaagtttggagatccggtttttttcggggatagatgcccccaaaacctcca

SEQ ID NO: 535578 - DNA, 473 bp, Homo sapiens
  misc_feature (48)..(48): n is a, c, g, or t
  misc_feature (184)..(184): n is a, c, g, or t
  misc_feature (427)..(427): n is a, c, g, or t
ggacccccccttttttcccccccttccccgggggccgctttttcgccnacaccaaggggccgggtagggttttttcccgggggtttccctcttcccccccctttcgcttatggggttttttttgcccccaaatacccgggccttccaaaatttttttaaaaccccccccctttacacaaatggnggtggggggccccgccggccctccttttaaacaggcccttttttggaccccccaattcccctgggggccccccccccttttttttcctcccttgggaccccccggcccccccccccctccggtttttttccttgggcgggggggggtttattttttccccggggaacccctttgcccctttccccttttccaaagtttttttttgggccccttttggagggccccccccaggtcccggcccgnattctccgggcccccccccccccccggggtttttgttcccttttta

SEQ ID NO: 535579 - DNA, 416 bp, Homo sapiens
tggacttgtttggcttacctcatcactttgccaccatgtttcgggtgtgtgagcagggaagggaactttcctgccttatttaaacctgcggccggaggattcgtaggaatctagcttgatcacgagactctgagtgccaagaaacgcatcatacttacttggccatgcttcttgaccgagttttttatatcttgttgcagtttaattcagcgccctcgatgtccgttgtgggcggatatccacgggacttagcctcgtcacaggtgctgctggtcccccaggggaacacacagaagaacttagggcggggaagtggacttaaagcctgacggtgcccgagaagcgctttgtccttctggggatcatagttcttcaagctgatctgcaactccaccgtctccaggaacttgcgggca

SEQ ID NO: 535580 - DNA, 408 bp, Homo sapiens
ggcacgagctctctctctctctctctctctctctctctctctctctctctctctctctctctctctctcactctctctatatcgagctctatcacactctatcgatcgcggcgggacacggaacccaatgcgagaaaaagagagaaacataacaaaacagtgaccaacaacatacaacgataggcactaggaaaaccatagcggagaccaactgaagagcgctcgaagcacaacacgcacacaccagcaggcgagaagcagaagaggagcgcaaagatagcccgaaaaaacgcgtgagaaggctgtatgatcagaggcaaattgaacgcgtatacacaaagcgaaaagccctatatagcagaagaatagacacagatatagccggccagaacagaggaacacgagacc

SEQ ID NO: 535581 - DNA, 984 bp, Homo sapiens
  misc_feature (726)..(726): n is a, c, g, or t
  misc_feature (984)..(984): n is a, c, g, or t
cacgcgtcgggacttatgtgctagagaggtctcctgaaggcagcagatggttggtgatcgcatgtggatcaaggactggaacatagcccctttgtggccatggtggaaaggacctcagaccatcatcctgaccacccccaaggctgtaaaggtagaaggaatcccatcctgggtccaccacagccatgtgaatcctgcagccgctgaaacctgggaggcaaaacagagcctggacaacccctgcaaagtgactctgaggaggatgacaagccctgctccagtcacacctggaagctgactggtctacgcacagccaaaacatgaggaggatcattgtgggactcactttccttataatttggacttgtatagtaaaaacttccactgattttcctcacatgtaggactgctctcagtgtatacatcaggttaccgaggtagcacaagttacaacaatctttctgttctatagttactatgaatgcccaggaaatttaaaacggaatatgtttatataacgacactcagtataaggtatgtagcccaggaaatgactggccagatgtgtgttatgacccctttgagcctcccatgtccacagtttttgaaataaaattaaggactgaagactggtggggactcataaatgatacaagtaagtattagccagaacagaacgaaaaagggtgcccaggatgcgccatctggaaatttggattcctgggngcggtccttcaatagccatagactgaggaacggggatatagccccttgtggcgcaaagggtctgtgggccaataagttacttgtctgaatcgacgcgtggaagaagtggtacggcggcctgggcggactgatatcaagagactgcccttcaaggaagggctctttagggaggacctatgtaaaccctgcggagggggctaaacggcgaacaatggagacccgacataaaacaatttccctgtggccccatctctgggn

SEQ ID NO: 535582 - DNA, 334 bp, Homo sapiens
tccccatgcgaatacgttgcatggtccatggatcataccattttcgatctgtccaatcatgtcacagactttctgttctggataattcagattctcatcgaattctcctctcacaatatgaacatcaccagccagattcttgatcatagtcataaccctttccctgtgctaaagtttcctgtgcagagaatgtgctgaatttttcctggcaccaggagttttttgaatttagctggcaaactgttgcaccggtgtgggatgtgcagatctcctaataccaacaccaacatcctgtcaccgggctccgctcagtcaccaccaccgtcgccgccct

SEQ ID NO: 535583 - DNA, 410 bp, Homo sapiens
tgtacatatttcatatgtacataactcagaagctcggcttctgtgtcgtatgatgtttctgcaattctgctgaccctgacgcaggttgttagcatgatgaccgataaattatagcgtttatataggccatcgcgcatgttgacctaaggtgaaacctagattgttgcacattataagatcacttgctactattgaatgactcatctcttatggtttgtccttatagtgatgatgagccgagtgtcctttgcgtctaatgagtgtaaacctttcatatagatgaatgatgatcaggtgcaataattcctcaaagcttagtggaactagcacactgttctggctaacatgtacccgacatttaggctatgttttgcgaactggattatgacttcacttccctgatggtttgc

SEQ ID NO: 535584 - DNA, 710 bp, Homo sapiens
  misc_feature (136)..(136): n is a, c, g, or t
  misc_feature (164)..(164): n is a, c, g, or t
  misc_feature (238)..(238): n is a, c, g, or t
gcggcccaggccgagcatgtcgcgcagccagtcggtggtgacttcctctatttcggtgagagccggactggattgccaggacaacccaatcacacccaggccggtgctcaggcaatcgcccagcactgaggacagntccacattggaagggaagaaccgaaganactgggatgctgccaatgcagcaagccgggcatgatcagtttttcgacgtcgcccatgatctgttcgaacggtncggccgtgtcaggcgggctggccggtagggcagctttgatctcgccaggtcgggtggtgggctgcacgccgcgttgttcgatgttctgtcggtagtctgcaatcaggtcgatcatggcatagccatgttggcggaattcttcgggggtcatagataaacgtcgatgtgcacgagcaataaaagtattagacaccagaagtaaaacggttcgccgggggtatagccgataaacgactgcatgctgatcgcgttttcccgaatcgaacccgcagatggcgtgtgggcggcgggtattgatgagcaccagttcgttcttgcgtgggcggatgcgcagcggttttcgtaaacacggttcggtcagttgggcaccctcgaggcgcttgacctcgtcatagctaaaggcgggggtatcccagatgatcaactcgccccccgaaggcggtgttcgcaggtagatattggcgctgaattg

SEQ ID NO: 535585 - DNA, 320 bp, Homo sapiens
tctataggatccccatgcattcggggtagtttgatgaatgagctgtgatgagcgtattattaccatagactcgcctagttttgagagagctactgcgtgcaagctactattgaccctgtcgatgggggcttcgacgtggtctttagggagtcataagtggagtccgtaaagaggtatctttactataatagctattgtgtacgctagtcatattacgttgttgcgcatcaggagtttgatagttcttggccacgtgagagtgagtagtacaatgttctcaggtgagcctaagctgtcgtgattgtaccgacccttgcgag

SEQ ID NO: 535586 - DNA, 935 bp, Homo sapiens
  misc_feature (935)..(935): n is a, c, g, or t
gggccgggcgcggtggctcacgcctgtaatcccagcacttcgggaagctgaggagggcagatcacaaggtcaggagatcgagaccatgcccggtgattttgtattttagtagaggggtttcaccataatggtcaggctggtcttgaactcctgaactcgagtgatccaccagccttggctcccaaaatgctgggattacaggcatgagccaccatgcccagctaattttgtatttttagtagagacagggtttcaccagcctgccaacactggtctctgtgaaactccgtctctgctagaaaatacaaaaattagctggacgtgtggcgggcatctgtaatgccggctacttgggaggctgaggcaggggaatcacttgagcccggggggcagagtgttgcagtgagctgaggtcgcgccagtacactccagcctgggtaacaggagctagactccatctcaaaaaaaaaaaacaaaaaaatctccttttaccccaagttggttcttccttaaatctcgggtcaccaacaccaacttttgggggtgttcaacaagtcttcctaattcctgtggggctttttaaaacgtggctacttaaaaacttcagtttttttcaaaatattaatgggttatttggaaactttttccttatatataagccctttcttgagaaccgtcgagtggatcttacggttatggtttcacccagacttttggtgaaaccctaggggtggcatctttgcgtggccttcagatttgactaagtctgtgcaccggcccaattggttgtgcctttataggaacccttggacgaacgccccgctttgtgttcgtacacaagtggggtttgtcgtgtttgttggcccggatttttatactaggggtgattcgtcacactcgcgtgcgtaatgagagcgcaaagaataagatcgcgn

SEQ ID NO: 535587 - DNA, 218 bp, Homo sapiens
tgacatgagattgatgacatacagcccacttctctggaacaggaaagcatgatcggggagggaacacaggtcagtgtggggacaggggtcacggtggacaaggagggtaggctagtctctccacctcctcacataatgctaacaggaacgcagacacatatcagatgccctaatgcaagaaagatgatgcccgaggatctagaagatcacaaaggaga

SEQ ID NO: 535588 - DNA, 827 bp, Homo sapiens
gagggcctgaatagaaaaaaaaaaaaggttaaggaaggcagaattcaggccttccggcctgatggcttgaactaaaatattaatcttctggttcccttagcttcccgggttctggggccttcagattggaactggaattacaccatgggtttcctggcgtcttcagaaaatgggcatgaggaaaaaccatctgggcttttctggctggtaattattcttctggggataactctcagaataattttggttctggatttggtcaaggttgggcaattatgaataaagctgctggtaaacattcatgagcaggcttttggtggtgggacataagtggtcgactcattgggataaagaccaagaagtgggattacgggattatatgtactatgccaatcagagtggtcaaataccagggttttatacagaaaaacctaagacaattaaactacgtatggattggcttactttacctccttgaaaatgactggactgggtgatggttctccaatagattcaaagatgcagataatggtccccaagaggtcacattctaatcaaatgctgtgaatggtattattggcaagaagcttggatctcataagggaccagctaagaaaaaggtggtcttaggacgcaattctttaacgggggggtttcatggttgtgattagttggaaatccgggatactaggtcattggataggtaaataatcgggtaaatagggaaaggaaactttctgccatgggggtcaagacggaaagtcaatgtgttacggggtagaatgcatagaagatgtatgacaatggtgaagaaacaatagaggagc

SEQ ID NO: 535589 - DNA, 886 bp, Homo sapiens
  misc_feature (11)..(11): n is a, c, g, or t
  misc_feature (69)..(69): n is a, c, g, or t
  misc_feature (71)..(73): n is a, c, g, or t
  misc_feature (78)..(79): n is a, c, g, or t
  misc_feature (98)..(98): n is a, c, g, or t
  misc_feature (121)..(121): n is a, c, g, or t
  misc_feature (123)..(123): n is a, c, g, or t
  misc_feature (135)..(135): n is a, c, g, or t
  misc_feature (155)..(155): n is a, c, g, or t
  misc_feature (171)..(171): n is a, c, g, or t
  misc_feature (183)..(183): n is a, c, g, or t
  misc_feature (201)..(201): n is a, c, g, or t
  misc_feature (220)..(221): n is a, c, g, or t
  misc_feature (225)..(225): n is a, c, g, or t
  misc_feature (228)..(228): n is a, c, g, or t
  misc_feature (233)..(233): n is a, c, g, or t
  misc_feature (243)..(243): n is a, c, g, or t
  misc_feature (261)..(261): n is a, c, g, or t
  misc_feature (309)..(309): n is a, c, g, or t
  misc_feature (342)..(342): n is a, c, g, or t
  misc_feature (438)..(438): n is a, c, g, or t
  misc_feature (444)..(444): n is a, c, g, or t
  misc_feature (491)..(491): n is a, c, g, or t
  misc_feature (559)..(559): n is a, c, g, or t
  misc_feature (598)..(598): n is a, c, g, or t
  misc_feature (616)..(616): n is a, c, g, or t
  misc_feature (620)..(621): n is a, c, g, or t
  misc_feature (632)..(632): n is a, c, g, or t
  misc_feature (739)..(740): n is a, c, g, or t
  misc_feature (768)..(768): n is a, c, g, or t
  misc_feature (874)..(874): n is a, c, g, or t
ggtagaaaggncatgcttgaggacaacagaagttcactaaggatgcacgattgatctgagaagtttttnannntcgtnntcgccctcctcctcctcgntctccccttgttcgtcggccgtngngtcctggtactnctggtactcggtcaccaggncgttcatgttgctctnggcctcggtgtnctccatctcgtccatgcnctcgcccgtgtaccagtgnngggnggncttgngccggaacanggccgtgaactgctcggngatgcgcttgggcggctcctgggtggccgtgctgttgccggtgtgggnggccggcatcttcggggcgcggggtggggtgtngcgcccggccgtcttcacgttgattgggggtccactcctcggtgtagctgctgttcttgttctgcgcgttgagcttcttttcgttcaccttcttcntggtcntgcggccccggttgttggctgcttttgttttgttgctgccgtggtgngggttgcgggcggccatcatgttcttggagtcgaacatctgctgggtgagctcgggcacgtgagcacncggtactgctggctgccccggctggtaaggggcgcgaancggggcatgaagaagtgnaggnnaagcccgggcnccatgttcaccgccagcttgcgcaggtctgcgttcagctggcccgggaagcgcggcaggtggtgacccgctcatggtggccgacacaggtggttgaggtcccgtagnngggggtggtcagcttcagggtgcggaanagatgtcatacagggcctcgttatcaatggagtaggttcatctgtgttttccaccagctggtggaccgggagggtggcgttgtagggctccacaccgtgtctgacncttgggtgaggg

SEQ ID NO: 535590 - DNA, 162 bp, Homo sapiens
cgtctttcctggtatcccaccctcaaccgccacagttattaaccacagtcagcatctaaaaatacaaacatttttagtctctactaaaaaagcacaaaaagttagctgggtgtggtggcgctcgcctgtagtcccagctacttggggtggggataccagggg

SEQ ID NO: 535591 - DNA, 879 bp, Homo sapiens
  misc_feature (8)..(8): n is a, c, g, or t
  misc_feature (137)..(137): n is a, c, g, or t
  misc_feature (156)..(156): n is a, c, g, or t
  misc_feature (173)..(173): n is a, c, g, or t
  misc_feature (177)..(177): n is a, c, g, or t
  misc_feature (395)..(395): n is a, c, g, or t
  misc_feature (488)..(488): n is a, c, g, or t
  misc_feature (544)..(544): n is a, c, g, or t
  misc_feature (822)..(822): n is a, c, g, or t
  misc_feature (849)..(849): n is a, c, g, or t
acagatgngatgcgcattgccaaagaggagattttttggaccagtgcagcaaatcatgaagtttaaatctttagatgacgtgatcaaaagagcaaacaatactttctatggcttatcagcaggagtgtttaccaaanacattgataaagccataanaatctcctttgatctgnaggnaggaacagtgtgggtgaattgctatggcgtggtaagtgcccagtgccccttggtggactcaagatgtctggaaatggaagagaactgggagagtacggtttccatggaatatacagaggtcaaaaacagtcacagtgaaatctctcagaagaacatcataaaggaaaatacaagagtggagagaagctcttcaatagctaagcatctccttacagtcnctaatatagtagattttaaagacaaaatttttcttttcttgatttttttaaacataagctaaatcatattagtattaatactacccatagaanacttgacatgtagcttcttctgaaagaattatttgccttctgaaatgtgacccccnagtcctatcctaaataaaaaaagacaaattcggatgtatgatctctctagctttgtcatagttatgtgattttcctttgtagctacttttgcaggataataattttatagaaaaggaacagttgcatttagcttctttcccttagtgactcttgaagtacttaacatacacgttaactgcagagtaaattgctctgttcccagtagttataaagtccttggactgttttgaaaagtttcctaggatgtcatgtctgcttgtcaaaagaaatattcccngtaatatttagctgtaaactgaatatnaagctttattaaaaccaccttgccatgtga

SEQ ID NO: 535592 - DNA, 256 bp, Homo sapiens
tcgtgcctagctgttatctgctatcgcactgaatgtctgtgtcatcccaaaagtcccactctccaaattgcaccacgcccagccggctagaatattatccacataagtcatcagcgacgcgaacactcaaggagtactatcatgcagatctccatgtattactaataagcataacagtcatcggtagacagacgcacggctttctctgcatatcaacttgactacatactagcaaatactatatagtttccctggt

SEQ ID NO: 535593 - DNA, 285 bp, Homo sapiens
aggtgactagaggaccccactaaccctaatcgcctacctctccaaacggcttgaagccacagttctcagatggtctgcctgcctccaagcactggaggcagctgctgtcttcatccttgaaagcctaaaactatctctccatgccaacctaacagtttattcaacccataatatcaaagacatgctagctcaccacagtgtactaagtctcatctctgccccacggctcctccaactgtatgctctgttcatagaaaccccccaaatcacgcgattagggttagt

SEQ ID NO: 535594 - DNA, 390 bp, Homo sapiens
  misc_feature (9)..(9): n is a, c, g, or t
  misc_feature (33)..(33): n is a, c, g, or t
  misc_feature (44)..(44): n is a, c, g, or t
  misc_feature (60)..(60): n is a, c, g, or t
  misc_feature (69)..(69): n is a, c, g, or t
  misc_feature (144)..(144): n is a, c, g, or t
  misc_feature (187)..(187): n is a, c, g, or t
tgtgcaaanactaccaccagtgtgaatgtgtanaaaaaggcgantgcccccaagcctacnagtaccccnacctaagctgctgagcatggacccgccttgctgccactgttgttggcatatgcgaacaagcatagatcctgctanaactgccccaaagaagcacttttgctggcatcacccattggantattgttgctagtggtcctaacctccagcagccagaggacaaagccaggggcccgataccagccccctagagttatagcatgcagcccagaagtgctgagctgatccttggtctcctaaaatcttccagaaatgaagacagtcaacttaacccaccttatataacaatcaaaaccgcaagggcatcaaagaagataaaagcaa

SEQ ID NO: 535595 - DNA, 100 bp, Homo sapiens
ggcaggatatgaatagatattacataaccagatatgtatgtatatcacatataaatatacacacccacgcagactttagaaaccaaaaatttactagtgg

SEQ ID NO: 535596 - DNA, 456 bp, Homo sapiens
tttcaaccaatcgcacattaaagaatttctaggctaggtgtggtggttcatgtctgtaatcccagcactttgggaggccaaggcaggaggatcatttaatctcaggagtttgagaccagcctgggcaacaacgacaccttgcctctattaaaaaaacaaacaaacaaacaaacaaaactcctataacctgtaagtcccaagatattttgactttttgggccaaaccagtgtataacccccatgtgtttttttctttttcttttctctttcattttttgagatagggtcttgctctgttgcccaggctggagtgcagtgatgtgatcatggcttactgcagtctctaccttctgggctcaagcaatcctcctgcctcagcctcttgagcacctggaactatagatgcatgtcaccacacctgactatttttgaattttttgtagaggcaggtcttac

SEQ ID NO: 535597 - DNA, 387 bp, Homo sapiens
gataaatgaatggggaagtgtaaaggaaaggaaggagataacagaacttagaatataataggtctaaagattaaacaaagtaagggacacagtcataagagctcggctttagcacagaatgaatgtttaaagacacacacaggtgtctctgggacaaccaagaaaagtgcaacaggcagatggacttgaggagctctggctaaagataaggatctaggaactgctgaattaaaattacccaagcgtgagaagtggcgtcgtgattacgagagccaaaacaaaactggcggtctgaggcataccatctacggaataactgaacaggcccaaaggtggggggtggtccaggagtgaccaacatgtaccaagtcacgggactacatcttc

SEQ ID NO: 535598 - DNA, 550 bp, Homo sapiens
gatttttctttaatcgtgggttggtttgggaagttattttatgtgtgtgtatactttttcatttagatggtaaatgcttctctatcttctccttcatgtacttcttttcccggttctaaactgaattttattttattttttggagatagagtctcactctgtggcccaggctggagtgcagtagcacaatctcacctcactgcaatctctgcctcccgggttcaagtgtttctcctgccccaacctcctgaatggctgggactacaggtgcatgccaccacatctggccaatttcctgtatttttagtagagacagggtttcactatgtgggccaggctggtctcgaactcctgacctcagatgatctgcctgccttggcctcccacggtgctgggattacaggtgtgagccaccatgcccggccaattcaggtgacttctgaattctcattctgattctggtacgttacatgggaatgctaatctacctaaatttagcccaaaagaaaagaaaatgcccctccaaaaagagctgtaataacgatcgaga

SEQ ID NO: 535599 - DNA, 169 bp, Homo sapiens
tggacctctaggggcggggccttcccgtttcctgtctgagtctcagcttttcctccaggcagcctgaggaaactcaaaggcacagttcccagatactccgagagaacctccatactctggcaacagtttaccataccaagcacggcatcacgggctgtggacgggcgat

SEQ ID NO: 535600 - DNA, 572 bp, Homo sapiens
  misc_feature (50)..(50): n is a, c, g, or t
  misc_feature (93)..(93): n is a, c, g, or t
  misc_feature (417)..(417): n is a, c, g, or t
atgtagaggatcccccgagcccagagactggagtgcagtggtgccacctnagctcactgcagcctcaacctcctagtttcaagcgatcttccngccttagccccccaagtagctgagactataggtgcatgccaccactcccggctgatttttgtattttcagtagaaatgatttctccatgttacccatgctggtctcgaactcccgcgctcaagggatccacctgcctcggcctcccgaagtgctaggattacaggcatgagccaccacacctgactatactccttgattttaaatatgtttgcattctctcttcttaattcccaatgccatcttctcattaatggtgttacattttataacatttatatgaaaaatccggaatatattgccatattcatcaacatctacatggnttatttcagaacatgagtaatttaaaatcactgtgacatcagcagtctttaaaatacaccatatgtcttggtatgatttatgtataggatagaaagttttacatctgcagctgcaggctagcactagatactattaatctttctggaggcatata

SEQ ID NO: 535601 - DNA, 342 bp, Homo sapiens
  misc_feature (43)..(43): n is a, c, g, or t
  misc_feature (45)..(47): n is a, c, g, or t
  misc_feature (135)..(135): n is a, c, g, or t
  misc_feature (152)..(152): n is a, c, g, or t
  misc_feature (159)..(159): n is a, c, g, or t
gtggagcgggggatagaataagagaaaaaaaggaaaagggggngnnnttgcttattagccacaagacccaatgtgggactcagacccacaacctgctcctaaaaaatgaaaacatctgattcctccaccatagtnaggggggggctacacanaaaaacntacaaaagaacatctccagaggaactgctgaatgaccacgccctgagagaacagaatcaacccccaccaaatggaggaggaggaattcctacaaataacgactgaaagacctaaaaagtattaaaaagctggggggggcaacctttggcaatgaaaataaagattgagaagctgaaaaaaaca

SEQ ID NO: 535602 - DNA, 733 bp, Homo sapiens
  misc_feature (578)..(578): n is a, c, g, or t
tctttctcacagatgtactgtggggtttttgctatttgaagctcattttgaattgtccctcaactagtttatgcattaagagagagcaggaacagatgacaaaagcttttatgggtgaagacactagtttgaggggcaagttattatcttaccacacacttctccatctgtcttttcagattcatgtgcctgttaatggtagaccatttcttagaatgaaattgctacaagaattaggaaataaacatgtaggcctttaatagaaattaagagcaatcagtctatcctttctattgataagcctgcttaaaaaaataaagcctagctttttaaaaaacttagagttctaaataatcacaatactatgctcctaaatttctaataaactattattttgaattaagaaaaataagttcaggcatgagccaccacacctgactatactccttgattttaaatatgtttgcattctctcttcttaattcccaatgccatcttctcattaatggtgttacattttataacatttatatgaaaaatccggaatatattgccatattcatcaacatctacatggnttatttcagaacatgagtaatttaaaatcactgtgacatcagcagtctttaaaatacaccatatgtcttggtatgatttatgtataggatagaaagttttacatctgcagctgcaggctagcactagatactattaatctttctggaggcatata

SEQ ID NO: 535603 - DNA, 179 bp, Homo sapiens
gagcggtctgagtaaaggacttttattcttcatgattgtgtagagagttccctgcactgttaacctccaagcatttttgaagcacataaaagaccatatggatttccagtgtaaaggcactctgacttgggtgtttatattgctttgccagaccgctcgtaccgagaccgctcttaccg

SEQ ID NO: 535604 - DNA, 122 bp, Homo sapiens
cctgcatatggaaggcaaggagttgtgtaaggcagcggacactgtcggacatcctctggagttgaagagacgagaagatgaaccacgtgacgaaataggtgccttggccttgccatatgcaa

SEQ ID NO: 535605 - DNA, 835 bp, Homo sapiens
tggggaaacgccaccgcgggggaaaacggggtctattacccagggtcaaccccacggggttcttcgaattggccgcaaggggaacccctggggccgggtccccttggagcggttggcaaacagggtcccaaagacgagcgaaaaaatttcgggtgctcgtggagccacgggagagaaagggatggggttataggggtcccgtgctttcacagaaattttcccgggctttagtggtgtcgggggtgggtgacttcacaacgccatatgtggccacgtgggtggcaagctccatctagtggggagacacttgtgagagaatgagaactctcatcctaaagcatacgggtccgggacattctgggtgcccagggcaaatggctgggacccaaccacaatgtggttccccaagttttcacatcctggcactggccaaaaactggatgggtgttgggatcgggaaagcttgttcggtggtcgtgggcaacagtggaaacagaagggcatgatattggggggagcgcatggaagcgcttgggttccaggaatgggcacaaccagaaaaaaatcaccatggcttgcggggggacaactcgataataatttggactggtgttttactcttaaaccacaaattatattcctttggtgcccaggtgagccccctccacccatgtggccgaagatatcctaaaactgtggcccagtagaatgccttgctgcaaggtgcctggtccccccatgctactgatggaaatcattttgtcttgaatatatattcccaaaaaaaaaacgggttcttggtggaaaagtaaaaggctgcttgtcggaccttgta

SEQ ID NO: 535606 - DNA, 328 bp, Homo sapiens
taatgattacaatcagctcggtaccctcgataaggcaaatcccatgtcatcatgactcttcaggactcctccttcgttctcatctttcttctcctctgctgcagcagagcgcagaaccagcagcaggggctgtaaagtcctggtgtgcagcatagtacggctacagccccaccagcatgtacactggcaagcttgccaataccctgtgtgaagttgttttccagtgaattttccattcagctcactgataaccttgttgagccggtcgtcgtccgcctcgatacccacgctgtccaagatcttcttgatgtccttggcccttatcgag

SEQ ID NO: 535607 - DNA, 549 bp, Homo sapiens
ggttggcgtggagtggctgtggcgtggcggggtctcgtggcgctggctgctgcacccggagctgtggacggagacgtgcctccctctggcctcagtttcctcatgtgtagtacgcggaggcatggcccggatcgggcccccgagatcgccccgtgcaacctcaccgccagccttgggtggcctcagcggactgtggacgggaccaaggggctctggggtagttcgtccctgaccacccgtcctcgtgtgtgacgtgactagaacccatctcttgttacctcaggatgaccgcaccaagccgcgagtgcccggagatttgtacggatccgtaggttggcaacatgtggtgagacacgcggctcgcggggatcacctcgccttatgcgtacagttcttgacgacggcaagggcttcagagggagctcgcagtttgcactgatgtgaagtcatgatacgtaaggataggtctgagcgcaatgcaacgtggtcggatggtaccagagcgcttgcgagcactttttgtcggttttggatcggtcgcttggtgga

SEQ ID NO: 535608 - DNA, 313 bp, Homo sapiens
caacgtgattctcattcctcagcctcacgagtagctggtattataggcgtgcaccaccatgtcccagctgaattattgtactttcagtatagacgggttttcatcatcttgaccaggctggtatcgaactcctgacctcccaaagatgttgggattacaggcatgagccaccactcccaactccatgtgacattctagataagataaagcttacattaccatttaatgtataaacagtattcatcaagcatactgaggtctgggcagtctgtactaggaaaaccaagaagttgtcattgaccatgggggttgg

SEQ ID NO: 535609 - DNA, 554 bp, Homo sapiens
aagggtctctaccacataggatattgtagaaactaggagccccccatagctagcggaccataggaccccagccctagaagcggccctccccaggcaggctgctacagctagtgctagggagccatggcagccaggcctgcacataaatcagaagtgtgagctgcgccacaagccgcagcgtgaagaagccagctagggcaccggtagggccccctacccctatggaggtcctatcagtatgagctctagcgggctcctcccagacacggcctaaaacctgcagatacactgcaaccgctgggccctgcctggccactggagcgactaggagacccagcctggagctgagaactaccgaacgggcccccactgtcagactgaacaattaggtggcggcaagaggcaagtggacccccaggacagtgcagcttgttctgcacgaccactgcccctggagaagacagcggacggatccaaggttatgtgctacctttggagacccctacaggtcaggctgggggcatcctgccctactgaacacacagagtacagtg

SEQ ID NO: 535610 - DNA, 197 bp, Homo sapiens
cgggatcaagatccctttcgctgctgagtccagcatacctggtgtgaccgctgcacacggaaatgccaccgagcatgattcaatggcatctgacattcgcaacgtcagctgagtgatgcaggcactacgtgtgcaccggctcaacatgtttgccatggaccagggcacagccactctacatctgcaagggaaccacg

SEQ ID NO: 535611 - DNA, 1090 bp, Homo sapiens
caccttcttgactgcgaagagaatcgggcagatccagtggcaggctgctgaggcgctgtgggtgggacacccagttgcgaaactcctcatccaggatttctctctaccatctcttttctttgtacaagtcccatttcctattaccattctctgtcaataaagctcaagatctaccatgatcgtgcacaaacaataaaaagacatgataaacaaatacaacacagacagaagagtacacgagagaatatcaatatacataagaaagatacagataaagaaccaaagaaaccacacacaagttgccgagacgacagatagacatgttggcgacatacatcaagaagttggtagtctgcggccatggtttggtaacgaccgccgtgataagacacacactagaacagaatagccaagatcaatccttcaacacaatcacgacgagtagattagttgaatatagttgaaactccttaagaagtgagcacaccaatggactatagtccaccacactagtcgtaccgcataatgacccttatcgagcaggggacaagtgggacactggtgtaaggacggctttatgacagatcatacacgagatgctaggtcgttagaaaaccacataagtttggtacactattgaggactcgtagtggacatattggcacaactatggaagacatggatcacacgtatagttacattcaaagtccactggtaatcctataatcatgatcagcatgactgactatatacacacgacgagagaagacacagatacgatcataaacatcatctaggccccgggagctaggcaggtgcacgcgggacatagactcctacgagacataacacggacaagactcgcaaccatcccggagtagacgcacaatagactacgtgagcgtcgagaattaccttgaagataagctgggaacatcacagagatacactggaccaacaaacccgagagaaaaatacaagaggaattaaaaagtaaagaaaccgggggatacaacccaaggttgaggacacaggaaaggtcaccggacgccctgaccaacaagaatattgcccgacaccaagccgccac

SEQ ID NO: 535612 - DNA, 1105 bp, Homo sapiens
tgatgggaagaggttccagactgttgcctgcggaaggagtgcaggtgcgatgaaagtgagaagactaaggagagtcgtgaagtcagttgtacgtaatagaacttctgagtcctctgctgaagttggattgtaaagataagagccctgtagaggacacagattgaaaagggctgtggttgtctcaggctgcactcgaacaagaaaatcttcgctagaatgttagcgttatttgggttgtgcccaaggccatgttaccgcgacttgacgtcgttggacaacacatgtgagactgatgacaagtcggctcgatatagtgccatggaaaggcggatatccgaatatctgggggcgcaggggcagcatttacatcttgaaccaacactgtatcactttaattgccggaaggtatccgaagaacaaaagaaaaataacccacttttccgggacaacacgttttgaaatttccccgccaagagaatgattgcctctgggacgctgcatcgttcccggaacgttgcccgattggccttattcacggaacggcgaaacacgttttggcagcgtggacataccgtaagtaggaaacacatgtaaccttggaagttaaacactagacctgaaggcctcctattggcgggagcaaaatttccattgctggtcccataggattagggaggactagaccaatagggattgtagtggggaaaacaattcacagatgtggagaatatagcagcgtgcctttttatccgcggggcattaccaaaagggtggggttaagttgccccacttttgtagaggcgccgaagcgccaataccgccagtcgtgttacgacccactggtgcgtcaagctaaaattttgggggtgcaaggggcaacagttacttagggctgacactgattaagcgaacattctcacggtgaaatgacgctttggcgaccctagtatccggcggacaacacgccgagttcccaaatcgttgagtattcattcaatggaacaggagcgtctaagcatttgcggtgaaagccagcgccatgtttagagaaaatctggtgccgcaagcaaacacgtgtgagctatgggatggacaatcatggtgc

SEQ ID NO: 535613 - DNA, 134 bp, Homo sapiens
caggcccaaggttcagcacagcatgcaacccagtgcagcacacatagcaaacaagctcacatcatggcagttgtgcccctcacgccaggtccttgtgccttgcccatcatgccacagggtccctgcagctacgc

SEQ ID NO: 535614 - DNA, 173 bp, Homo sapiens
  misc_feature (23)..(23): n is a, c, g, or t
  misc_feature (42)..(42): n is a, c, g, or t
ctcttgggctactgcagcgcatngttgtggggtggacccagnaactctgaagtctgaggagacaaatacatgcccaccataacaacatcacacaatacctagagtcaaaacagttatccctattcctacccccaactgagttattcaataaaggcctggcctcgttggcctca

SEQ ID NO: 535615 - DNA, 364 bp, Homo sapiens
  misc_feature (309)..(309): n is a, c, g, or t
ggactgaatattatgtatttatcagtgacagagtcactatagaatggtgtatatcaatataatatatatgatcggaagcagtgccttccataacttatgacaggtttactgtcggttttttttaaataatagcagtatctgctattaaatatcccaacagactactggaagtttgcactctctatggtcgacacttatgggttttagaatacagccgtcagccagatttaattaactaatgttgaagctatgatttagagatcaattatattccttaggggttgctaagaagcgagcactgaccagatnatattgctggttttcctaactgcagtgaattgtgaccaagttataaatcaatgtc

SEQ ID NO: 535616 - DNA, 426 bp, Homo sapiens
  misc_feature (312)..(312): n is a, c, g, or t
  misc_feature (342)..(342): n is a, c, g, or t
aagctccacctcctgggttcacacattctcctgcctcagcctctcgagtagctgggactgcaggcaccggccactgcactccagcctgggcgacagagcgagactccgtctcaaaaaaaagaaaggtaaagcgttcattaatatcaagcagggcagaaattaactgcataaactgaactaatagaacactgaagcaatctttttaacttttggcttaaaatattcctaatccttttatttttcaaagtcaaaaaaagttttaagctatcaacaattaagtatacgcctaggaacaaaactgggagcatattngtttctctctacctaatttcttcagaattnggaaactatttgtgtgtgtgtgtgtgtcaggtgtgtcaaaaatcagtgggtggtagctgcgtggtgttatttcggagagtctcc

SEQ ID NO: 535617 - DNA, 702 bp, Homo sapiens
gaggcatgaggcagccagcggcaggggcttctgctgagggggcgaggcggagctctgaggaagaccgcagataagtttcttctctgtgaaagataagagattaattacaactacttaaaaaatatagtcaagtagggttacgtaatggatactgcttacgcgttgaagtgtttgtaacgtaagttttaataggcttgaagattttgaagagaaagatagtgaagacttagaagagtagcatgaggaaggaaacgatacaaaggtttctaaaacatgacggaggttgagatggaagcttcttcatggagtaaaaaatgtatttacaagagagaatgacgagaaaggactactggagccccgaattaataccaatatgacgggcagtgcttctagatcacaaatgaacggtgacttaaacagcttaaagttgtagtttacaagtgtaggtgattaaaatactttgaaggcgatcttttcagagggactaaaccgaaggtgattagaagaccttgaaatccatgacgcagggagaatggcgtcatttacagtctagttaacgcatttactagagcgcatgacgaaaatggcagattcacttgggagtggtaggatgaaacaattggagcacgatcgacagtttgcacgtggagactggaagaccagaagtacgggaaggcgagaaaagaatagagaagatagggc

SEQ ID NO: 535618 - DNA, 298 bp, Homo sapiens
  misc_feature (296)..(296): n is a, c, g, or t
agagcagcagacaggggaaaatcccaaaagcaatcaccccgaaaagatgtgctttttaagaatgaagactgcagtttatcaggagtcagcttcttgtctcaatctccgggctcacacttcacaaaatgagaattttttcggaagacaaacaaacaacaacaacaaaaaaaacgaagcagaactggaaaaagtggctcaggccaacaacccaagcacaatgagaggccaaggagggaggtttgcttgaggtcaggagaccaagacaagcatggacaagaaagtgagaccctgtcaanac

SEQ ID NO: 535619 - DNA, 129 bp, Homo sapiens
aattcaagcttctaacgatgcccggggacatgccagatacttggggggataaggtgggaggattagtgagctgtgattctgccactgcattccagcatgggtgacagagtgagaccctctctcaaaaaa

SEQ ID NO: 535620 - DNA, 153 bp, Homo sapiens
agtgtacattcctctacagagctgctgttgtcttttctcccttccctccttcttcctgcctcgaatgtggttctaatggcttgatgttccaaaaactactctatgacctattggcaaccttgaggttagaagccacatgccaggtatggaact

SEQ ID NO: 535621 - DNA, 233 bp, Homo sapiens
tcacctgcttgagtctttgcagctggtctgtggacgagctctgtgcttgtcttctcaactatcgtagtcgtctccttttggggctacttgcgcatggtgtcctctagcttcccagcctcaaaagcctggaggactcggggctccaggctctaatatagcctcctctctcgccaacactcagccctcaagggcgctcactcggccccatggtgtgccagtgtgctcccccgtgg

SEQ ID NO: 535622 - DNA, 458 bp, Homo sapiens
  misc_feature (74)..(74): n is a, c, g, or t
agagtacatgtgcaggtttgttacataggtaaacttgtgtcatgggggtttgtagtagagaatatttcatcacncaggtattgagcctagtacccattagttatttttcctgatcatctccttcttcccaccctccatcctctgatacggacccctattttagatatgggaaataggagaggtcaggccctcaaggtaggtgtgatttcaaaggcttgaaggtgtgatttctttttttatttttatttttattttatattatatttttaaaattttattattattaaactttaagttttagggtacatgtgcacaacgtgcaggcttgttacatatgtatacatgtgccatgttggtgtgctgcactcattaactcatcatttagcattaggaaccaacccaaatgtccaacaatgatagactggattaagaaaatgtggcacacatataccatggaa

SEQ ID NO: 535623 - DNA, 336 bp, Homo sapiens
tgacccgtaccgtgcacccctgaacatcatatagggttagtgcatcctgatgtcattccctacatgtgtagtcagcagtcccgtgtgtccactgtgatccttcccaagcactcctgagcctcaatctgcatcaggcccgcgggaggccggtcaagctgtgaccggcaatggggtctcagccagaggcaccagcccagggcagggagaaggccgagaaggccgggagcgcggctgctgccccactgactctactgtctcctcaggatgtggcttctcctcacataacaacagagctttctccaaaatgggaaatttcagttttaataactctcagtt

SEQ ID NO: 535624 - DNA, 100 bp, Homo sapiens
agaagcagtgttctgctccagatctgacatttagaactcagagctgttggtggccacactgtggtgcccttgaaataccatattcttgtatcttctcatg

SEQ ID NO: 535625 - DNA, 985 bp, Homo sapiens
atttctttccttgtaaaaaatcctatcatttgcaataacatggaggaacctggcaagaacattatgtaagtagaaatcaatgccagagacaaagagagtacctagcatgcatgttctcctaggtacctccgatgttcattgcgaataataggattccttctccttgtaaataatagtaatcatgccacaattggctatagcagtccgaccagcaagtagacacttaggtcgttttcgatgagataatccggcagttagtggtgaaacctgcttagcaggtcagacactgggtatgtcactaatgctactactctatacgagatgatacatagagttttcacccttctttcttcctatattgtatgacccacgaaagctggggattctggtgctatcaaatggatggtgtctatcctaaaaggtatgagggagacccgtcctactacattgtgctgccatagaatggcggttactcacacttaaccattcttcagcaaacctaggatcacttatgggctatccacttctgcgtctcaaccattggtcgccgacagtatcgtattatgcatgtgccgtttataataagtaacgaggcttaatcgctagatcgggcgtagtagactggttgagccgtccccctcgcaatatgcagtgctgttagaatttggcattctccactcaccctgaatgtgtgtcgactagcttgagggaaataaagcggcattagccatccgggatccgaatctccgttgccctctccgttggtgtcgagcatatgaaagtcgcctctaataattaagcacggagtgatcacaggggggcgccttgtagatggcctgttggccaccgtgaaggatcccgcatcttgtgaggctacccattctggtgaaaaggcacagaaggccccacggtgcaagcagagcaactgtcctcgagggaggaatgacccacctgggatacgaacccagcgcctcatcctgcgacg

SEQ ID NO: 535626 - DNA, 384 bp, Homo sapiens
cttgagacagtaactttttgaataaaaataaacctacagtaaacagtacaattaggacaatagaatgtggaggaccaccaggtacagtaatagtataagacatcgagcgtggctgaacgacagcatgcagagaatctgcattacagcacaagaagtacgtccattcacaagagctcaggacaacaactatcgacactgcatacttacatgtgtcctctatctgatagatccgctcgcacatctcagctacatctgcacgcactctgactcaacacatacaatacccatgaccatcaaatatgccttccaacaaccccgaactcatcttcagcatcggccgtaactaccaccaacggccttccagcctcccagtcaccgatacca

SEQ ID NO: 535627 - DNA, 328 bp, Homo sapiens
ccacctcccgggttcatgccattctcctgcctcggctcccgagtcgctgggactgcgggcgcccgccgccatgcccggctggttttttgtattttggtggggatgggttttcgccgtgttggccgggatggtctcgatctcctgaccttgtgatccgcctgccttggcctcccaaagtgctgggattaaaggcgtgagccaccacgcccagccagaacttgttcattttatgactgaaagttgatgcctttgtggctaccatctctccatttcccccatccaccagcccctgttccccaccactcaacaataaactggttcctgctat

SEQ ID NO: 535628 - DNA, 964 bp, Homo sapiens
ggcgcgctcccggaaggcgcgcaccgaagagggcggatcgcaggagccggtccgccgccgagaacgggagcctgggtgtgcgtgtggagtccggactcgttggggagacgatcgcgatgaacacggtgctgtctgcgggcgaaaattcacgtgttcgccatttttcgcttgagatagtgaatagagggcgcttaacctttacggttggttcataacacagggctttcaaaaggacaggaagcgtccctgggtggtggatggaaacgtttcggcgggatcaatgctataaaaatgtagaacgatttacagttggaccctaaggaggaaaaggaaggtggatgctgggaatttactccaccattgtggaataattaactggggtgatctaggaagacatataattgggatggggaaattggtgaaggcagggtgttctactttaatttaatcagcgagaatatatttcaaagaagaaaaattaagttgtcttgaaacaaaaggtggttccattagttggggagaaaagacttgggtttgaagaggggtgattaatccagaaaggtggtgggtggacaaggattttgaacgacccagaatataattttctctttgaccggatgggaaatgggtctccaaggggaaagtgaattgtgaattggaccctggttgtggaacggtcggtacccaaaattggtgtaattctaccttctggtggacggggattaggacacgtattttggtccattgtccagatacatattgaattacgaagagtcataacattattctggattgggaacaacgatattttgattattaagtaattgtatctattaactcttacattaaattttaggatagaggggaggaagggaaggagaataattatgggggtagaacaaataaggcggtagggaagataggcctaatttagaaaaacagggcggggattttaaaaaaaata

SEQ ID NO: 535629 - DNA, 174 bp, Homo sapiens
actgtatcctgcaacatcacgcctgaactactcatcctcagagaagacattcctgatttcccctgaacagatatacaaacccttcacagatttttgaaccctgtgttgtctttctcccgtagcatctgatccagtcacagtttcacgtgtgtgtgtgtgtgtgtgcgtgtgtgt

SEQ ID NO: 535630 - DNA, 508 bp, Homo sapiens
gacacagctctgcacgcggctgcctcgaagggttatgcagacattgtccagttgctactggcacaaggtgcgaggacagacttgagaaccaatgagaagaagctggccttggacatggccaccaacgctgcctgtgcatcgctcctgaagaagaagcagcagggaacagatggggctcgaacgttaagcaacgccgaggactacctcgatgacgaagactcagactgattacccccggggccgctttgattgttgcctaaacttcttttgcttttgccattccggagcctgggttgtttgccagaagagtattgataactgttgcttttaaagtctgtatgagcgcgacactgctgcactgtgatctgtgatgagtcgttgtgagggtgggtcattctcacccacgccttgccaataagtgaagagatactttgttgtataaaatacatatatgctcaccagggtaaaataaacgaaaaaaaattatttctatttatcaagctaaaaa

SEQ ID NO: 535631 - DNA, 290 bp, Homo sapiens
ccatgtgctacgatcttgggacgaactgaaccacgagcgtggcttttagggccgtccgaacgctgcaggccggccaggtccctgggggtccaggcctggcctacgcacccctttgtcccttagcgtttaaaggtttttttccgaatttcaggccctcagctacctgcaggttttgtcgcgaaccggctgcaagtttttaacctaagtaaacctcaatccggagggcctaacggtaaggtgggcgctgtgtttatttaggtgcttaacaataaaaaaaggtagtgagttta

SEQ ID NO: 535632 - DNA, 350 bp, Homo sapiens
  misc_feature (102)..(102): n is a, c, g, or t
  misc_feature (202)..(202): n is a, c, g, or t
  misc_feature (239)..(239): n is a, c, g, or t
  misc_feature (308)..(308): n is a, c, g, or t
  misc_feature (318)..(318): n is a, c, g, or t
acgaagaagagggaaagggcttgggaacagaataacaaggctaaggatggagtgacacttctctggatacacgatatattttgtaataattctgactctcanaaccatagtaatttccacatgctgacatggtgtcagaaaataaagaaaacttcaaaaacaaatgggggtttgttgaaagaacacaggagccaacctgaangagcccataacagccaatgctggaacgaatacagcancaaaataaatgatagtactagatcaaaaacaaggagtaaaatattaatgagtccatattgatataaacnatctgataantagatggaggaaaagcgacaactcttcttcgt

SEQ ID NO: 535633 - DNA, 154 bp, Homo sapiens
gtcgactgcatattctggcgactgagaaaggatgaaggtagagagagaagaaggaatggagagaaaaaggaagagcagagaagaggaaagaagagagagaggagggggcaggcagctccttttatagcatacctggctattgccaggtaactgt

SEQ ID NO: 535634 - DNA, 242 bp, Homo sapiens
tgatgtttgtgtctccctaaaatctatttgaaattctaaccccctatgttatggcatgtgatgatattaggaggtgcggtctttgggaggagcatgtaagattcatgggattcatgctcttatcaatacagactccagagagttctcttgtgcctcttttggccatctcaggatacgagtaagatcgcagtctgcaaccatagacggctctcaccagaacccaaccatgctggtaatctgat

SEQ ID NO: 535635 - DNA, 196 bp, Homo sapiens
cggtaaccatcaccctgcagcgcgagttctaattgttcttcaaagtttgcttgccgtttaggatcgtttttaacgtcatctgatttagcttcacgattcataatggctttcgcaccagaattggccgtcatattattattcaagtctttaaagttaatcacacggcccatattcatcactcaagcggccatcatcg

SEQ ID NO: 535636 - DNA, 726 bp, Homo sapiens
cttggcctcccgaagtgccaagagtgcagcctctgcccggacaccaccccgtctgggaagtgaggacgcgtctctgactgggtgcccattgtctggacacgtgagcagcccctctgcctgactgcccagtctggagagtgaggaagtgggctctgtccgtatcgatcactctccattctatggtaagagagagagtacactacttagcaaaccgtcccaatctccagtctatgtaacggtgagaaaaatattataccctgaacgctcatcgtctgatatagtgaagaggaagcacctctgccctggcgagaaaccacatttggaaagtgaggagcaactctgacccaaaactgcaccggcttgagaagtgaagaaagaccacttcccaggctggagaaaacttgcacccgtaactgaacttatgataaaggaagggcacaatactggtccaggcataaaagaacaccgaaaatgcagaagctggaggaagacaccaaacataacaaaacaaacaaacacatagtcatagggggaaaggatgaattaaaaacagataaatcccagaacacaggaataccacaagcaaagttacaagaagaaggagcacgagaggacgaggagatcaaaacacaagccggtacagaaaaataaagacgcacccaaatacaagacgaacgaataaaaatcaacgcacacaatgcaactaccaaacacaccataacagag

SEQ ID NO: 535637 - DNA, 212 bp, Homo sapiens
gcaggatcccgtgagcaaactaatatttacaatcagcagtaaacaggcatcagtatgtgaaagcacattacaggtcagaactcattcaggaacagactttaaaatatcactcaaggggcataacaacatgtgcaacaaataaatataccagtgacattaagcaagtgtgcgcaaacttaagtgaatgtattaatttactgtgatcttggtcg

SEQ ID NO: 535638 - DNA, 962 bp, Homo sapiens
  misc_feature (39)..(39): n is a, c, g, or t
accatttttattttcagggcggagggcggacctgaacanggcccttaattgggttgaggctgatttcccccggggatgcgttccgcctccacactcgtacttaccatccccgggcctgtcggatgcggaccgtttggcacgggacccgtgacctgccagtgatttggtggcccaccccccccacgtagtcgggcccaactgagatggcgggcctccatttctgcccgggggccaatactggactgtttaagatgggggaggaccacttttggagtggccctccggatacctacttcgtctgttccgttgcctttttaaaccccgtctcagtaggcacctggaacagccagacttcgggggtgaacacccccgtgagtccctttacaaggatttttgccagggactccccaaagggagggacttggaaatttagacaaaccgttggcgcccttgtagaaagaacagtccgtgtgtccctctcaaacatttcccagttgaacgccagtataaataagtgttggaggtaacaccttgcgatataagagattttaggggggtgatagctctttctgcttctgcccatccccacacatcctcggggggaagggagagctccactgagggtatactaatttcacctgagccccacgaagtgggaagcttgggttgagcctaaaacatttctgagttatataggctagctgatttttttaaaaattcgttgcacttgaaggagtattttgcaatgtctggaacaccccgtcacaaaacttgtttgtattgatttctgagtaatttttgcacgctgagactaacgtgtaattgggcagatcaacttttgcagctagattatgcgcatcctcggggccaaattttgtatttttaggggttggttccaaccccctttttgctgtttgaggaaatggaaggttgggtatttttatttaaacattttccatcca

SEQ ID NO: 535639 - DNA, 229 bp, Homo sapiens
cggtgactctagcaggatcctcgccaacggtaatttcaagggttattcacaatgagttacttgtttgtggtgagttttaaaaatctcgttattggccgggtgctgtggctcatgcctgtaatcccagcagttgggagactgaggtgggcagatcacttgaagccaggagttcgagactagtgtggccaacatagtgaaaccccgtctctactaaaaatacaaaaaaaaa

SEQ ID NO: 535640 - DNA, 82 bp, Homo sapiens
cagactccagttatggctcaacccaaagaagatgaagaggaagatgatgatgtagtggctcctaaaccacctattgaacctg

SEQ ID NO: 535641 - DNA, 317 bp, Homo sapiens
  misc_feature (53)..(53): n is a, c, g, or t
  misc_feature (113)..(113): n is a, c, g, or t
  misc_feature (163)..(163): n is a, c, g, or t
  misc_feature (211)..(211): n is a, c, g, or t
  misc_feature (226)..(226): n is a, c, g, or t
  misc_feature (252)..(252): n is a, c, g, or t
tgaaaacacaacctaatcagcagtaaatctctctactcggcgagcgcagtgtnacgcctgtaatcccagcactttgggagaccgaggtgggtggatcacaaggtccaggagtncgagaccagcctgaccaacatggtgaaaccccatctctactaaaaatacnaaaattagccgggcgtggtggtgctcgcctgtaatcccagctaccccnggaggctgaggcaanagaatcacttgaacccgggaggcagngggtgcagtaagccgagattgcaccactgcactccagcctaggcgacagagcgagactctgtccc

SEQ ID NO: 535642 - DNA, 171 bp, Homo sapiens
  misc_feature (135)..(135): n is a, c, g, or t
  misc_feature (147)..(147): n is a, c, g, or t
cgctgcatatggtgcgatttgtgtcaacttgctgtagactgattgaagatctgcccagtccgggggctgcatcttccagcctctgcaaagtgaaggaagagaaggagaggcatccaaacgctgatgtgggtgagnggtggcaccagngatccccaatcctggggccccact

SEQ ID NO: 535643 - DNA, 251 bp, Homo sapiens
cgacactagaggatcccgaaaccctgataacgcatatatcagacaaaactttcattgaaaaagatgtatggacccctatattccttgcagcaccactcacaacagtcaagacatggaaacaatctaaatgtgcatcaaaagatgaatggattaagaagatgtcgtatatatacacaatgaaatactacccagccataaaaaagtacaaaataattccattttcagcaacatgggtggaactagagtatctc

SEQ ID NO: 535644 - DNA, 458 bp, Homo sapiens
  misc_feature (170)..(170): n is a, c, g, or t
  misc_feature (198)..(198): n is a, c, g, or t
  misc_feature (285)..(285): n is a, c, g, or t
  misc_feature (333)..(333): n is a, c, g, or t
  misc_feature (339)..(339): n is a, c, g, or t
  misc_feature (404)..(404): n is a, c, g, or t
tagtggtctcagaatagaccaggcaaattttcaaacatgtacagcacttacatggttctaagtgctgtacactgttctaagttctttctcatttaatcctcataacaaaattataaaattatatcataaaattatatttatttttaataaaatgaattataaaaactagnattagttagatacagaaattttactttnttttgagacaaggtcctactccttcacccaggttggagtgcagtggtgcgatctcagcccaccgcaatccccgcctcccgggctcanggcgatccccccaccccagcctcagtagcctgcactataggcgcaacncccatngtccaggccaatttttgtaccttttgtagagacggggcttcgcatggttgcccaggcccggtctnaaactccagaggtcaagcaatccacctgcctcagccccccaaagttgcggggac

SEQ ID NO: 535645 - DNA, 601 bp, Homo sapiens
atttccctgttcatagttctgcaagccctgagtcctcacaccagcaggtgcctcacaaaaggagacaggtacggagatgaccgctcgtgaatatacacaccctaggaggagaacttgaacaaagtctctgggtcacgttttgcctcatgaacactggctgccagtgtttaagaatgtatatcagagaaaacaataggtatttcttccagtgagtgttgaaatctaagcttaaaaaagaaagattttatgtgcttgaagattcaggcttgcattaaaagactgtttcagacctttgtctgaaggatatacaactgctgtatgtcattaaagtgcacctgtgtcctgaagtttacattatttttcatttccaaagaattcactggtatggaacaggtgatgtggcataaggtgagtgcacggtatgttccagatcacaagtgccttatgtccgaatacagcaatatgtcaccgccgcagccggggcgcacgcatgtgaaacaacaccgagcttgaattgtggagtctttgaaccttataccaatcagttagtaactttaaatttgtcaaaaagttgtattgaatatcataatactttaaattg

SEQ ID NO: 535646 - DNA, 384 bp, Homo sapiens
  misc_feature (34)..(34): n is a, c, g, or t
  misc_feature (36)..(36): n is a, c, g, or t
  misc_feature (43)..(44): n is a, c, g, or t
  misc_feature (124)..(124): n is a, c, g, or t
  misc_feature (164)..(164): n is a, c, g, or t
  misc_feature (192)..(192): n is a, c, g, or t
  misc_feature (255)..(255): n is a, c, g, or t
  misc_feature (266)..(266): n is a, c, g, or t
  misc_feature (358)..(358): n is a, c, g, or t
  misc_feature (362)..(362): n is a, c, g, or t
aaccatgatatataattatatcttctctctctgntnttctttnngggtctttactctgaatcctcttttgcatttttaggcttctccttgagctttcatatgtacattaattatttagatagtnctgtattacacttttccttggtgaatggttaatacccttngccattatctttatgacttctagttggntttaataatttacttacttaaacttctctttcttggatttacaaatttgctttaatttcttcntaacttgggcnaaaattttaatcaattaacagtggtgttgaatagcgttaatatatagagaggcagcaaagtataattgttgagtgccatgggctttggaggnctgnttgggattccctggctctcccc

SEQ ID NO: 535647 - DNA, 187 bp, Homo sapiens
  misc_feature (92)..(93): n is a, c, g, or t
  misc_feature (137)..(137): n is a, c, g, or t
  misc_feature (148)..(148): n is a, c, g, or t
  misc_feature (166)..(166): n is a, c, g, or t
ccattttaaaactttaatgattatcttctctcaaaagagaagtggcactcagaggaagtggcacctgtctgctggacaacccctgcaatccnnaaccccccggacaggctggcaccactgctgaccacagcgcttgntcaggcatggntcacatatgccaatcctnggatctgacccaggcagccac

SEQ ID NO: 535648 - DNA, 850 bp, Homo sapiens
cgggccgaccagaaggggcttcgaggaagttaagaaacacggaggtgttaaatctagccttgtagaaatctaaggacactttgggcacttgggttactgttggaacccaatcggctttgcatcccttgatcgcggtaataactcaagcttcttctatccacggtggggactctttccacaaaccaacgttttctaagcagtcgtaaaggatactcaacgtggtctcataggcccttcccatatctataccaaaggctgtctagatgtctcgtcaacctaagttcttcattgttgaacacgcactaagctactcgacactttcttttcactagcaatctctttgtgtggtgttacattagtcatcaatagccaggagtatcaagcaacatctaatttcactataatgagtagtgattgtgtgatatatcgtagtgtgtgctatgagcaacttcagtttttcctccatggacacacttcatcccatcaccaatcaccactataaagtagagatttgttacactccagctattatgagaatgaacactacaaggttctcaagaagatagttgcataatattcgacagatgaaataagtacggaaatcaggcccgggtagaggtaggctcatcgccatgtaatcccagcactttgggaggcacaaggtgggcggatcactaggtcaggagttccaagaccatcctggtctaacacagtgaaaccccgtctttactaaaaatacaaaaaattggccaggcgtgatggcaggcagaggtagtcccaagactactcgggaggcttgaggcaggagaatctcatgtacgtggaatacagcggcttgcggtgagtctga

SEQ ID NO: 535649 - DNA, 370 bp, Homo sapiens
  misc_feature (93)..(94): n is a, c, g, or t
actaaatcagataacacatttaacttataacccctccaccctccccctttgcaacaccgagtccttcaaaccaaaattacacccaatgcctcnncctgagttacccacccatcttaatttaagcaaaaagcaatgctctcaaagccacaatcatcatacaattacggcgttcttagtgaaaataaaatattaataatgctaatattaataagttttttttatttgtttgtaattgatgttggattatttatattattacaaagaagtataatttgtttgtgggggggattaattcattaagattaaattgaacctcaaaggtgggttttttttccaaaatgataaaggccaccaacactgcaagggtttg

SEQ ID NO: 535650 - DNA, 595 bp, Homo sapiens
  misc_feature (21)..(21): n is a, c, g, or t
  misc_feature (61)..(61): n is a, c, g, or t
  misc_feature (80)..(80): n is a, c, g, or t
  misc_feature (96)..(96): n is a, c, g, or t
  misc_feature (107)..(107): n is a, c, g, or t
  misc_feature (113)..(113): n is a, c, g, or t
  misc_feature (116)..(116): n is a, c, g, or t
  misc_feature (139)..(139): n is a, c, g, or t
  misc_feature (151)..(151): n is a, c, g, or t
  misc_feature (187)..(187): n is a, c, g, or t
  misc_feature (191)..(191): n is a, c, g, or t
  misc_feature (193)..(193): n is a, c, g, or t
  misc_feature (222)..(222): n is a, c, g, or t
  misc_feature (229)..(229): n is a, c, g, or t
  misc_feature (240)..(241): n is a, c, g, or t
  misc_feature (247)..(248): n is a, c, g, or t
  misc_feature (295)..(295): n is a, c, g, or t
  misc_feature (304)..(304): n is a, c, g, or t
  misc_feature (308)..(308): n is a, c, g, or t
  misc_feature (310)..(310): n is a, c, g, or t
  misc_feature (312)..(312): n is a, c, g, or t
  misc_feature (325)..(325): n is a, c, g, or t
  misc_feature (331)..(331): n is a, c, g, or t
  misc_feature (334)..(334): n is a, c, g, or t
  misc_feature (340)..(340): n is a, c, g, or t
  misc_feature (375)..(377): n is a, c, g, or t
  misc_feature (448)..(448): n is a, c, g, or t
  misc_feature (459)..(459): n is a, c, g, or t
  misc_feature (467)..(467): n is a, c, g, or t
  misc_feature (485)..(485): n is a, c, g, or t
  misc_feature (503)..(503): n is a, c, g, or t
  misc_feature (517)..(517): n is a, c, g, or t
  misc_feature (520)..(520): n is a, c, g, or t
catctaaaatgaacagctttnaagcaaccatgtcttcaaattcatcagcattgaacttggngaagccccacttctttganatgtggatcttctggnggccaggaaanttgaanttngccctgcgcagggcctcaatcanatgctccttgtnctgcagcttggtgcggatggacatgataaattaaanaatntnaaccctggccacaataccctggggctttncaaaggnaccttgcatgnntgtttnntgcttattagccccagcacaggacaacatcttgttgatgcggatgangtgggaggngtgntncngcacccggatatngaagcnatntttgcnacaactttttaccatgtacttattggcacaaattnnntcagcctccagggcttcataggacagctgctcatattcatctgataccatgtggccacaaattggaaactnatccacttttntttttttncgccccaggtcaaaaatncgaattttggcatcaggnacacctcggcagangcnagattttgggtacggcttgttcttacaatatcggtaacaacgggcggggcggcggccatggcgacaccaggatct

SEQ ID NO: 535651 - DNA, 310 bp, Homo sapiens
gtttctctagctaccgagcttctctcctgtgctggaggtaataagggtagacttccctctttacttacactggtgacaaatgcagtgcggattcaatggtcgaaattgagtcaaagttaaactaacacagtctcctgtcccacttacccgtcctctaaacccatccaccagccctaagtggtcatcacatgatcagaagtcagctgggggaagagcagggatagatagagcaattcaggagcctctaatggggtaagccacataacaggggcatagcaacagtctttcatgagtggccgaaatcacccac

SEQ ID NO: 535652 - DNA, 337 bp, Homo sapiens
tcgacctcagcatggagtgcaactgacaacttggcaattggccaggtgcagtggctcacgcctgtaatcccagcactttgggaggccgaggtgggtggattatctgaggtcaggagttcaagaccagcccagccaacatggtgaaaccctgtctctactaaaaatacaaaaattagctgggcatggtggcgggctcctgtaatcccagctactcgggaggctgaggcaggagaatcacttgaattcgggagttggaggttggagagagtggagatccgcccctgcactccaaaccaggtgacagagtgagactctgtctcaagtcgacgcggccgcg

SEQ ID NO: 535653 - DNA, 115 bp, Homo sapiens
taacttagaggatctgtggcgcaggttggaagaggcacgatctgtcgccaccaagcgcagtcgaaagaagatggcggcgctggagtgtgaggacccggagcgagagctgaaagaa

SEQ ID NO: 535654 - DNA, 1211 bp, Homo sapiens
tgtgtggtgcgtggggaggtagcgcagggcacggtggatgggtgttgtccgcggcgggaagtgggctcggcgaggggggcggggtaggtgccgtggcgcgcgtgtcatgcgaccggcacgaggggggggggcggcgcgggggggggggcgaggggggcgggtgctgcagcgactggggggtgggaggatactgcgtggggctcgagaggctgtgttgtggggcgcgtactgtgttgcgcggggggggtattcctggtcgtggtctttctgggggggggcccgcgtgatgtcgggcgggcctggcacgggcggcgtttgttgctgtggggtgggggtggcgacgccggagtgtggtggcggggggggggttggtgcgtgggggcccggtgggttgtgtcgggaggagagggcgggcgtcgctgcgcccgtcgggcgtcgctgtggttgtgttgctctcgccatcggcgtcctcgtcctcgtcgagtgttggtttcggtcgggcggcgtgttatgtggggcgggacaggggccgcgctgctgggggggggcggttgccttggggcgggtgtcaagaggacggcctcgcgggggggtggtggtgtgtatagggcggctcattgagataggagagaggggggggtggagcacccgcgccactcgctgtgggtgggctgcgacccttcggagtaagcagttgtttcgtcacccgcggccgggttgccacgctaccacgtctgccgggggacaggatagaaaggaagtgttcgtatgcaccaggcgccgcgcctcccgcaggcacgcgccgcgggaggggataacacacatcgttcgtgcttctagtctctctcctcctcacgggttgtttcacaaacaagacactcgtggggggcgactcgcgtgaggccgcccctctctcctctcaccgggggcaagctacgtatgcttagtcgggtgagagggcgcggcgccatatcattctctaatgacgtcctattgttgggaggggagagctacgtcactctctctttccaccccctgggtgcccactacaacaagtggcagacagaaagatgcacgcccaccttgtttatccttgtgctcggtggtcggcaggtcgggcgttccccgcccccccgggaaaaatttttttttcttcgcggtgcgtgtgtgtgtgtgtgtgttatataaaaacgcccccttttttttatata

SEQ ID NO: 535655 - DNA, 556 bp, Homo sapiens
cccaccgccgttccgggtaggaaaaggaaaaaaaccattcatttaattaccaaggaggggggtattttttcccctttctaccttcaaaaagtggtggtaggcccagggaagccccccaggccattttctttttccaccaagaagaggaataggtaatgggtttcttaaaacctattcaactttaaaggccgaactggaagccaccaggtaatttttgggattaggaaaggggatggcttttgtattcaaacccatggcccaaatttaaaaaaaaaaatccaattgggaaggaaatcttaaaccattgccacctttttaagtaaaggaggtgggaaggaaacctaaggtaaatgggttaggggataataatttcttaaataaccccttaaaccattttaggggattaaaaaaatccttaaaccccttaaatgggtttgggtgaaataattcaaaggggttaggagggtacccttcccccacctttttaataagggaaatttggggattatggaagccaagaaaggtttctttttgaaccagggaaaaaaccttggga

SEQ ID NO: 535656 - DNA, 230 bp, Homo sapiens
cagaggcaccaaggaggccggctgtagcgcaggcacctgtacagtctgaggcccacctccctgggcaaaggctagtgcctggcccagctcccctaggcagagtgaggacccaggaggcagcgtcagccccatgagcagcatgcagaggtgtgcccagttcatacagcctcgatggcggagagccgatgcctcctccagcagtgctgtggagtatgaggctcagggtagag

SEQ ID NO: 535657 - DNA, 915 bp, Homo sapiens
  misc_feature (8)..(9): n is a, c, g, or t
agattgtnnctgtatgtgaggagtcgcgccttgaatggctataagggcatatttgggtgagcagtatattgtgaagagcccatatagttgagaccctagcctggtgagcccaacaagtggtgggggaaaaacaggggtattccactcggtgaacgaggccaacaggtgtgtggagaagatatcaaaagggtgtccttacccagtaaatgcccaaggccctgcgccgcattccccggatagttacgcgcatccattcttgaaagcccgaaaatgttggcggcgccctgtgtgtctgtcgcaagttacttgacgggagagccctttggggaaaagacttcattcggggaggccatcctttctaacaaccgttctgtccccccctttgaaaagagccccttccgagtgcaagatatccttaggtgggcgaaaaaacccagacccgggagttatccccggtgctcgtcaccaagctccctggcgttgccatctattgggtcgaaaattgaggggcgcgtagtgaaaatattccaccaagtggagtacaggaaagattcaagttgtgacgcaatacacctgcgctaaaatacaaaaaatatttttttttaaaccactttttataggacacttctcagtgaccaccacacaggggtctcaggaaaacatgattctttcctaggcctcaggtttcaccgccttgagtttttacacgcaaccacacaaaaggggtattacgcttttgttattgtatattactaaaatactcatatttaatagggactcatattctcaacttatatttttttaaggaaaaacactattctttgttgaataaaaaaatcatttgactacgatcaccattttaacacaggaaatttggtccccaaatttttggaaaaaaaacccccccacataaca

SEQ ID NO: 535658 - DNA, 650 bp, Homo sapiens
gactgaaagtcattttaaagtagccctctgggccgggtgcagtggctcacgcctgtaatcccagcagtttgggaggctgaggcaggtggatcatgaggtcaagagatcaagatcatcctggctaacacggtaaaaccccatctctgctaaaaatacaaaaaattagccgggcatggtggcacgtgcctgtagtcccagctactctggaggctgaggcaggagaatggtgtgaacccgggaggcggagcttgcattgagcagagatcgcgccactgcactccagcctgggtgacagagtgagactctgtctcgaaaaaaaaaaaaaaaggtacccttttggccgggcttgggggttcacacttttattcccaacatttggggaggctcaagcgggaagatcctttgaggccagagtttcaacaccagccggggcaacattagttaagaccccattcttctacaaaaaccttttacaatttaggcagggcttgggtaggcaattgcttttgagagggctcagggcaggaagatcactaatgatggtgccacttggatctcacagcctggggcgacacaagaaagaccctggtctctgaaactacaggggggcctctgtcacattttttcccttatcttcaataggtagttac

SEQ ID NO: 535659 - DNA, 348 bp, Homo sapiens
  misc_feature (42)..(42): n is a, c, g, or t
gagatggagtcagagtctcaccctgttgcccaaggtggagtntagcggcttgatctcagctcactgcaacctccccctcccaagttcaagcgattctctgcctcagcctcccgaatagctgggattacaggcatccgctgtcatgcctggctaatttttgtatttttagtagagacgggggtttcaccatcttgaccaaactggtcttgaactcttgacctcgtgatccagctgcctcggcctctcagagtgttgggattacaggcgtgacacgcatggcctggccttttggaatatttaataagctaaaaaattcttttacacaggtagattaattaggtagccagg

SEQ ID NO: 535660 - DNA, 281 bp, Homo sapiens
aattagcttgcgcacaggaattagcttgcgcacggggcagtgagccgagatcacaccatggcactccagcctgggctacagagactctgtgtccccccaaccaaaaaaaaaaaaaaaagggggggggccccccagcaaaggccggaggaaaaatggatggtttgctggggggggggggagaaatccttacacattgggttacagaggtctttggggtaatggtggcgggggggtttttccttaagggaccacgctgcccaaggggatcaacagattcattt

SEQ ID NO: 535661 - DNA, 104 bp, Homo sapiens
tgggggggcaaagcgggtgacttggggttatgtggcacaagaggggtgaggggtggggaaagtggtggtggtggtgatccaccacacacaaagtgggtctattt

SEQ ID NO: 535662 - DNA, 801 bp, Homo sapiens
gagcggtgtgggtatccggtctccacgatccatatcctaaccgtacacattatagaagtctgtgagatgtctgtggcatattcatcatctcgtgaagaactgaggagctcttaactgagttacatgagctctcagctattttccccactatagctactcagttttttctagtatatagtgtcaaataaaattttgaaaaaattaccccttcccacaatctttgcaaattaatccccaaatgaacaaggatttaatttagctattccatgataaataaacaaatatgcaattttattgaataaacttaaagtaattaataaattcaatgtactgtcagaagttttctgttttgtccagtcttttaacaaatgtcaattaacaatgctacctatgtgggttaaaaagcctataatacaatttctaacttcaggaatatgtgacaacatgtagaaagggtactattgggctgtgcaatttaaacttttcatcacctacaggttatggcataagcactgactatgaaactgacatgagaattagcgcttatatgtcagagtctatctgctcttcagtgctattactcatcaccaatatttcattctacaaacgtagggcaaacaacattcactaaggctgcgcagcaatattgccctgcattatacccaactcaagccacagtcgctccacggaaacgcttgcattggacccacctgacctcttcggctcctcttaccttaagtactccattccccacacaaacacgtcctcttactcacgaactccatcacatctcacacgctc

SEQ ID NO: 535663 - DNA, 718 bp, Homo sapiens
gcatagtggctcatgcctgtaatctcagcactttgggaagccaaagtgggaggattgcttgagcccaggagttccaaaccatcctgggcaacagagggataccctgtctctaccaagaaaaaaaaaaaaaaaaaatgttcaaaaaacaattagttggccctgggtggtgcacactcagtaggtgatgtgaaaggttctcctttgaaccggggagactgaagctggcagttgagccactgatcgtgccactgcacatccagctctgcgggacaacgggggaccctactctcaaaaaaaaaaaaaagaaagctcattcctccctccactcatacgtgattttgacagctatgtggattgtcattcacgctctacacgccctcagccgtacatacaggaacccccaaaacggggttctcacttaacatcgtttgatgacgaacgtggtggacacctttcaacaagcgacggtgtgtgttgctgtgccgacaaatgatgagatacatagcacatcaaacacacggcggtcccgacggaccctggctaaagggcctacaacaatatccataatggcaagcaccgggcggtcacacaatgggtgtgtcatcgacctgtgctacacgccacgagtgtgctgaaggatattccccattggtcactatatagggaacaccccctgccctgcgctgtagatcctactggaaatgtacccttgtgtgca

SEQ ID NO: 535664 - DNA, 224 bp, Homo sapiens
cccaaaaaaaaaaaaaaaaaaaaaaacccccccccccctttggccccccttttttttttgggtttgggggggaaaaaaccccccccttggccctttttaaaggggttttggtggggattggggttttaccccaattttaaagattaaggggtccctgaaaggggaaaaaatttttccccccttcccgtttttttaaagggcccaaaaagggtttttttttccca

SEQ ID NO: 535665 - DNA, 466 bp, Homo sapiens
cacaggtatgatatatgtcttaccgtcgatctcctaaaaggcagagtacaccagtaagccatgtatctcagagaagtgtaattcataaagtatataggctagtatgatagtaaccaagggatggaagaagtaaatatatgatcaggtagcactttatactcaggcagatctcagccctctactgagtcccttatccaagcagtttctttcaacgaagccagcaggcgaaaagcagggactgccactgcatttcatatcacactgttaaaagttgtgttttgacattttatgtttagtagcacaaatggggccaaagaaacatcgcctatgagcgaagatatgattggaaaatcaagagtgtagaagaataagtactgtttcactgtccaaacgacatgcttatagtgctctgtaaatgtacctttcctttgtagtctctggcaagatgcttgaggaagatacgagt

SEQ ID NO: 535666 - DNA, 1717 bp, Homo sapiens
ctagattctagatcgcgagggccgcccttttttttctttttttggagcttgggagtactctgattgctgacaaatgccgtactcctagagcaccacagtcagtaccatggcgactgcagattgcccacacgcgacggtcaacagcccgcatcataacaggcaagacaccatgaccaaccagggaaccgacataagaccccaatcacagcacgcgacaagacgacaggacacggggtacccggcagatgcacaccgcacaccgagacgcacacagagccagacacatcgagagcagaagcacacaggaggtgacctcagagagcaccacacagcaggtcaccaagagagtcaacacaaagcacacgacgagaacaaagagaaaacaacaactgcgagaccaaaaagaaaaacatagcgagaacagcgacaaacaagagcacaagcaggaaaccgcacaaaatacagcgagcccaatagcgagacccccaccccaaaaaagcacaccaccacacgcacccaactcaacaagcaccacaccacagcactacgccaccgacacggcgcaacaaagccgagcaccaacaaacacaaaacaccaccccagcacacacaacccaaacacgacaagataccaccaccgtcacaacaaccccacaaccacgatgaccaacagccggacacaagagagagcgcacacgacaaaacagacaaaaccaaccacagagaaaaaacacccacacaaagcacacgatgaacaaaacagcgcgaagaatcgcaaccacgcaaccgacaacagaacacaaccaaagaaacacacaaacagaaaaaacacataccagagagcaaacccaacaagaacaacacgaccccacaacaccgcaagcactagctgataaacacagcggcgaccagacaacagggagaaggagacgacaaccaacgagaaaagaacaaaacacgaaactgaaccacaccacgacgcaagtagggaagagcacacaccaagcgagaggaggcagagaccaccgcaccccagaacacaacccacaaagcaaggacgaaacgagcgcagagagcacacggagccgaccgagggtacgcgcccaagctcgccagcagagaagacagaaaccaacaaaaacaacaacaagaacagaagagaagatcaaacacagagagaaaacaacacagcaaaccaactacacggaacaacacaaacagacacagacacacacacaaagacacaacgcagcaacacgaacaccacaagaagacaaacaagacaaagacaccacgcaaaacaacagagaatacgcgcagaagcaaaaaaaacagagacatcggcaaccaacaaccaaacaaagaggcagaagaagcacagccaactacataagcaaaaacgagcacacacacacaaacggcacaacacacaagaacaacagcaagaaacaccaacagagagtaagaccgacagcaaaccaacacgacagcacacgccgacacacagacgaacagcagccaccacacgaaagaccaagaacacaatacacacgaacacacacacaaccacaaccctacagacccacaacgaaagcgacagcacagacccaccacaaccctaaccaacacacgaaaaacaccaaacaagacaccacaatacaaacaaaacgaacacaatcaaaacaaaaaacaagacaacaacaaaaccggaaaggca

SEQ ID NO: 535667 - DNA, 1013 bp, Homo sapiens
ctgtaatgccagctactccggaggctgaggcaggagaatcgcttgaacctgggaggcggaggcggaggttgtggtgagccgagattgcgccattgcactccagcctgagcaacaagagcgaaactctgtctcaaaaaaaaaaaaaactaaaatgcccgtcctgcgcggctttctgtggcctgcctgtccttgcagtggtggccctgtagccccaggtctgagtgaggctccagccgtctgcgctggggctgcacaaattccagactcctgtgggcaaaattcttttaattgtgttgcatttttgagcccttgaattaatccttggtggcttggcttttttggggtgtccctcttgatctctgggaaggacgggatctaggccatagcttaatgtcccgtgtgttttaattcacaaagtacggtgtgcacacttgccagatagctgaagctcatcaaacctgtacgtgtgaaagactgagcattgaaccaaaacctgatgggaagaaaccctttgtggaggccacatggtcaagcagagaagagggcctgaggcctccaccacactcacaggcctctcaggctcaccgtgtctgtggcatggtggggtaacgggggaggcccgttgtcctcgcgtggggttcgccactgtgaccagccaggaccacagcctcttgtgaggctgagacagcgcctccgttgtatcgaacgcgcttgtcatggtctcttgggcgaacgttgcggtcaagacctccttgtgaagctttgccgaaagccagatgttgcagcctagtggcaggtgcacaggattgctctgggccaggtgctggtgtttgccctgccccagtgtgacaacactcgggtttcacgggcgtcttttcgttgacaccggaggtcgcgcagagtgtctgtggcgtcacttgctcgtggggtgtaataacctagtgccttggcccttcgttcgtgccgtcgacccgtcacacgcggtgctccggccggctccccggtctaggccc

SEQ ID NO: 535668 - DNA, 299 bp, Homo sapiens
tcgaaatcgaattcagaagtggtgagtctggcaattccacgcaccgatcacgtctgggaaaagatctaatctgccgtgggcctgtcgtgacttggaagaaccctacagcggggtagaaatgcattttattctttaagttcacgtaagatacaagtttcaggcagggtctgaaggactggattggccaaacatcagacctgtcttccaaggagaccaagtcctggctacatcccagcctgtggttacagtgcagacaggccatgtgagccactgctgccagcacagagcgtccttccccc

SEQ ID NO: 535669 - DNA, 208 bp, Homo sapiens
cctattttggtttattacacaggaaactcaataatatactgtaaaacgtagttttttttccctcaaaaatgctttttaatgtcaactccccatggggccttggtgaaaagttagttttgcaaagaataaatcaatcacttgtttgactcctccagctaacagagagcgtgtgaccggccgaatgtccttacctgttgggaagcttggg

SEQ ID NO: 535670 - DNA, 444 bp, Homo sapiens
taatacttatccgtattgtgatggtctgcctcagtgtgtttctgccgatagggcgatgttctaatatgaagggtgttcaattcttaaagataacaagaaattgccacattaactgactcttccttcacgaaagattcagtgtccatgcgatactgttgataagcatttacccatagtataacttctttcaaaattggagttagtcttctcaaaccctgccactgttttactatgtttatcaatattctaaatcctttgttgtaggctaaacaatattctcagcattttcaccaagagtaaatttcatctcacaaaaccactttccaggttctttctggactgtagagttctttccaggctacgttgtggcagtttaagagtctggcatcattttccgctgggacctaaggatcgaggaggtgcttgtgactagactgccaatgg

SEQ ID NO: 535671 - DNA, 388 bp, Homo sapiens
tatctcacattacaaacaacaaacaaaattagctgggcgtggtagcacgtgcctgtagtcccagctactccgaaggctgaagtgggaggatcacttgagcctggcaggtcgaggctatagtgagctatgatgatgccactatactgcagcctgggtgacagagtgagaccacatctctagaaaaataaaagtaaataaaagttaaaaaaataaatcttgtaaagtgtttttggtagttataagtagggagattagtacaatgtgagctactctaccattactagaccaagtgtgggcactagggttttgcacttgctaataacatacatggttatgatgagaaggggacctggtgtttcaaattccacgttacctgttttgcatgtaa

SEQ ID NO: 535672 - DNA, 181 bp, Homo sapiens
tccctctgcgagctccattgcagttctggacttaagaaaccagtctaatctgaactgaggagagttgcgaatacatcttgtcgcaattacatcattaacatttactttgtcaaatccaatgtttgtgaagcatactattcagtataaacgatcttcttcttcaggatatcagaagatgaga

SEQ ID NO: 535673 - DNA, 818 bp, Homo sapiens
  misc_feature (9)..(9): n is a, c, g, or t
  misc_feature (63)..(63): n is a, c, g, or t
  misc_feature (65)..(66): n is a, c, g, or t
  misc_feature (68)..(68): n is a, c, g, or t
  misc_feature (283)..(283): n is a, c, g, or t
  misc_feature (302)..(302): n is a, c, g, or t
  misc_feature (305)..(305): n is a, c, g, or t
  misc_feature (314)..(314): n is a, c, g, or t
  misc_feature (346)..(346): n is a, c, g, or t
  misc_feature (365)..(365): n is a, c, g, or t
  misc_feature (393)..(393): n is a, c, g, or t
  misc_feature (396)..(396): n is a, c, g, or t
  misc_feature (402)..(403): n is a, c, g, or t
  misc_feature (406)..(407): n is a, c, g, or t
  misc_feature (409)..(409): n is a, c, g, or t
  misc_feature (423)..(423): n is a, c, g, or t
  misc_feature (432)..(432): n is a, c, g, or t
  misc_feature (519)..(519): n is a, c, g, or t
  misc_feature (521)..(521): n is a, c, g, or t
  misc_feature (533)..(533): n is a, c, g, or t
  misc_feature (552)..(552): n is a, c, g, or t
  misc_feature (563)..(563): n is a, c, g, or t
  misc_feature (566)..(566): n is a, c, g, or t
  misc_feature (573)..(573): n is a, c, g, or t
  misc_feature (577)..(577): n is a, c, g, or t
  misc_feature (586)..(586): n is a, c, g, or t
  misc_feature (588)..(588): n is a, c, g, or t
  misc_feature (605)..(605): n is a, c, g, or t
  misc_feature (746)..(746): n is a, c, g, or t
  misc_feature (813)..(813): n is a, c, g, or t
atataatgnataacattttaccttcattcttcagaagacttaattagagtagctttcttctcntnntnatctctaatctctttaatattttccgagagatcttctgacatgcattcttcatattctctatcaactttagcaatctgctcctcaagatgtttctctacacgacccaacatgtgtagcaaccatctctaacagacgttgcaagttatttcccacttttcgtctttcttcagtcggtggtttgcacaactagttggtattcccgctgaacagcatnctaattacattacatagcnttncactcgcanccccttggtctaacaagtactttctagcaggngcttgtgtttctccaaggnctcaagctcactggcacatttttgcatnccnctgccnntgnntncctaatttttttgntgggtaaangtcatccacgcttttgaccttcttctttcagagttctcacacttctcttgctttctgttatcattgcattcaattgttctgaaagtnancctccaaacccntttttttatttagggcttnatgaattgctnctncagtttncatncaggagttncnttaagaggtacataaanttgagccctgtatttgacaaggcagttggcaccagcctcgggattaaacttaatttcaaagtcataacctttggaattctcagcacctttaggaataagttttaattttctagccaatttgtgatactctgctaattgtgntttcaatcgcttctttgcctctggcatattttaactcctcattccacaacttctgttgtttcacttnccagt

SEQ ID NO: 535674 - DNA, 614 bp, Homo sapiens
cggcgcaccctccctctcgcgccgcgggcatccccggcgccgtgcacgatctcgtcccgcgcctccgcccctcgctcgttcggtccttcccggcctccccgagcgccggcgagccggttcccctcaggctctcatgaagtatagagcgtgcccttgtggtatttcccgagctccattgcggaagctgaggctcgccatattgtgcggcggcgccggcgtccggggagttgataccagagtctgtgctccggccgcggccagcggagccctgggctggggcaggagccgcaatgtctcaggctgtgcagacaaacggaactcaaccattaagcaaaacatgggaactcagttatatgagtaccaacgaaacaccttcagggaggcattaccaagagggcttcacgaaatggcggtaacacctcgaagtctacacagggaattactgtgcccaactcgggtgcggcatatgctcgaagaacaccatgactacaaaggagatgttacatcgctttagtgcagactgcatcatcacagcccttagaagtggcaaagcaagaatgtcctacctgtcgggaaaaaacgtaggtttccaaaagatcactaaggccagacca

SEQ ID NO: 535675 - DNA, 929 bp, Homo sapiens
  misc_feature (54)..(54): n is a, c, g, or t
  misc_feature (79)..(79): n is a, c, g, or t
  misc_feature (109)..(109): n is a, c, g, or t
  misc_feature (150)..(151): n is a, c, g, or t
  misc_feature (185)..(185): n is a, c, g, or t
  misc_feature (187)..(187): n is a, c, g, or t
  misc_feature (191)..(191): n is a, c, g, or t
  misc_feature (193)..(193): n is a, c, g, or t
  misc_feature (209)..(209): n is a, c, g, or t
  misc_feature (224)..(224): n is a, c, g, or t
  misc_feature (260)..(260): n is a, c, g, or t
  misc_feature (272)..(272): n is a, c, g, or t
  misc_feature (282)..(282): n is a, c, g, or t
  misc_feature (294)..(294): n is a, c, g, or t
  misc_feature (315)..(315): n is a, c, g, or t
  misc_feature (329)..(329): n is a, c, g, or t
  misc_feature (357)..(357): n is a, c, g, or t
  misc_feature (406)..(406): n is a, c, g, or t
  misc_feature (415)..(415): n is a, c, g, or t
  misc_feature (466)..(466): n is a, c, g, or t
  misc_feature (542)..(543): n is a, c, g, or t
  misc_feature (668)..(668): n is a, c, g, or t
  misc_feature (670)..(670): n is a, c, g, or t
  misc_feature (672)..(672): n is a, c, g, or t
  misc_feature (677)..(677): n is a, c, g, or t
  misc_feature (684)..(685): n is a, c, g, or t
  misc_feature (688)..(688): n is a, c, g, or t
  misc_feature (743)..(743): n is a, c, g, or t
  misc_feature (763)..(763): n is a, c, g, or t
  misc_feature (765)..(765): n is a, c, g, or t
  misc_feature (767)..(768): n is a, c, g, or t
  misc_feature (779)..(779): n is a, c, g, or t
  misc_feature (784)..(784): n is a, c, g, or t
  misc_feature (788)..(788): n is a, c, g, or t
  misc_feature (818)..(818): n is a, c, g, or t
  misc_feature (822)..(822): n is a, c, g, or t
  misc_feature (928)..(928): n is a, c, g, or t
gccccctgagtgggcctgaaccccaatttcacccttcccccgggcatagggccnaggccaggacgctcacccgaatgtngctgggactccttgtgccctaagcccaaanggaggaggcagcaccaacattggggatggtcccccaagaannaaagaggaagcccagcctccggcaggcagtatcnanatcnangcccacctgctcaagnctgcagcctccaganctctagcgacaagtctccagagccggccaccaccantatgccctcaanacagaccctnttgagcccattntcatgccttcgggtgcaaatngtccttggtgggtntgtgggcacgtgcacccggatggtcttntcagtggatgtggtgtacaaggctcccacggagtactggatcccagtgntgggaaagntgtggcccacatcaaaggaccggataagctggaagcagccgttgcggttgncgaagacgtgcagcaggccctggttgtcaccagcccagtgctggggttcttggtaggacatgcagagcaggtaggnntccagctgcagacgctgcaggacgctgttggctcggcggtccaccaccaccaggctgtggtcctcgctgcctgaaatgatgtgccggtcatccgccagcagggtcagcacgggtctggagtgtantnantggtncttcaanncgnctgggccggctctagggtcgtagatggtcaacttcttgtcataggtgccagtaancaggatgtcaggcaggtagnananncacagcacggntgagntggnctttatctcgccgaactgctgcccatccgntgcnatgtcccagagcttcactgtgctgtcccaggagccggagcacacgcggtagtcctgcgctgccactgaccacacccagccctcatgggtactatttcgcttagtgnc

SEQ ID NO: 535676 - DNA, 159 bp, Homo sapiens
gctcggtgattctagaggatccctaacagaactccatgtgtgccacgcggcctcgatcacctgggggtcacagggcttgtaaccttccccgtctgttgcgaacttccaggcagagcgggtgagaggtgtcaatgcctcctgccagaagttcgcaacaga

SEQ ID NO: 535677 - DNA, 118 bp, Homo sapiens
agatggcttgttatatttcacatgctggcagtacaggcctgaagttttattttgaccatccatctggctcagagtgtgttattaatattcctaatgtggtggcaagagttggcgggcg

SEQ ID NO: 535678 - DNA, 168 bp, Homo sapiens
  misc_feature (38)..(40): n is a, c, g, or t
  misc_feature (151)..(151): n is a, c, g, or t
taaattgtgtataagccttcccgggtaaagcctgtcannnttttaaaataatggagacagggtctcaccatactgccatactgcctcctccaaatcttggcctcaagcaatcctcctctcttagcctcccaaagtgctaagattatagctnggaggcacccaaaaccc

SEQ ID NO: 535679 - DNA, 190 bp, Homo sapiens
  misc_feature (32)..(33): n is a, c, g, or t
  misc_feature (109)..(109): n is a, c, g, or t
  misc_feature (158)..(158): n is a, c, g, or t
ctgttggggatttagtgtggagcacggctttnncaccctcagtataaaatgtcaggcctgattatctaaaagctattggaatgtaatcaactgggagaatgtaactganaaatacatggcttgcaaaaagtaaaccaccgatcgttatctgatcatanccctaatgatcccagcaagataatgtcctgtc

SEQ ID NO: 535680 - DNA, 840 bp, Homo sapiens
  misc_feature (602)..(602): n is a, c, g, or t
aggtccacggattccgtccccatctctacctgatctacactgtgcgccggtcgctcatgcctgccaataccagatgagtttgatggtgctatctatcctcaggcaatcccgagaccgtggaccttgtccccaggatgcctatagcgggggttccagcagtgctactagtacccttaagtcgaactagaaaaccgaggtcgacttccttaagaagagaacacagatgcacaagaaacccacagagaacccccccagtgcaacggagacgcacacaggagccagatgatatgagagccttgtccccccagtggggagaatctagcatctgagacgaaaacggaatctggccaagactggaaggtcctagccccagcttataggatggagacgccccttgatgcccgctgtggggcccaaagctgtctgccctctggactcagagagtgcagaaggggttgtccccccgggttcttgaggtggcatggagtgcatgaactcaccccctgtcgggcaggaaaacgctgcctcttaccattggcccggaggcagcgggaggtaaccccatcggatagcgggcggtcactgaggactctccaagcccnaaggggcttctccgtaaaggtcgtggcgagtatggactattctggagtgaccaagagtaagttagggacaaccagtgtggaaaagacccccccttcctaccaaaaaagatggcaccaagtctgttgccaaaatggccctttggaaggccagatgaaaaagacccccgtgcaaatgtgtgtcattccgtgtactccagaatcctgtgtgaccattgttcccttgccaagggtctccccg

SEQ ID NO: 535681 - DNA, 423 bp, Homo sapiens
  misc_feature (172)..(172): n is a, c, g, or t
ccccccccccccaagacggaatcaataaataagctgggagggaagggataccgaaatgcaaaacgcgcaggaaggcccaagcaaggaaagaagggaaggaccataactaggccacccagagtttacgagttaaggtgccgggccgtattttgtggggcacggttaggggaangatgggtttgcccagggggcaggcggtggtctttttttcgcctgtgtttttttgtggctcttgtttatgggtatgttgggtttctttctttgttttggtttgttttttttttggtttttttttttttttttttttttttttttttttttttttttttttttttttttttttttttttttttttttttttttttttttttttttttttttttttttttttttttttttttttgacccttctgtcgtcttctc

SEQ ID NO: 535682 - DNA, 507 bp, Homo sapiens
agctaaaattgagtgtcagaagcagttaaacataaatatgcttcactcactcattcattcattcatggttcttccattcctaatcttgtatctcctacattaaattccctgcatagttaatactctgcatttccacagtctccagttactctggtcattaccagtatgtggaagtgcatatgcttttgcctgttttgttcaactgtgtgtgtgtttttgaagaaacacatccagagactctaaggctttgttttggtaaaataaagcaactttaaattccaggtgttggcagtggcagttgtctaacatagcatgataaaattatcccccaggttcctatatgcgtggttaattacaggtgatccaactcccaaagaatacacatggcctggatctctgagctctgctgaataaaataaccaatgtataatttcattttctgtgaaaaatgttaactaaactagaaaaggtgatcaaataaactgttgctctcccaaaaaaaaaaaa

SEQ ID NO: 535683 - DNA, 141 bp, Homo sapiens
gatgggtgttgtacatacatggatggtataatatgaaagctttggggatgggtttttttcactcagcataatgcccttatccacgtgttgcatatatgggttgaattatgtcccacccaaaatatgcaagcaagtgggagg

SEQ ID NO: 535684 - DNA, 208 bp, Homo sapiens
agaacaaggaaggagaaagtaacatgtggatggtgagaaaggcatgaggcgaattctcagccatgaaaggctgaaggcagcaggaacaggctctagcgaaatgggtgctgtgtcccctaacctgcatgtggcagcaaaagttgcaaagtttcatggatttgaatgtgaaccatctgttccctgagacgcaactgccaacaacgtggtt

SEQ ID NO: 535685 - DNA, 132 bp, Homo sapiens
ccgtgctggcattgcgcttttcatgggcgtatcggacagctcggcggagcaatccgtctcaacacatatccacgccctgtgttgtcaaggccggccaccatcagccagtgccacagtgatggtccgagcgga

SEQ ID NO: 535686 - DNA, 363 bp, Homo sapiens
tctccttgcttcagcctctcgagatcgaaggtgcacacgaccacacctggctattttgttttcttgtacaaacatgaacctatgttacccgggctggtctcaaactccagagctcaagcgatccttctgcctcagcctccccagtagctaagattacaggcgcccgacaccacgcctggcaaattttcgtctttttagtagagacggggtttcgccatgttggccaggctggtcttgaactcctgtgctcaagcaatccgcccatctcagcctcccaaagtgctgggattatagtgcatgagctgtcccgtgcccggactcgtttcctgttctaaaactttttaataaactctgactcctgct

SEQ ID NO: 535687 - DNA, 434 bp, Homo sapiens
aattgtctggcaaatcctttcaaaaggatccccaacccaaaaaagaagcccaacgcaagggttcttattaggccgtgctccaaagtcatcgccgggtttctccctgtgattatgaagcatggttccattggggaatttgaaatcattgatgccccaaagctgggaaaattgttgtgaacctcacaggcaggctaaacaagtgtggggtgatcagccccagtttttacgtgcaactcaaagacctggaaaaatggcagaataatttgcttccatcccgccagtttggtttcattgtactgacaacctcagctggcatcatggcccatgaaaaagcaagacgaaaacccccaggagggaaaatcctgggattttttttttagggatgtaatacatatttttccaaataaaatgcctcatgggctttggggcttcca

SEQ ID NO: 535688 - DNA, 1121 bp, Homo sapiens
tgagcagccctagttccaactattgtggaaccaagtttccacacattgataaaggggtgttgcttgtcacactgaagaaagtcggccttctaaacagtagtttagggaatatgctccaggtaccccggtattagttctcccaagcccccttggtcatggcggaatgtccaaagtttgtacaggccagggtgtttcaaggacacctacctcttgcaaaccccattcctccatggctcctgtttaggggttattctatttgtatcacatgtacatgttttgcccgagtgttgagggggggtgtagccagaattagacttacattgctgcttctatgtttgccacttcctgatccatagaagagcatgattttcacttgtctttttcattgtattttgattggaaagcctgaaaccatatagtattttgcttgtttgcaggacttccttgggaattcagattggtgagggagaaaatacataggaacaattatcttattttgccattttgttaaaaagagaatcccaacgtagttatccttgataagattctttagtatctctacaatgcctgtggtatcttagaataaaaccagatatttttcatgacagaatgttaactgtgtatatataaaggttggcttgaccattttgattgtgaactttgatatttttgaacctttgaatgttccaccttgggtttattttaaaacttgatagatattcaaccatttgattataatcagatttttctattcttagtcattctttagagtgggaaagtttcagaagttgaggaagagatgaattgaaactttaagaatatatacaaggctgggcgcggtggcttacgcctgtaatcccagcactttggaaggccaaggcaggcagatcacttgaggtcaggagttcgagaacagcctggccaatgtgttgaaaccctgtctctgctaaaaatgcaaaaatttgccgggcttggtgctgcgtgcctgtaatcccagctgctccggaggctgaggcaggagaatcacttgaacccgcgaggtggaggttgcagtaagccaagattgtgccgctgcactccagcctgggcaacagagtgagacgatgctgtctcaaaaaaaa

SEQ ID NO: 535689 - DNA, 267 bp, Homo sapiens
accatacgggggaacagtattccatcaggaagcagacatcgccgagcaagagaagacaacgccaactgagcctcacgtgggcaataaccttggctcagtgagagttatgtagaaggtaagtgcatgacactgaacaggtcgaagctgtgggacccaaggggagaggaagattcctgagactaacagatggagtcgggttctgggaggcggtgggggtgattctgtgctgagcaaaagtatcaccccaggagtacaacctgccggtgg

SEQ ID NO: 535690 - DNA, 455 bp, Homo sapiens
aattagagaatgttttcacagctcagaagagaaagggcattttacttctcccaaccaaaaggcaactccccattatgtgcagtggccctacagagaacccccaaaaaattagtttaaaaaggcttgtccaacaaatgcatgtaagagctggtcactccacactttcagcccttctggaggtgctagatctttagaaacagaaactgacacacctaagagggcaaagatgacccagaggtgacacgctgtggcatcctgctcacaaccagcacactttgactaactacactaaagccctagaccacagctcagtttttccttttgaggaaaaaaaaattgggaaacaaataatctaagaatgaggaaaaaacaaggagaatgacccccctattgggcactccattggtttgatggtgcctctacttgcaatttttgtgtaaattggcatatattgt

SEQ ID NO: 535691 - DNA, 426 bp, Homo sapiens
attctagaggccgaggcgggtggatcaactgtggtcaggagttgagatcagccaggccaacctggtgaaaccccgtctctactaaaaatacaaaaattagctgggcgtgatggtgggcgcctgtaatcccagctacttgggaggctgaggcaggagaatcacttgaacccgggaggcggaggttgcagtgagccgagatcgcaccattgcactccagtctgggcaacagagtgagattccgtctcaaaaaaaaaaaggaaagggaaaaaaaattagctttatacctcttcctgggtcttaaacggccaggaaaattctggaacacttccaaatttcagttggaattaattccaaaaacaaaattttataggttattaaaattaattttaactttcttatatgagctaatgagtatcacttttaaaa

SEQ ID NO: 535692 - DNA, 1147 bp, Homo sapiens
  misc_feature (92)..(92): n is a, c, g, or t
  misc_feature (129)..(129): n is a, c, g, or t
  misc_feature (144)..(144): n is a, c, g, or t
  misc_feature (285)..(285): n is a, c, g, or t
  misc_feature (309)..(309): n is a, c, g, or t
  misc_feature (398)..(398): n is a, c, g, or t
  misc_feature (423)..(423): n is a, c, g, or t
  misc_feature (426)..(426): n is a, c, g, or t
  misc_feature (431)..(431): n is a, c, g, or t
cttgaacgtggatcggacttcatagacagattcgttatggatgagccttttatgagcacttgcaggtggaaaagagctggatgtatgtggcnaaaggttatgcaagagagagtcacttcaggggtttgnttcagaacgtccacntagtgtttgaaaactctgtggaagatattttaagcaagaagggttgccagcaaggccagggaggtccgggtccttgtgcacgtcctgtgaggaaggagaacaaggagacatttgatcatcaatgcagggagaagggtgttntaagaccaaccctcattccagctncaactgtcacccccaccacgaccctcactgtgcctgttacctgaggggtgatttgcagcacaggcagagttatcttggctccagcactntgcgtgccagggcctcagcttcatnagncagtnctcttctgggggttcctggggtgcagttggctgtggggcttttgggtactttttgttgcaataatgttttttcagtctgatatatttatatgtatacgtgtgtgtgtgtgtgtgcgtgcgtgtgtattttcactaatatagaaaaatattgtttttataaacaaaacatatatgcaaatattctttgtatgaaagaaaatatacccttcgcggtgttcctaatcacatgtttgtactataatttcacgtgggttcagttaaactagagctaaggttgtccatggcatgttgagtcagttgtcataatggtcagtgagtaaaactaacctactatgacaaacgtgacttacacctctatgtgagcaaacaccttgtgtgtgtgtgtgtgtgtgtgtgtgtgtgtgttaccagcatacaccctagtaggtgcagcctccttcagcaggtatttcctaggctcacaggtacaagtcaataatccctggaactatcaaaagcaaacctttaaaacttatgggaaactcttagatcttccaaaaaaaaaaaaaaaaaacacagagaactctagatctggttatctccagatggtgtaaaataggtgtgggctctatatacatatatctacgggaccatatggggcaatcacccatgagtaagtctactcaacgccggggggatgcaaatgtcccattggggagatctgggccaacacaaca

SEQ ID NO: 535693 - DNA, 538 bp, Homo sapiens
ctggcttggcagtgcctcatgctcgatgtaaaaaccccacagttcacaggggaggtgtctgccgggctcctcaggatccttgctcaatattcagcattgttagagggaagttgggtagatcttgggaagtattcccaaggaaaacagtcctgggcacagtctccaaaataaattcttaattttgggaaatttacctccttggtaaatctgtaggtgtgtgtgtgtgttaccagcatacaccctagtaggtgcagcctccttcagcaggtatttcctaggctcacaggtacaagtcaataatccctggaactatcaaaagcaaacctttaaaacttatgggaaactcttagatcttccaaaaaaaaaaaaaaaaaacacagagaactctagatctggttatctccagatggtgtaaaataggtgtgggctctatatacatatatctacgggaccatatggggcaatcacccatgagtaagtctactcaacgccggggggatgcaaatgtcccattggggagatctgggccaacacaaca

SEQ ID NO: 535694 - DNA, 196 bp, Homo sapiens
gatcctgcaggatgttgcgacactactgcaatagttcatagcacggatacaaatctgggtttgtcgatatgtgctcgatgcctggggagacccaactaacgcagcgccaacttcagagagcacatacagcgccggcaccggttttcttatgacacttttgtggattatgatgttgatgaagaggacatgatgaatc

SEQ ID NO: 535695 - DNA, 510 bp, Homo sapiens
cccccctcgagagaaggaggaaaagatgatgaatttcataagacatgaggaggtattagtaagatgaaataataaaaaatagagatactacaaagaaaaaactaaaacatatgcagagagagagaagccaatttatcaaaaaggacaatataaaattagaaatatcagcctcctaaaagaatagtgtcaactttaaaatacaaccatgagcaaacctctaaaagtactttgtttactcagtaatgtgtttaaatctcatctatatgactataagaaaactgaatttatggcctagcaaattaaacaaagaactttagtgtgctagctaatctcactgacatcaaattctaaaatatgatttttttgacgtgactcagctctgtatcataacaaattttactgttttgttagcctcccatataatgtaaagatatgactgtctaaagtcattctacttcaacagacacatctgactttctgccatgaagtttgtaaaatatgttttagata

SEQ ID NO: 535696 - DNA, 192 bp, Homo sapiens
  misc_feature (119)..(119): n is a, c, g, or t
  misc_feature (147)..(147): n is a, c, g, or t
tcctgttgctccctcttcactgctcacctgctcctggtgaacccctgcaccgggggtactccatgcgctgccccaatagctctgtctccctcctaccccttcctgccaggtctatcatntcagtgacagcaccatctttaactcccncctctcccaaaccccttctcctggcccctttcaaaccgtccctcc

SEQ ID NO: 535697 - DNA, 1027 bp, Homo sapiens
ggaacatatcagagagatgatctggctgcaatatctattgtaagtcaaaagcattgatgatacctcaagactaacgatgagatttccagaatctgatattcttaagccaacagtggccacgatagtaagtcatcctgagactgactacaatgaacaaagactgggtcttcactcgaagttacacgtacaagcgctttgagggcctgactgcaagggggtgcaataccttcctacatgaaagcagtcacacagaatagtactcttgccacggaatcctatgtggagcagagttctttgtataacatcatgcttttcctctcacactcttgaagagcttccaagaagttgatggaacccaccaatatgtcatagtaaagtctcctgaaatgtggtagtaagaggattgttcttccataatgcatctgaagaaactgtaaaccaaagacgaaccatatctactacgtgcggcgcataaacagctatcctgcttggaagagaagcatcatgagccaatttgataggtgtatgcacaaaataagttgagtgatcctaagttgcatcagaatgaaggggacaaaacagcagcatccaacattatggagatgtcgtgtatagtcatcgaatatcagccagtcctgtaatttgtgacacgctctctgcaagcccaccaagtattcctttatagctaaagttcatagtagctacggaaataaagcaatagagacagtctcagaagccaggattccgggtgaaggaaatgacccgccaccctgagggtggggatggtagtctaacaagaaccaagctcaagcgagaggctaagctcaatacatggggcactgtgtaggcacaaaagaacgtgagcgatggttatccgcggcgcaataaaaacccgagaggaaaggggagggggcaccgacagtggtagcacgaagtgggcagaaacggatgagacatccgggaaaacaacaacggaacgagcgagaatgaaacgagaaaaggcaaccgcacccctactccagctttg

SEQ ID NO: 535698 - DNA, 179 bp, Homo sapiens
acgatacgtgatcgtagacacaagcgtaacttcctaagtttggattccacgtattaacgctgcagcacgtatgaccggtttttcatactcaaagttgattcacggtttgccacttgctggtgttgaattgaccgtaagatgttggctgttattgctgtgcctgttttcggtacttttgc

SEQ ID NO: 535699 - DNA, 861 bp, Homo sapiens
gcacccccagagcgcaagtactcggatgtggaatcttgcggcgatccagtggagatcaccttcaactccatcatgaagtgtgactgtagcacatccgcagaagacctgtacgccaacactgcgtgctgtcaaggcggaccgatcatgtatccgggcattgccgacaggatgcgaaggagaatcactcgactctgggagactcacgaagacatcagtgcaagtatcaagatcatcgcacccccagagacgcaagtacacggtgtggatcggctggcgtccaacctggtgctcattgtccatcgttctcaggcatatgtggattagcaagcaggagtaggaggagtcggggccctccatcggccatcgaatgtgcttctagagggactcagcagatgccgtgatcatttgctgcgtgggtaaattgagcaatcagagatttgcccctggtaacgtgcgacacacctcatactaggctcgacgaaacaggaataaagccttcggaaaggaacttgtccgtgtgcaaggcttgtaatcttgatagtcaagcgagtgagatgtaggaactgtgtggagagtttctgagcatgtcattgaagtgctacgtgtaccacctttggtagtttgtgtcaaagacgccatgttacactactctttgaagctgcaacccttatcaagtaacagtgctggttgcgtcacttcgtgggcataccggtaaagaaccgtgccatgtggcaggacgaaacttggtggctagtagagatctaggtgttggcaatcaggctctgatcttgggccacggggtcttaaccgagttaaagacgtgattgacctgggcaaacacacaaagggcttggaagaaac

SEQ ID NO: 535700 - DNA, 357 bp, Homo sapiens
tgggcgaatcacctgaggtcaggagtttgagaccatcctggccaacatggtgaaacccatctctactaaaaatacaaaaaatttagccaggtgtggtggtgcctgcctgtggtcccagctactcaggaggctgaggcagaacagcccagaactcctggactcaagcgatcctccagcctcagcctcccgagtagctgggactacagcagcgagattctgtctcaaaaaaaacaaaaacaaaaaattatgttagtaagaatttcatagttgcagctgagagaaagtcatcttaacctaccttaagcaataaaagatgatttatcatagagtctgatgtactaacagaattggagaacc

SEQ ID NO: 535701 - DNA, 368 bp, Homo sapiens
cgttatcttacttttgagacaagttcagtgtaaaccactcctggagtcacaaaagccactcccagatgctgtacttgaagaactacgaataaaacagtcatgtccaacgtcaacgctcctgttccacgcttggccagtggcctggcacatgctgtatcaatcccaaggaatgatgcagcagctgcagagcatgtgttaccagcaacagcagtctacgacatctgggccattccccaaccgcgggccagatctgggacgctgcggcacagctctccacacgtcctcgtccgcagcactcagcccactcacctcttgccattctccacacacacggtcctagctcattgcgccttcacacccattatcca

SEQ ID NO: 535702 - DNA, 786 bp, Homo sapiens
gtgtgccgtggtggtagtcctgccgtcaccggggtgttgcgctgggggcctcccttgtcttcgtccgtggtgtgtgcccttgtgtgctgttggccgttgccgttgtgcctttgggacggccgcgttgacgctttggtttttcccggtgcggggggcttgcgttaagtctgtgtgggatcgtgggggccgtgtcgcgtgcgagatgtctggatgaggcggcggttgtcttcgggtagcagagcctgttgtttgttcctcttgaggcgcccgtcgacgcagaccccctctgcaaccccggcctcacgcatttcccatccttgaagggtccagctcataggccggcccatgtgttccggtttacgcgctgctttgtccctagcctggtaggggagctgtcccttctagggccggtaagtgtaggcacttcacacgacataatgtgtccctgtgcggtcgcgtactctaggagcttaccccgctgtctagctgaggggcaatagatccttactgtgtctagagcatcacatcgccgcgtccgtggagtactgcgggtctcgggctggcacagaagcatgatgacgaaagtgctctccgttacaagtgagctagcgagtgcgtgagatgcggcagagctcttccgtcggaggggcgaacgagctctcaagcccagagggatctgaccaggaaggttcaccccccctccacccaggaagccctgcagacagtatgtgtttataggctttgctggccaaatggtctctgccgcgactactcagctctgccata

SEQ ID NO: 535703 - DNA, 245 bp, Homo sapiens
  misc_feature (64)..(65): n is a, c, g, or t
tgctccgcgcccagaaccagtttcgcgaaaggggggagggctagtggtactgcccccggctcanngtctaccaacctgaaaaatgaaacttgggagcctgtttgaagcaatgaagccataagggcaaggccctgatgcatacaactgggtccttgtgagaataggaagatgccacagtgcgatcacaggagaaggaccatgcgagaatgcagcacgaaggccgccatctgcacgccaaggaaaga

SEQ ID NO: 535704 - DNA, 939 bp, Homo sapiens
ggggatgtgcccccagccctctattctgcttcgggggtcagtgatagtgggctcgggagaaaccaaataatgtggccagggtgtggtcgttacccacaacaaagtgaaaagcccacttgtgtttcatatagaggaatcaggagttgggtggggctttatgtggtgacataagtgttctgtgtcatgacagtacaactaagtgttcctggagtgtaatccatgctagatagttatgctctgtccactaatagagcctcgtgcgaatggaaagatattttcatatttgtctgcattaaaattcataatacgatggtgtgagatgtgtgtgagactgactgacgagtgtgagacgtattctacgtagaacacagtgtagctccactagacaaattctggtggacagagtcggttttcttggaggtctgaacaggttgagtcattaaggcagtagtctgacaagaacagcatggtaacatagttttaagcaaaactgatgacgtcaggaaccttcgaggaggattaggttccccacttaggattgtaaggagtaaaaaggggtgagatatggcctttaagtgccgtctagcaattcacttgggtttgggacatttgctggtgtaatgctagatgcgcacagcgagataatatcgtaccttggtcaacgcgtagcgtaaaactcgctggttatctcaagcaagcccttgccccaagagggtaggtgggcacctggactgacacatcgcgtgatgccctctgtaccgatctcagaggataccgctctgagagaacagtcaagtgcacgcaatgggcgggacgttccactcggaacacgactgagccggactgggtcacggagcaagagaaaagcagcaaagggtgaccacgacagcacaaagggggggaggaaccacatgctggcaacggaaagagagaaacacg

SEQ ID NO: 535705 - DNA, 362 bp, Homo sapiens
ggaatcgcgccctgctcttggttacggatgccccggctccctggagttacaggtgcgaggtaatacttttaagtaacactggccgggcgtggtgctcacgcctgtaatcccaggattttgggaggcccaggcgggcggattacctgataacaggagttcgagaccagcctggccaacatggcgaaaccccgtctctactaaaaatacaaaaattagccgggcgtggtggcgggcgcctctaaccccagctactcgggaggctgaggcagggagaactgcttgaacccgggaggcggaggttgcagtgagcggagatcgcgccactgcactccagcctgggtgacagagcgagactccgtccc

SEQ ID NO: 535706 - DNA, 213 bp, Homo sapiens
ggtacctgaggagtacagagaaacttctcctctgtagtgaacatgcgtggctgtgctgaggctgatggggaaatggggctggcctccccccctgtgctggcacctcccgaggcagggcagcacgcggagccgaggccgcggccgtggtgacagctgcttttaccaaatgaagcatcgaactaaggcgactggggccatttggactgaagcccg

SEQ ID NO: 535707 - DNA, 374 bp, Homo sapiens
  misc_feature (19)..(19): n is a, c, g, or t
ctccagcctggacaaccangggcaaaactctgtctcaaaaacaaaaccaaaaaacaaaaacaaaaaaatagctactataagaattcacctaaaatacagtatcacttgctgcttcctcccgtttatcagctgtacccagggtttattgaagaccagtaaatgaagtggtggatgcaataaaatacagacgcagaaaagggaaacatcgctaatcaaaggcagaaaatcagaactaaccatctttttaagatttaaaatgtttttgttttaattataactaagagttgcattaccaacccattataactgggtaggagtcactttgattatagataataaataaataaacttaatgatagccaaaagggggaggg

SEQ ID NO: 535708 - DNA, 212 bp, Homo sapiens
gtatgtgcctggatcaccgctacgtccaaatccaggtaaggacatgaccaaaccctgacgctacagaccaatatccttgatgaacatagatgctaaaatctttgtaattgacaaaatactagctaactgaatccaacaacatatcaaaaagataaaccaccatgatcaagtgggttttataccagggatgcacggatggtttaacatatgcg

SEQ ID NO: 535709 - DNA, 171 bp, Homo sapiens
tcaacgctttatacttcgaaataaagatatattcgaaacaccagaaatgcttctatacaaacgtaggtgctcaagatttgtggagagaatgtataaatgacagagtaagcattagtctgaatgatcataactttatgctgcgataggcagaaacaaaaataaatctcgaaa

SEQ ID NO: 535710 - DNA, 1317 bp, Homo sapiens
  misc_feature (772)..(772): n is a, c, g, or t
agcgggcagttgccagtcagtccgcccgtcctggagcccggctcgctgtggcagcatggcggggtcgccgctgctcggtgtgcgggcctggtgcgtgcctgggtgtgtgccgtctgggtccttttctgtagcatgctgctgatcggcgtgtttcaggacagccctcctgtgctcttgagccgctggcgttaacggagtgcctgttgcccataagcggcagagtctacaggaccctttgtgtttgaaactgggggccttcctcaggaccgggttaccgagcgcgggggcacgaatgggcgccccgaagagttgatgaggcagcaaccgcggggtgacctgcgcgtgcacatgaaggccctagatgagcctgggggccgcctgggagcggccactactagcggtggtgaagggagcccggagaccgttcacacggaaggccgcagggcaccgtgtagcccttataaggcggcaactaggagagaggtggagggcggtccacagggagggcgccgactaggttacccgttgggtgggccacctgttatggttttgaggcccgcttctttggggggggcgcacacccccgccgggtgagagggcttccttggggataccgcgggggcctatggtgggcgcctttgtcacgataatgagacgtgccccactggagagagcgctccctatggagaggcgggcagggtttctagcctataggcgggccgtaccgattgggaacacctcgggatgggcgccccgcccttattttaggccnccgtagttgcgcgagaagccacaattctgtgctaaggtgcagccacagaccaattttggttgtcgcgccgccagaagaagagaccccaccggcgttgatagagacacaaaggcatctgggggcggcatattttgttcctcacaaatgtgtcaacaagaggggagcaccgcacacgagagaagtagtataaccgccaagataggaaaaaacgggggcgccccccttggagatggtggcgacccacctgggcagcaaaccacaatgaggtaggaagaagggtgcagcaacgcgccgaaaagcaaattggaaagcgacagcaccgctgtagataacgaagcgaatgcgacgatacaacccaccacgcgaaagaggcttcggtgattagcacacactgcgggaggcctatcatcacgcgagagagacagaagacaggccgagaaaatatttgcgctttgaggacaagcgacagtatgcgccgcgccaggaaagacgaatctcacctgaagagggacgagaaaggattagtgttgtgagggcacacccca

SEQ ID NO: 535711 - DNA, 841 bp, Homo sapiens
agcggatcttggcttcccggggaaaggcggcgtgaggggaagaagttgtagggtgggggcaggagtgaggaggagggaagagagagggggaggaggccgcggcgtgggcatgggcggggcactgcctgcctgcctgggttgctgcgaagtgatagtccgccgaccgagcctgctgctttcttgctactgcttcggcttcccggctacccctccggacggtgtagaggcgagccagtctgtggatggtcagatagcccttgtttcccgccgccaatcttctggcccatgagcagctacggtagcagactggctgtgcagcatgcatgcagcaggcgaggaggaagatggcgggacggctgccggcctgtgtggtggactgtggcgcggggtatacaaagactaggcatatgcgtggaaactacagtaaccgcagtttatcatcccttgcctgtattgctagttaaggagtcagacaaaagtgggtgatcaagctcaaaggagggtgatgacaggtgttgatgacctagacttcttcattggtgatgaagcaatagaaaaaccgtacatatgcaagaaagtggccaatccgccatggtatacgttgaagattgcggacttagtggaaaggttcatggagcatgtgatctttaagatatttaaagggcagaacctgaagacccattatttgctttcgactgaagcctcccattgaatactccagaaggaccggggaatatacctgtgaaataatgtttgagtccttcaatgttccaggacttgtagcattgctggtgccagggctggttctttgccttaggctgcatcttgggagcctccagac

SEQ ID NO: 535712 - DNA, 305 bp, Homo sapiens
aagtcgactcttagagttatcccctgtccaaagcgttaccaagttactcaggaggctaaggcaggagaatcgcttgagcccaggaggtagaggttgcagtgagccaagattgttccactgttactccatgtgctgggcaccataatgaaactctgtctcaaaaaaaaaaaaaaaaataaaatatttgtgtattttgtacaccaggtgattattacaaccccataaaaaaaaacaaattcttgttctttggccgcaacatagatggttgtgtatgcaatacccctaaacaattaaccacgggaaca

SEQ ID NO: 535713 - DNA, 306 bp, Homo sapiens
atcactatcaatgaacttatacccgagggagatataggtatgtcttagactccgacgtgtgcatcggaaggagatagagctagaccgacatatggtggctacctgctcatagcttccgggtcagacccaggctagatcgagccatatgaaaacaggatcctcgattctacccgagtgtcactgataaatgaagacaggaccctatcaagtgtgaaatacgggaccgatagggtggcatccgaagtgatcgcagtcaccctgaatgtcctctatgtgcccagatctccccagaatttatcctacatt

SEQ ID NO: 535714 - DNA, 814 bp, Homo sapiens
aataggaaaggagtgcattagagcgactcccaagtatgccttcaggactcagtttactccccgattatgaagatgaggaggaggaggaagaggaggaggaaggagatggggaaaagaaaaaggggggacgccagcaagccgctctccgacgcacagggcaaggagcacttcaggtttccgtcttatcaccggtgaaggtagaccagagatagtgtgcttgctccaaactgatatattcttttagctactaatccctcctcaatggccccctataatgtcctcatttcagggtcaagttgatgaatgcagaaatacattgaaaacagtggtggacaggacgagaaaacatccgcggaagcgttaccggaacggtctctgttggatcgactccctgagtgtagcaatgcaaggacgatacgaacacggattcgactgcctccagagaaacgactcagattggacaacacgaggtgggaccgacacttgccagacaaggtccaatgagggcatggtcgacagctatattccgacaggcccaatacgttgaccgacagagcgagtgagggagcgggaccgggttggaaaccggagcaagccattggggggcagatcggaatgtagcccacgattagcagtgtgttaacccggaacggtgggtgggaaacagagcctaggagtaattcggccccaggcattgaacacattacaaaacaataatcctttaaaagaaaaatcgctgcaccccataaacaagcaacctgccagaacaaagggccgaaccgaggcaatgccggaccggcgaaccatgcaggcg

SEQ ID NO: 535715 - DNA, 422 bp, Homo sapiens
acggcacaatctcagctcactgcaatctctgcctcccaggttcaagcgattctcctgcctcagcctccagagtagctgggattacaggtgcttgccaccacgctaggctaattttgtgtatttgtagtagagttggggtttcaccatgttggccatgctggtctcaaacttctgactccaagtgatcagcccacctgggcctcccttctggaattacaggcgtgagccaccgcgcccggtgaaatatgagcagggatctttacggaactgctgaacggacttgcaattggctagcttgaataatttcagcaggcccttgtgtctagaggctatccctaggtgtctagtgcctggccctagggatgatttaggaaggaggattggcccagagcatgagtgcctggtagaggaggtgacctggc

SEQ ID NO: 535716 - DNA, 202 bp, Homo sapiens
tgtttcacgctagtgccgcgatctgactctgctgcgtgactccaccctagtgctgtgatctgactctgcccgacgtgactccacccctagtgcctgcgatctgactctgccctgcgtgacctccacccctagtgcctgtgatctgactctgcccgacgcgacctccacccctagtgcccgcgatctgactctgccctgcatg

SEQ ID NO: 535717 - DNA, 380 bp, Homo sapiens
  misc_feature (145)..(145): n is a, c, g, or t
agctcccactgggttgcagtcactgccagtcagaaaagaagctttagatgtcaactccctcaaatttggctccaggactgcacaattaacctggtactcacattcagggctttgtcactaagtggaagggcaaaccacatcccangtcccacgttggttcctttattctccgtgctctggaaccaccgtcctcctccctggctcctggaaccaccgtccttcttcctggctctggaaactggctggaaacggcaccttccttcgatctgggctttgggaaccacgctccttgcttcctggttctggcagcctggcctcctttcttcctggctcctggaacctggccttctcctaccttgccggctctggcaaatggccaa

SEQ ID NO: 535718 - DNA, 163 bp, Homo sapiens
gatttaattgttattcctaatgtatctatgaattaatgttttataaggattttctataaccatttataagtattttcaagcctggcttgttgcaaacaatgtataaagcacttaggcaataataattacattcagcaactatcatcatcggtaagctttccag

SEQ ID NO: 535719 - DNA, 868 bp, Homo sapiens
  misc_feature (22)..(22): n is a, c, g, or t
  misc_feature (101)..(101): n is a, c, g, or t
  misc_feature (105)..(105): n is a, c, g, or t
  misc_feature (113)..(113): n is a, c, g, or t
  misc_feature (141)..(141): n is a, c, g, or t
taggcttacccacagggggaanccattttattgggggcttttagtaacaccggtgttttctcctaccttacgtccttctttccttccttccttccttcctncctnccttcctncctgacttccttctttccttccctcctncctcctatttctctctaactccttctgccctctctctttcctatgccttaggtgcatcccacattctgcgtttttttggggaaatcctcgacaggtgcaggaaaattgtgttattgtaacaatttaccgttatctctctttcacggctctccatcagttgtgaacatctattggtttatcccaagtcactaagcatattttcattaggtaaacctgtttttccttctacagctgtttctggagtatagggtcgcatactcataaacccagtgtaactcagaaacgcatctaatattccagtaaacccatcataacgttgaaaaatcgtaaatcaaaccatcataagtcacggtttgtccgtggatatgggcgtcatcaattccattgtattcagtaatgctgtacaccattaacaatggcagactgattgggagtggatattgatagcattataaaagtcagttattagagggatacttctttaacctgactgaagaactgatctaatggctttagtacagtgcatgattatgtgcgatgttttgagacagagtagtacatttgtgaatgaaattttatggcttttttttcacttagtaggaaccattgtgtgtggaaaagtgagaaaatggctttctgctgtagggtctggcattcattgtagatgtaagcttatttttctgtgagcaaatcttattcaataaaatactactctttatactaaaaa

SEQ ID NO: 535720 - DNA, 1219 bp, Homo sapiens
  misc_feature (22)..(22): n is a, c, g, or t
  misc_feature (101)..(101): n is a, c, g, or t
  misc_feature (105)..(105): n is a, c, g, or t
  misc_feature (113)..(113): n is a, c, g, or t
  misc_feature (141)..(141): n is a, c, g, or t
taggcttacccacagggggaanccattttattgggggcttttagtaacaccggtgttttctcctaccttacgtccttctttccttccttccttccttcctncctnccttcctncctgacttccttctttccttccctcctncctcctatttctctctaactccttctgccctctctctttcctatgccttaggtgcatcccacattctgcgtttttttggggaaatcctcgacaggtgcaggaaaattgtgttattgtaacaatttaccgttatctctctttcacggctctccatcagttgtgaacatctattggtttatcccaagtcactaagcatattttcattaggtaaacctgtttttccttctacagctgtttctggagtatagggtcgcatactcataaacccagtgtaactcagaaacgcatctaatattccagtaaacccatcataacgttgaaaaatcgtaaatcaaaccatcataagtcacggtttgtccgtggatatgggcgtcatcaattccattgtattcagtaatgctgtacaccattaacaatggcagactgattgggagtggatattgatagcattataaaagtcagttattagagggatacttctttaacctgactgaagaactgatctaatggctttagtacagtgcatgattatgtgcgatgttttgagacagagtagtacatttgtgaatgaaattttatggcttttttttcacttagtaggaaccattgtgtgtggaaaagtgagaaaatggctttctgctgtagggtctggcattcattgtagatgtaagcttatttttctgtgagcaaatcttattcaataaaatactactctttatactaaaaaacaaaaacagtggtgatgtgtggtcattatcctcagcaaacttatccagggaaagaaaaccaaacgccacaactcacttataatgggagctgaaaaatgagatcccatggacacaggaaggggaacaacacacactggggccttccgggagacagagcgttaagaaaaacagctactgcatgctgggcttaatacctaggtgatgggttgacaggtgcagcaaaccaccatggcacacgtttaccttagtaacaaatctgcacatcctgcacatataccccagaacttaggaacgaaacgaaacaaaagacaacgaaaaagcaacagcaaaacccaaaaggggtaccgagc

SEQ ID NO: 535721 - DNA, 326 bp, Homo sapiens
ccagcaaagaggattctgtgctgtaccatattttaatattcctgttttgaaagaatagcagagagaaaatgggaggcctgctcagagattgcttagcgtggcctcggcgaatgctacaggagattgaactcatacgaaaacgcacagccatcataggttccacagtacattgcagcacatttagcttgctagcctaaaaatctgatcatgctgaggttcttttaaagaaaggtaatcttagaacttcaaactagaaccagtttgaacctcaagttgaccgttgtctgagtagtagaaatctcttcccatttgcaaagatttttcaa

SEQ ID NO: 535722 - DNA, 444 bp, Homo sapiens
  misc_feature (289)..(289): n is a, c, g, or t
  misc_feature (382)..(382): n is a, c, g, or t
  misc_feature (411)..(411): n is a, c, g, or t
ctctgtccctgtgttcctgctagtccttggaagtgtgggagtagctgctgtaacctggagaaggtatgaaccttacccatactttctcccaagacgtgcctctcacctggacttgatgtcatttttagagggaaatagtgtatctgctatggggaagacaaatcatggaaagccatttctctttaaaaaaaacatgctaagtacaagaattctctaagtacctggaaaatttaatacacctgtgacagggctcagggtttgaatgattagaacaggggattagcctgtncagggacctttgtattgccatttggctctatctgacacctggtatcttcattctaaaaggggtcatgcttttgggggtggtattgcggtatgnccatggaagttggtaatgcatgtgttgangcaagggattattccaagctaaacttgttctca

SEQ ID NO: 535723 - DNA, 112 bp, Homo sapiens
cacgagcgctgcggccgaaagtggcggatcagaccctgcacaggccaggcggcccgtcacccagagcacaaatcgtatggccttctatcttgcttgctgttctcccacagga

SEQ ID NO: 535724 - DNA, 220 bp, Homo sapiens
gcagctatacaccacactcatcctggaaatcattatcttaagtgaaacggagccaggcacagaaagacaaatatcacctgttatcactcctaagtgggtgctacaaaatgtgttcacatgtgacatagacagattaatggacatagaatagataactgtagacttcgaaagggtgagggagctgggagtagcggagacatgactgagaaattatttaagt

SEQ ID NO: 535725 - DNA, 1043 bp, Homo sapiens
  misc_feature (381)..(381): n is a, c, g, or t
cgccctcataatcatttgcctttatctgcttcctaagtccgtgtatgccctttctcctgaacactgcacaatcaaaagctaactaatactaacatcctcgagacgctcgaggaaatagaaaccagtcttgaacgtgatcctgcgcactgctcaatcatctctgagtccttgcatcagcgcttcactcgatccgctacgcatccttttgacaataacacgacgaggtgcaatcgatcccttccgcgttacgcatcaatatcgaattggcctacctagatggtacgtggaacctgacgagtgactacctgagctacgggcaggactaaatcttgcaacttcgctacataacttccgcccgattgattgcctgaggcaaccgangtgcggaatcgtggcggacgtcctatggctgtgtgacaagtcggacgtaggtacgtcccggatctcgaaagccccacaatgtgcgtcattacatacattaacgactcacgacagaccgtcttggcacctcccattgagcctgtctccgcacgattcagcgcgttcacacaagactcagatagccaacttcaccagggacggatctagaccgagaaccgacttttgcaaccggctaacgagcggatcgcgaggcgcgttaattagctaagcaggggaccgaatggcctcccttgcaaaatccgtgggttgcggaagccaaaatcacaacagagtttaccattggccctctagtacagttcccatagcaaatttaaatatcgccccgttaaaccaagagtcttctttggaaccctacagggcgcccccagttactcttaacccactaaatgaggcagcccgcgcccgttcatgaatcccccgactgcgtaaggaaaggccccgcgaatccaaaacaccagaatgcaacagcagcaggaataaggcgagaacagacgcgaggatgactcggagacaccggaacacacagcaactggaagacaccggagccgacacgggtggccgagcccacaccgcgaggaatgccctctgaagccgtgatgacc

SEQ ID NO: 535726 - DNA, 117 bp, Homo sapiens
atagaggatctgatcagtgcaattgtgctgggtgcaggaagtgatctccttctgcatctgtcggcatgcaggtacatggtggtgcgcagaagcactgtgttggcgtacaggtctttg

SEQ ID NO: 535727 - DNA, 312 bp, Homo sapiens
  misc_feature (111)..(111): n is a, c, g, or t
cccagtgaacccactggggaaacgggcttttttggaaaactcaaaggggctagccccctgattcaaaaaaaaatttttcaggttggttcattcaaggtaaaattttcattnaaaaccccttagggcaagtttaagctttttaaaagttagttttgagaattgagacccaaaactaaaacggtaggaattggggaggccttgacttaaaactttttttggactgggattccccttgggggggattttggaaagggaaacttgttaaattttttgttaactaaattttttttttaaaaaaaagactttttccca

SEQ ID NO: 535728 - DNA, 441 bp, Homo sapiens
caatgtattagaaaaaaaaagaaaaaaaaaaaagagtttctggatttgggagcatttcagaatgtcagatattgggatgggggatgctcaaagtatatagtttgggagtcctttgggccccacggaatgactccggtaaactcagatgctgtcttaccaaccggtttggcactctccggattttttagtaggctatttaaacgtgtgaattcacttaaaaagcttaaagatttccatgaagaaaatagaattggccttcattattggggtttttttccccatcttttaattccaggcttttagaacagtcaaaagaggtaccagggatctccggttatacctttcatctagagtcactattaaggtcgggccatgttgggttttctctatacacgagtgtctatgggtatgcatctgtatacgtgtacttgtatgtatgtg

SEQ ID NO: 535729 - DNA, 441 bp, Homo sapiens
  misc_feature (49)..(49): n is a, c, g, or t
  misc_feature (79)..(79): n is a, c, g, or t
  misc_feature (83)..(83): n is a, c, g, or t
gcagcatgtagcccagtgtctgagtggttgccgggtctccatggagaancggctcgccagtgtcccaggctgctgagcnctcnccgcccgagaccccgcggcgcggccgcagggccatgctagccttgcgcgtggcgcgcggctcgtggggggccctgcgcggcgccgcttgggctccgggaacgcggccgagtaagcgacgcgcctgctgggccctgctgccgcccgtgccctgctgcttgggctgcctggccgaacgctggaggctgcgtccggccgctcttggctagcggctgcccggtataggacaacggaaccacggttcggtcgctgggaatgccgtttcctagcgatcggccggaccgtactccggtatcgaagctccggacggccttcgtgggccgctgatcactgttggactgtgtgtccctattgctctcg

SEQ ID NO: 535730 - DNA, 169 bp, Homo sapiens
accacggaattgggaccatgtgtcggcgctacacacagatcactcgatgatgccggcgggcaccagctacgatcggatccgacgggtcaaggtgtctgagttggcctgcatcaacacgcgtgcctgacgggcactgtcggcgtcatcaacgccatgggtacccacctct

SEQ ID NO: 535731 - DNA, 584 bp, Homo sapiens
cgaaattgcaccttatacgtccataggaaagattgcacctgtggaacttcaatccatggagctccagagccccaagtctccttaaggcctgatcatgagagcgttgcgtccgagtctcaataccctgtatgctcccttctgcaggcctgttaccgtccggttatatacccgaatagctacagatgcagcaatttgtgggatgagagattatgcctgatagggactcgagcttgcagcgcaggaaccgaagtttatcgaaacactgtgaggatgaagaaatacaggaaatgtaaagtggagtgcagacacgaaagctcgaagttcatgtgtgtggaaacctgactttggcttccaccagaaaagaaggctgttttggttccctgcctcaaggccggccatgtgggagttgtatctgtggagttcattgccctcagtcttggagggagacgtatacttcccattgggggtcttatctcacaaaggccagcaatttgggtctcgggtctggtgcagtatcatagtagatcctttcccctccgaagagagcctgataacattgacaagggcatgatcatgtcagcaaa

SEQ ID NO: 535732 - DNA, 839 bp, Homo sapiens
  misc_feature (711)..(711): n is a, c, g, or t
gggcacctgtaatcccagctactcaggaggctgaggcaggagaatcgcttgaacctgggaggtggaggttgtggtgagccaatatcatgccactgcactccagcctgggtgacagagtaagactccgtctcaaaaaaaaaaaaaagcattaaataatttatattacattcccaaattattattaaaaatttggagttgcctttggcagtggggagtggtttccctaaaattggcgttattagaatttagggcacagaattggtgtgttaaggtcctggaaatcgggcttaaaatacaggggatgtattgtaatgggaattatgaggcataagtagccagtatctataagttagaatctacaagggcctccttttgggcaccgggtagactagaatatacctggttatggggggccttggagtggtaatctctcagggcgctagagggtggctggtttcaacgcacaattttagactagggttggaaccactcatgggtccacctcattggggggctccatgtaaaatttcactactttcagtccacaaggccactttagggaactctagggaactggcctcgcggctcttcaagacgtaataagcgatggtcctgggggcatactggagggaaacttttttccacacccttcgacttctactggtacctttgtgggtctccttaacgcaccaccggtttggcgccatcccnctagcgtggtctaattttggcccaacgtaattatgggggggggcctctaattccccagacatatttttcctctcgcgcgtggcactcacggctcgtacctcatctaccacaaaccacggtcaagcgga

SEQ ID NO: 535733 - DNA, 127 bp, Homo sapiens
aggcgattactggaatgacgcaggcccgcgcggcaggtctggcctactggcgtgacggcgatcctgtcgaagaggtcgagcagaccggtgccgcgccgtctaacccaaacaagggccgcatctatgt

SEQ ID NO: 535734 - DNA, 381 bp, Homo sapiens
ggaaaggtcatactctgccgttttgtctcttaatgcatttgcctgggaagttgcatctccctggcatctgcattcaattaacactttagtgcaataggtgtggaccatcaggaaatggcgtctccctgaccctaggtgccaatgtatgacttttagagaggcaatgtgataactgctgagccatcacccaacattcctggtgggtgggagaagagccctttcctgccctgctcatgctgtctaatggcctgtgacagcatgactttagtaggctttgggaaatcaagagttttgaagattattggtaaaataaagacatttggttgaaattaggtcagacattaggtttgctaaatgctttaaggtaataaactgcttcta

SEQ ID NO: 535735 - DNA, 298 bp, Homo sapiens
ggtgacggtggcttcttcgtggcttgttttgtgggcatgccgcccatctttatcaccagaatgaggaactcctggaagttaactgcaccatcaggtgttgactatccaacgtctttgagaccagaggtctgctaccgctttttcctgactatactgacgtgacactcgtgtctctagcacgtttcttcaaggtctagtccctgtagacaggcacggaaattccccgtttatcgagggaagtgacttgtgcgtagacagtcagatccataggagttcacaggcattgtctcaagcccac

SEQ ID NO: 535736 - DNA, 184 bp, Homo sapiens
gacagtcgacaccaagacaatcccactatagaaaaaatcaccaagaaaaacacatggacacaagaacatcactaaaagctcaggcatgaggtaagaccaacaatagtggaaaaaaccctatgtccacaagtctgggcaaggtttacaagattttcccacgttagttctcatcaagccttcccta

SEQ ID NO: 535737 - DNA, 428 bp, Homo sapiens
gagggcagccagcatggcacctggatctgatcaagatgaagttttcatccccatctgcctgttaatgtcttctttaccagttgccaccccctaataaggggtatgccgtagactggaagtcactagggacctgcccagcatcctgttctaggcattgactaatccactctcctacatcctgcctcccatccacatggtccaatcagaggctgccatgcttgcacaatgtgacactgtctctatggacacattaattggtcctgatgtagaacttgacccaagatcagggtcaagttgagagaagacttattttctttccaggtgtttcaataacatgtaaaacttggaattcgatagcagccatcttctgccatgagaattgggaagagagaaagcctatagtgataataaagtcaaattatcctaaa

SEQ ID NO: 535738 - DNA, 953 bp, Homo sapiens
agaacaagagaggaaaaaggagaggaatcgatgtatagattatgataggaaaaagaagagacaaagatcatgggaacgtgaactaggataaagaagaaaatgaggaaagaataaaagcggaacgaaaaaggatttctaatgtgcaagtagtctgggcatgatcagattgacataaggaagatcgagtaaaggtagatagaacagtttccatagtgagctaggttctagtatcttgattgacaagagtcgaataaggacgaatgagtgtcgtagaagcaggtataagtatagtaacaagtacctatccatatgatagctagaaagagatattcacggctcttgacttgctagtgttggacaaggagcatgatatcctgagctcatcgcagaggacagttagagcataggacaaacgagtgggtgtagagaatgcgctatatagacatagggtcgagatctggagaaatccggttggatgaaacagtctcatacaggtgtactggggtagacgaaaggcgaacgcacgggaagaatctatcatatgttgctaaagtacacccgtattcaatacggtacgtatgacttgtgttgataaggtaatttcggtcatgatgtgttttaagaatacaagagttgtaactgatatttactgtcaacagattgaagaagtgtcgcttgtactactctctgctttaatataacgtacagattgtggtgagttgtataacataagtccatagtcttcactagtgttgagaaaatccctagtagtaatattgtatattattctcaaggattgtgctacgattgtgagatgtaacatataccatttccattgtatagattcaagtctttgtccctgttagatttcagatcatataatccctctcccggttcgtgctacgctgaggaatgattgtggcacgagtggccatgatggttctttctaacag

SEQ ID NO: 535739 - DNA, 611 bp, Homo sapiens
  misc_feature (490)..(490): n is a, c, g, or t
tcaggttggagggggaatgctggaaattgtaatgggtatggaaacatgtcactataagtaatgctagggtgagctggtaggaagtttttccataggaggtgtataatatggccgtagcggaatcgggggtatgctgtccaagaattcataaaaaccaccgggaggttaaaaacgtagggtcttggtgacccacactactgtcgtgtaagagtccacggggacacagtgcgtcatatgtggtccctaggaagatgtgtactggttgacggcgtgttaactcataaacaatgcgttcagcggagcgaatacccgcgctcattgaaagaactcacggcgcagacagggcgccctcgcaggacgtaatcccagcaagacgtacgagaacacgccctggacgacctaacgtcccagggagccccccgcccttacagcgccacacgggtccagcaacaccgggtgactcgcccgagtaagcgccctcactacggcnacacgtgcggcggcgagcaatcacacctacacacatcatcatggggcccaacgaggcccgcctgacaagggcacagagacgtcacacacaaacaggggtcacccactcgtaagtaatacag

SEQ ID NO: 535740 - DNA, 1087 bp, Homo sapiens
taaaaaaaaaaattaataactcttgtttcggtttagcgcaaaaaaaaaaaaaaaaaaaacaaaaaaaaaaaaaaaaaaaaaaaaaaaaaacgaacagtaagacagaaggacacagagaaatgaaaccacaaacttcgagaaccggaacaagctataacgaacaggagccagcaagtgccacagagagaagacaacgcaccacagcggcaaggcaccaaattatcccgtaagccaagtagcagcccgcccgcctgtgccagggcaacacagcggagagggccgagggcacgcccgacgaggctcccggcaggcgtcgacggtgacgaatcacgcgtcatcgagatgtacctgcgggcgaggacccgcacaggcagagcaggcagacacagaacacaacgggacagcaaagcgtggggcgcgcagcccagggcggggacgcacaccgcgctgacacaacgcagtcgggcgaggcagggcgcgaacgcctcgctgagccgcgcggcgggcactaacacgcgcgggaggacgtgaagcgttggcggagacgggagcggaacaactgaagctggcaccgagcacgcgcatgcacgccggcggcgcacaaggagcagcccggcgcgtgggagtccacacagcagagccacgcaaggatcacgtagttagcgatactaccagtgtcttcgttgcaacggctgcattgtggcggtgcacagccgaaagcatcacaagagtgtacagctcgaagcgaagcggctgacacacacctacaccgaacggccaacgacatagcaatggaccatagccgactagcacaagagcaccagcatgagtgtggacacacgtacaacacttgtatcacgtcatgaacagtcggtgccgggtcacacaattgtacaagcacagtcgcgatacgcgtcgtctcggttgcatagacgacatgagatcacgaggcgctggtccagcacaagcatgcgagcggagccgggtgacgtgcgggagtgtgcagactacgcaggctggcagtaccgctaattgagcgcggcaaaccacgaaagcacacagtacgttgtgcatgatcagctctcag

SEQ ID NO: 535741 - DNA, 308 bp, Homo sapiens
agaatgcgtaacaataataaaaaaaattatttctggtttaaaaaagatctggttccctccagggcgagcaattgcacaaatgtccactgagtctggtccagggatcaaggaagggaaggtcttaaaagataaaagggggggtggaaaacccaatatcagggccccaagttttcgacagcccaaggctactgcattttagaaaacactactcatcctgttggaatcggaggattaaaaaaagtccatgcacgggaggggagccccttggggcaaggtaggaggcgcacccaaggtcctcttgtagcagg

SEQ ID NO: 535742 - DNA, 430 bp, Homo sapiens
tcggcacgagagatatagatagttagagagagatatatagttatagatatcgtctatactgtttttcctgctcatctgtgacttatctctttgttaccaatgtaattcttcatttttctctctttttatttcttccactatattctctgattctctctatattctctcctttttaacccttttcttatggatggctgtccctccccatccatatacttttcctgtgtataccaagcggcctttgctcttctttcttcatcctccccactcttgtttcttcctgccatgtatccctgcatgatacctattcagtgccagttttgcccttacccctatactatacagttttgacctttttctccccttaactaattttttactattcttgcctctatgatcttgcttttttgcttctttcttttctttcctc

SEQ ID NO: 535743 - DNA, 399 bp, Homo sapiens
  misc_feature (304)..(304): n is a, c, g, or t
  misc_feature (320)..(320): n is a, c, g, or t
  misc_feature (325)..(325): n is a, c, g, or t
  misc_feature (352)..(352): n is a, c, g, or t
  misc_feature (354)..(354): n is a, c, g, or t
ttttttaaagtagtaagtttatagaaaatgtttttatttaatggaaggctggggaatgtttagtattaatttctatggtatgtatttccagtggcctttttatttgggtctggaacttttggttcagggcttaggggagaataggttatatggtaatagccatacagttattgcttttaacacagagctatgtgtccccaaacagcaatagtcatgcccttgtccaggctgggatctaattgatacaataggtcgttgactccctcctagtagagctatctaggtttgtctggaaagtttccgnccctggcttataggcnccacncctcatgtactcctcatggcttggatntntgtattcagcctttgttcagtccaataaactttgagtagatgatc

SEQ ID NO: 535744 - DNA, 161 bp, Homo sapiens
gtgcgctgagtggagtgctcctggggcagggacgtgtactcagaccactaggagggcccgtgtgaccacaggtattggcttggcaggtagaaccagcctgctaggcagagggctgtggagctgagccctggtagccaggtactgaggccgagaaagggaga

SEQ ID NO: 535745 - DNA, 412 bp, Homo sapiens
ccaagtagctgggattacagggcccaccaccatgcccagcgaatatttcgtatttttttttttagtagagatggagtttcaccatgtgggccaggctggtctcgaactcctgaccttgtgatttgcccacttcggcctcccaaagtgttgggactacaggtgtgatccatcacacccggccaacttttctttttttttttttttaggagacagggtcttgctctgttttccaggttggtctcaattcctgggcccaagcagttctcccacctgggcctgccaaggtgctagtattataggcgtgagccactgcgcccagccctttatagtttttttcttttttttgagatgaagtttccctctgtcaccattgcactccaacctgggtgacagagagatactccgtttaatt

SEQ ID NO: 535746 - DNA, 306 bp, Homo sapiens
aatgcaactccgactccccggttcaagcgattctcctgtctcagcctcctgtgtagctgggattacaggcacacgccaccatgcccagctaatttttttagtatttttagtagagtcggggtttcactatatgttgcccaggcaggtctcaaactgctgaactcaagtgatcctcctgcctccgactcccaaagtgctgggattaaaggcgcgagccaccatacccagtcttgcaactgctttatacataacccgtgctgccaagttaagacaagtgagatcttcattcccacacaattttgcagc

SEQ ID NO: 535747 - DNA, 378 bp, Homo sapiens
  misc_feature (18)..(20): n is a, c, g, or t
  misc_feature (22)..(22): n is a, c, g, or t
  misc_feature (308)..(308): n is a, c, g, or t
ctcatttgcagcctcagnnngntctccgactcctgggttcaaatgatcctcctgccccagcctcccaaaatgctggaattacaggcatgagtcactgcgtccggctgcttttccatttttcatcgtagctgaaaaaccaggccatacagagataggagccgaggggacacagtgaggagtgaccagaagacaagtgcgagcctcctgttatgcccggacaggcaaccagagggctcctgggtctagcggtgaagccagcgcctgggaagacgcccgttgccaagcggaccatggtctaagcggtactncaagttgcttagaaaaggcaccggttacttagcagaccgggaaagggaatctccctttccttgtggggag

SEQ ID NO: 535748 - DNA, 194 bp, Homo sapiens
agtgactcttttgtctccagtaatgctttctgctttaaagtctatttttattgatgttaacacaaacagtgctagctttttcttggttaaaatttgcctggtacatcctttttatttttattttagatcttcctggaggcggtagtaagcatggcaaggcaagaacaataaataaaagaaataatgattaaaag

SEQ ID NO: 535749 - DNA, 975 bp, Homo sapiens
  misc_feature (446)..(446): n is a, c, g, or t
  misc_feature (449)..(449): n is a, c, g, or t
  misc_feature (462)..(462): n is a, c, g, or t
  misc_feature (465)..(465): n is a, c, g, or t
  misc_feature (472)..(472): n is a, c, g, or t
  misc_feature (476)..(476): n is a, c, g, or t
  misc_feature (478)..(478): n is a, c, g, or t
  misc_feature (482)..(482): n is a, c, g, or t
  misc_feature (484)..(484): n is a, c, g, or t
  misc_feature (487)..(487): n is a, c, g, or t
  misc_feature (506)..(506): n is a, c, g, or t
  misc_feature (518)..(518): n is a, c, g, or t
  misc_feature (520)..(520): n is a, c, g, or t
  misc_feature (536)..(537): n is a, c, g, or t
  misc_feature (545)..(545): n is a, c, g, or t
  misc_feature (549)..(549): n is a, c, g, or t
  misc_feature (553)..(553): n is a, c, g, or t
  misc_feature (569)..(569): n is a, c, g, or t
  misc_feature (603)..(603): n is a, c, g, or t
  misc_feature (622)..(622): n is a, c, g, or t
  misc_feature (636)..(636): n is a, c, g, or t
  misc_feature (641)..(641): n is a, c, g, or t
  misc_feature (708)..(708): n is a, c, g, or t
  misc_feature (752)..(752): n is a, c, g, or t
  misc_feature (756)..(756): n is a, c, g, or t
tcccccaagtcaaagcagggacaaactcggctaccacttcctgatcctcctcttctccaaggtacgaggacattgtcgttgactctgaacatgaacgaggaagaagtggagaagcgctttgagggtcgggctctaccgaagtaacatgtcacggatccctctatgtagggatggtctagccgggtcatgaaacgacagctggtaaaaccgcctaagtagtcacagtgccaggcaacttccaagggcactcaggggcccagtgcattaccttgttccgtactaaggctaagctcaggactgctctacccgttggagcggtggcttcagtctacgttcacaagccacgctgtgggacatccgctttcgatgagatctcctttgtgaacgttgtgctcgtggtacctacttacctacgtcgttcctttgactttgaaattgagaccaancanggcactcagtatnccntcagcancatngngagngnggngtacgggaaactgtttgantttgtcaacgcnanaaagctcaacatcaannaccgaggnttgnaaanagggcatgaacccaanctacgatgaatatgctgactctgatgaggaccancatgatgcctacttggagnggatgaaggagganggcangatccgggaggagaatgccaatgacagcagcgatgactcaggagaagaaaccgatgagtcattcaanccaggtgaagaggaggaagatgtggcagaggagttgacagcaangccnctgccagtcctccagtaatgagggtgacagtgaccgggatgagaagaagcggagacagctcaaaaaggccaagatggccaaggaccgcaagagccgcaagaagcctgctggaggtgaagaacgggcaaagaccaccaatgcctaccaggaggcccagtgtcgtggacacagtgcgtgtggctcaatcgccagcacgagagaagatcagtcaatccggcg

SEQ ID NO: 535750 - DNA, 268 bp, Homo sapiens
agcagctgcagcctggctgttattccaagcgtgtcgtgctgagaagtaaggggagtgtgtgctcatcactgtctgtggtgtggactcaggacgcgccccctggaagcatcgattcggcccgagtcgcttgctgaaggtgtgctctgcggaggggctgcccacccagcctctctatattgaccattttcctgctttatgcaaagtaattggccaagcattgtacaaaagaaggataattaatacactggtttaacccttaaaaaaaaaa

SEQ ID NO: 535751 - DNA, 256 bp, Homo sapiens
tggccggactaagcttagtaggcagaagggggaaaaggtagagcaacttcggtgtaacctgcagaaaggcttcattattttattcaaaatccatctaggtcaggcactgtcatcccagcactttgggaggcttaagcgggcagatcacaaggtcaggagatcgagaccatcctggctaacacggtgaaactccgtctctacttaaaatacgaaaacaaaagattagctgggggtggtggcaaggcctactaagctt

SEQ ID NO: 535752 - DNA, 269 bp, Homo sapiens
ccctgctgcgctgggcctcgggttcgtcatcagcatggtgatgtgcccacgccctctgtgatcctgcccgccgtcgctcggggtcaagctcgagtacgcggtgcgtgttctacctgccgctggcgttgctgcaggtctcattggcggcgcgcttcgccgcaccgtgggcggggccggcctggcgcgcggccggcgcactcggccatgtggtggccttcgtcgtcttcgcgctgtgcctggtgcaggcgcgccggcgctggcagcgcctg

SEQ ID NO: 535753 - DNA, 493 bp, Homo sapiens
  misc_feature (68)..(68): n is a, c, g, or t
  misc_feature (169)..(169): n is a, c, g, or t
  misc_feature (226)..(226): n is a, c, g, or t
  misc_feature (322)..(322): n is a, c, g, or t
  misc_feature (353)..(353): n is a, c, g, or t
  misc_feature (426)..(426): n is a, c, g, or t
  misc_feature (490)..(490): n is a, c, g, or t
agattcggcacgaggggagaaaggacgctaaggagtggggaaatgtttcttggataatgtaactaaangattaaggcgtgtctctacatttgtaaggaaaaaattaataaacgtcttacttgctcattgtcattccagggtgggttttgttgttgttagattgcttttncccatcgacatgtcttggttcctatcttgccagcagttttttggtttgttgtttgtntttgcaggaccgtctcattgcacttgatgctgcagaagagttctttaagcttgctcgtcgaacttaccccaagaagcctggggttccatgcctggnagatggccagaaagaactgcactaccttccngtttccaagtccctaaaggagaggctcaggggcagaatgggaattcttccatgaggactcagcagtcaaccanagttggacaattacatgtagaagagagtgagcaatagagtttgcttagtggaaaatgatactgnatt

SEQ ID NO: 535754 - DNA, 460 bp, Homo sapiens
acatttaaaacgtatcgtcaagaggctgtaatacaaatttcccatctatagagttttttctaaaagctcgaatattatgtattccagccaagaaatcaagagagttctgttgggaactcggacaaaaatttcacacaattttcagtggaagtgtaacaacacgcaaaattaacaagtctctgttgcatcgttgccaggaagaccccagatacaaagcttcttctccacctctgctgaaccccaggagttcaaaaattctagactaagcagtccagcggagaacacagcagcctctcggggagagggaggtgcaaacgtctcagccggttgggcgggaaggggggctggggaacaggcaggggtttcggggcacttacaggtccgtcaacaccataagctccgagtaggcccggtgcagcagaaattcaatgagggtgctcagccggtagcccgggctagc

SEQ ID NO: 535755 - DNA, 226 bp, Homo sapiens
  misc_feature (4)..(5): n is a, c, g, or t
  misc_feature (110)..(111): n is a, c, g, or t
  misc_feature (118)..(119): n is a, c, g, or t
  misc_feature (128)..(129): n is a, c, g, or t
  misc_feature (131)..(131): n is a, c, g, or t
  misc_feature (136)..(136): n is a, c, g, or t
  misc_feature (138)..(138): n is a, c, g, or t
  misc_feature (169)..(169): n is a, c, g, or t
  misc_feature (188)..(188): n is a, c, g, or t
  misc_feature (212)..(213): n is a, c, g, or t
  misc_feature (222)..(222): n is a, c, g, or t
gtgnnctatgctttgagtttgctttctcaacattattgtattttccacttattattactgtataacatatgctagtgtttagttggattaatcttacctaaaagtactgnnaaatgcnntttagtacnntntcatntnttatacatttattttccgaatgtatcattgnataattttattgagttatnaaagtatcttattgctatttaatnnaaaattaanacat

SEQ ID NO: 535756 - DNA, 716 bp, Homo sapiens
  misc_feature (48)..(48): n is a, c, g, or t
  misc_feature (123)..(123): n is a, c, g, or t
  misc_feature (131)..(131): n is a, c, g, or t
  misc_feature (135)..(135): n is a, c, g, or t
  misc_feature (138)..(138): n is a, c, g, or t
  misc_feature (146)..(147): n is a, c, g, or t
  misc_feature (150)..(150): n is a, c, g, or t
  misc_feature (154)..(154): n is a, c, g, or t
  misc_feature (172)..(172): n is a, c, g, or t
  misc_feature (196)..(196): n is a, c, g, or t
  misc_feature (199)..(202): n is a, c, g, or t
  misc_feature (205)..(205): n is a, c, g, or t
  misc_feature (209)..(209): n is a, c, g, or t
  misc_feature (220)..(220): n is a, c, g, or t
  misc_feature (226)..(226): n is a, c, g, or t
gcggatcatggccgcagccgctctggggcagatctgggcacgaaagcntctctctgtcccttggcttctgtgtggtcccagaagatatgcctcctccagtttcaaggctgcagacctgcagcnggaaatgncacngangcctcatnngangccnggcccgggagcccctggngttgggaagacatttaccgaccanatnnnnatngtgnaatggaatganaagggntggggccagccccgaatccagcccttccagaaccctcacgactgcacccagcctcctccagacctccaatactccctgacagctgctagagggcatgaaggacgacacaaaggcaaagacacagacaggtgcgcacatcttacgaccctggctcaacatggaccggaatgctgcgctcagcacaatgcgccatgatgccagccgagtctatcgacaagcctggagctaggctggagtgcatccgacggctcatcgaagtggacaaggactgggatccccgaatgacagcggcaccagacatactatgtgcggccagcgcacatgggaacgagccctcgctggagatgtcacgcagccagggcgcgctccatgacgacaaacactgacccaagagggatgcctacaacacctggaggaatccgagacccgagaaaaccctcactggacacgacaccaaacacaaacataccggagcctggcatgagacaga

SEQ ID NO: 535757 - DNA, 190 bp, Homo sapiens
gcgtccgcatctttatatttttaaaattgtattgctgctcaagaatggtaccctcttgtcaaaaaggcatacattcataagattatttacaatgctgaatgtacaattatgaatgtaaataatcttatgaaaccttttttgattgaagctattcaaaataaaaattttaatgaatgaaataacaaaaaaa

SEQ ID NO: 535758 - DNA, 164 bp, Homo sapiens
tgtggtcgactctagcacggatccccattgcggatagtgtgcagactgtctctggcggatgacaatggtcctctgcatcttcatcttggtcaccacgcccagaggggatccgccctcgaatggacaccttaccagtgaaggggcatttcttgtcaatgtacgtg

SEQ ID NO: 535759 - DNA, 164 bp, Homo sapiens
ccggggggggttttttccccccccccccctgggggggcccaggtaaaagttcccctttggggaccggggggccccccccccccccccttgattttgggggggcccccctttggggtttcccccccccccaggggggggaaaaaaaaacccgggtgttttggcta

SEQ ID NO: 535760 - DNA, 315 bp, Homo sapiens
ctgtgctgcggtgctctgacggtcccgcgctctctcggtgggggtgggctgcggcgtcgttccatggtctgtcagaacttccttctggctgaagatgctcctcacggccactatcaccggccccgggggacacgggtagctgcagccttgccggttcaaattcacccacccatcatcgcggtagtcatgatacggcgggtatgggtatccatcaatcgccatcagggccccaggccagggggcatcaggggcagcaagtaccagcagcagcagctgtccccgatagcagcaagcgtccccacagcagcagcgtcg

SEQ ID NO: 535761 - DNA, 662 bp, Homo sapiens
cttggtttccttgctttcttgacatttgaggtgcacaagatgtggattgtgtgtgttatggtggtgagtcaaagcggagaggagagggtagtaggcgatgtaaaataatccagggcggtggctggggagcttaatacgaatttaggtaaacgaggcataaaaatgggagaaaagaaggagatcgttgacattggttagatgactcaacaggaaataagaaacaaaaatgtgacaatgtgtggtgaagaataaaatgataaaagaaaataaataattatgcattgatggaaaattaatctagaaatagaaaaaaggataaaataagaatatagaagaagaaaagaaaaataaagaaatggaaaaggatgaaacaacgtgacacaagaatgtaatagaacaaaagcaaacatccaaacatgtgactgaacaaaataaatagaacgataatgaatactacaaaatatggaaaaaagtactgtagcattggaatacaggaactaaaaactatcggattaaatatcatggtgttctattggatcatgaaaaaaattaattaatactaaggacacagtacagaacgcaaacaaaagtatataattttatagtgatagttaataacagataatagaccaaaataacaatgaacaggaaggagaaaaata

SEQ ID NO: 535762 - DNA, 750 bp, Homo sapiens
gaccctatggagcttgaactctattaatgcaaacagtacatgctaatacttcaccagtcaaagcgaactactatactcaattgatccattaacttgaccaacggaacaagttaccctagtggataacagcgcaatcctactctagagtccatatcgacaatcgggtttacgatcatcgatgttggagtcaggacatcccgagtggctgcagtccgcatattaaaacggtcacggtgatggtgcaacggatgtaagagtcctaacgttgatctagagttcagactcggagtaatccaggtcgggttctatctacttcaaattcctccctgtcacgaacaggcaaagagaaataaggcctacttctcaaagcgccttcgccccgataaagtgatatcatcgtcatacttagtattatacccacaaccgacccaagaacagggtgtgttaagatggcagagcccggataatcgcataaaacttaaaaactttacagtcagaggttcaattcctcttcttaacaacatacccatgggccaacctcctactcctcattgtacccattctaatcgcaatggcattcctaatgcttaccgaacgaaaaattctaggctatatacaactacgcaaaggacccaacgtagaaggcccctacgggctactacaagaccttcagctgacgccatagaaactcttcaccaaggagccctaaaacccgacagatctaccatcaacctctacatcaactgccga

SEQ ID NO: 535763 - DNA, 326 bp, Homo sapiens
  misc_feature (206)..(206): n is a, c, g, or t
agtatccctttcaaatgcccagaatttgataggaaatgctaacagttttaataaagaaagttgatgccgtctcttgtatatcggtgagctctggatataaagcttcccatccaccctttgcttcctatatcttttacctgtcttatgctatttagcaggctttctggatttactgtcttggaaaggcttcttgtcattgtattcanttccacacttcttacttgtgtctttttttttttgggctcctcacgttttctctcagatttcttcccattctcattttctctggagccccattatagctttttttgcaagacagtttgctc

SEQ ID NO: 535764 - DNA, 848 bp, Homo sapiens
gcagcttctctgcagctcacccaaggctgctctccgccgatgctgctgttcgtaccctcaataaggttgccatgaagcatccgtcagctgtgacagctgtgtaatcgtggatctgcgtgaacctggtcactggattcaaatcgcgcatgcattgtccgacgcatggcccgatcgacgcacgccgtcgccttgaacgacaggcgtcaagcgtatgcagtcaatggcactctgagctgcgccgttcgatgtgccacagcagcaatctgtccgtcacgtctgcagtgtgttcagagacagtgctctggaatgcaacttccataggatgggttggttggtcccaggacccatcacgttggcacctgctgtgcaagaacatgatgccctcgtccgaagacgaacgccgttccgttatgacatcttgcgctgttcagccattggctggcgggaacgatgggtggcttttgagtgataaggcgccggctatcgcgggacctgcatctagtcgagcatcatttgcaggagtaactcacgatgagccacatggatgacgtgggctagtcatcgatcgtgtgctgaggttcatcggatgtgactgctgaggtttccacaaggtgcttgggacaccccgtatttctacatctcctggggcccagagaggggcccaaagaccaccaaatccctccagcaggtacatcccgcgttcactcttataaaccagaagtggtactatgggaggcatgagcgaggtccgggccaggggctggtgagttgctccgtggcgctggtttgagagacccatgaatggaatgagctgttaacccagatagtctctggtggtgctggaagag

SEQ ID NO: 535765 - DNA, 222 bp, Homo sapiens
ggttatctaggggatcaaagcaatgagtctacttctggtgcagaagtaaatttataatgtgccttaaaactgtaatgattggtgattttctttggcttctgtattctacttcataaatactaccaaacggagcacctatcataggtcaggttagccaagacttaggtgatgcccagacattagagtagagtagtatattgcaagaggctgggcgtgcagggg

SEQ ID NO: 535766 - DNA, 219 bp, Homo sapiens
ctgtatgttgcgtgcgttgtactcgtgctgttgtgtgtatgagacactttggagactccaggagaagtcccaggcctgagctgcgagtgccaggtcacgcccttgactgcttcgcacttgctcacctgagatgatgcagcttggaggttgctgatctagtgcgaattgcttgtcgggctagtcggggggcgtacggcagctcgaattctgtaagtcatg

SEQ ID NO: 535767 - DNA, 730 bp, Homo sapiens
ggacaggttggtctgaacaagcagtactcggtcttggtttgagaaaaacaaaaagagccctctctggtgttgtcacttcaaggagagaagtggagaccaacgcccactcacttatgtggctgagactgtctcgcccgccctctggtttgaaacaagacatactctcgtggagagacaacgcaatctggtgtgacagaggagaaaacaaatgcttgatatatattccctcgggtgtaatatagcgagctgtgtgcgtgagctagttatgtgttggaactcacgcggttgcatgagcgatttcacgcgccgctcacagttgaaaagtgcgcccgcgctggaggttgtattcggaagaatatgttaaagaagttctccacagataagttttggctgaggagcgccctgcactaattgctcttccattgcggaggaacactagggcgtggggacaatttctcactgcaagggggggacagcgaagaatggtgtgtgtgtctccccgacagccctcaatatggtatacaagagtgccaaaatgtgcgggtcatatgggtgatgttttacatcgatgcagataggcattgacaaatctgctgttcatgataatcttacgtgtcatgtgaaaagcgatcgctcctcctcccagagagggtcacttctcttctggggagatgttctggaaaccggtgccctcttctgtggttaaaaacgccacaataaatagacagac

SEQ ID NO: 535768 - DNA, 230 bp, Homo sapiens
ttcatgaggatccccgtatcatccctttcccccaagagcgctcattttagctacaatacataattccccttcctttgcctgagggagaaaggaaaggaaacattacctaggttcattcccagtgtttcccttgagtaatgctagaatttactttatgtcataatgcaaaattgaaaaatacacataataccaacgaacgcgatgcgtttgggacggatgctacgttgaca

SEQ ID NO: 535769 - DNA, 436 bp, Homo sapiens
  misc_feature (38)..(38): n is a, c, g, or t
  misc_feature (44)..(44): n is a, c, g, or t
  misc_feature (369)..(369): n is a, c, g, or t
  misc_feature (412)..(412): n is a, c, g, or t
tttcttgatctgctagggctaagttattttggcttggncttggngaggaagctgtagagagaaggtatcagagctaacagcagtaatttaacagtttcccatttcatgtgttgtgacatccatttgcagagttacacccaaaacttgttggaaaagatttccctcctcccatcgtgataacgtaaattgatggaagttgtatttctctgggaggtggcagatctatggaagggtgacttgatctgttgctctagccatgagtcaggaaactccaccaccagcagatgagagatgctctgctctccacacttagtctaactttgggtttccccatgcttctgtgctactttcaagccatgatctttgggngatatttgataactctgtccatttcccttagaattccaaaggntattctcttaaaggtagaccacat

SEQ ID NO: 535770 - DNA, 119 bp, Homo sapiens
ctgattgtgctcagagagcaagtaagacccgaacagagagtactagacagtaaagagaaccgttatgtagaaatagtggaagattataggtagagctagcaactactgagctgtgatag

SEQ ID NO: 535771 - DNA, 171 bp, Homo sapiens
gctacagctgtggcttccttgctacacgacagactctgttggctcccggtgctagcctgagcccaggagtgggtagggtggggcatagctatgggccccacacacagcctgaaaccctcgaaggaacagcagataataggacactgcagagactgaagcgatacctaccca

SEQ ID NO: 535772 - DNA, 1494 bp, Homo sapiens
  misc_feature (462)..(462): n is a, c, g, or t
  misc_feature (1493)..(1494): n is a, c, g, or t
ccaacctcctactcctcattgtacccattctaatcgcaatggcattcctaatgcttaccgaatcgagaaattctaggctactagtacaacatactgcaaaggccccctaatcgcttgtagagtccccttacggggctacatactaagcccttctgctgacgacctataaaagtcttcagccagaagagccccataatacacccgcgcactatctgccagtcagcctcttaccatcagcggcccgaccttagctctcaccaatcgctcttagtactatggaaccccgcacttccgcacatacctcaaaatcgcgcgcgtgggtggatgtctcaacacgtgagtggtctgacgtattatatatcttagccgaccttcgtagccttgagcctgtgttactcaaataccatcttggatcgatggcgtgaagcatcgaagacatcattagatacagcctcgtgctcngagtgcattggcacaagcaagtatcccactacaatctcggtagtgaaccgtccaatccttagcgcatgtcagttccttattgatcgaatcagttactgcattgagaagtcgggtcgactaaaagagcgcgtgtctcccaaccgtttaacttgacaaattacagatgaacctatcgtgctgggagttgacttctctggacgattcatgtagcccctatgtgcccgatagagttctgacatgtctattccttcccatgcgaccgtgagacccttcagtagacctagagcgaaaaaaacgcccgtgtccaatgcctagggccgggataacgaggggagtctcctcgcccaaagtaactgctgccagggctttacattctcatgcggaaaatagccgcacggcagcgatatgccgtatcgagaccggaattatcctctcgataagccgggaagtaccaccggtcaacctttagcgtcggtacttatagtgggaccctgatatcccatctaaaaatttttgtgcgtatgagaaccagcggagtttgttgagggcacaactaccccccgtgagagaactataacacacaggtcttttggcttcgctaaaaacacgagttatgtaacacaaccagggggctcaatgaaacataggaagaggaaaaaccccccgaaaaagcgagagcacaccaaaatttaccacccctttggagactaaactcccgcacgcacccacagcagaatataataataaaagagtctagcgcgataagttgagataagtgccgacattatacaagaagcactcgcatggacaacaaaatcagcgggggcgtgaatacctgggacaataatgacgatgttagagaggacgtcgatgtagtaacaaggagagcctcatgtcagatgcgcgtgctactcggcttagtcagcagagaactcgctgatcctcactacctgctcgataatagatgctaaaatcaagccacgacaacgcatgtagactaggtcgtcacactacatgcagatgtaagcagnn

SEQ ID NO: 535773 - DNA, 236 bp, Homo sapiens
tcgaagatggcggttggccaggtccgtgtccgtaacccatcaccaggaagatgttctccaggtggttccccacaaccacctccttcaggctccacgatgttcggatgacgcaggggagcagcagcgtgatctcccgcaagctgctgatggggatgccatccttctccttgtccatccgcaccttcttcagggcgacaatctcatcggtctgggtgtcccgggcccgatacacaagg

SEQ ID NO: 535774 - DNA, 969 bp, Homo sapiens
aagcggctgtgcagacattcaatgttattattatgtcttacaagcataacaaaaaaaaaaaaaaaaaaaaaaaaaaaaactcaaacagacaaaaacaatcagccaactaatataatgcactaatcacaagcagcatgagaacagaaaccacaaacaagaaacatcacagatagatgttagggcggggcgggcacagacacaaaactaattaaaaaataaaggaggcgcggggtggtgcccacacgaagaatctgatgagagtccacaacacaaggtggtggtagactgagcaagaaaaacgaaaaatagcacggcccgacacggaatcgagggctggctcttctagcacaccagagaacggagaggaggcaacgagacacagctgcggaggggtccactcaacacaaaaggaaataaaaagcaaggaacagacatagctataagtaacaactaacacccaagcacaacgggtgatgaagaagcaacaaacgagacaatacaaaagaccaaagaacccaagctagcctaacaacaaaacaaaatcaagtacaacaaggtaccgacaacaacatagcatacacaacgatgactacatagcagacaaaagaaatcgaccgaagagacaacaaccaaacagaaaaagcaacaaaacaccaactaactagctatttgaaacaaacaaaaatcaagaagaaaaaagaacaaaaacaactacaacaaataatacacacatacaacctctcactcacacttccatcatatatacaatctgatacataccacattagacacaggtaaaaataaaaatacacaaaaaagaataaagaaatctactacataaactcctactagaaaaacataacacacagcaaacacagacaaactaaaaatattcaaaaactacacacacaaaacaatcaaacatcaataagctacataacacaaacaaataacaacaaataaacaaaa

SEQ ID NO: 535775 - DNA, 278 bp, Homo sapiens
cgctcgacggtacgataagcttgattaaccatgccctgtagtctccacacaacacacttccctgccagctccacaacttcgggccacagtgagaaatcaacaatatacaaaagcagcccagatgcaagtggaacaacaccctcatctgcccactccacaacctcaggtcgtggagaatctgcaacctcacgcatcagtccaggctcaactgaaataacaacgttacctggcagtaccacaacaccaggcctcagtgaggtatctaaccaccttctaca

SEQ ID NO: 535776 - DNA, 917 bp, Homo sapiens
aattcgatgcaggggctgcgtttcgattggctatttgctggtgccctgttggccgtccgatattaccaactccagctccactgtatcatgcctcatgtgaacacagagatactgagcaactgaagggagcagataaggtggccgagctggtgcacatcctcaagcatcgtgacagagcaaaaggactggtccctcaggaactgtctggtgtactgtaatagcatccagcactgagaactgggctgagatatagtactggatgaccacaaaatccaacacactaaggttgcaggggcaaaagccagccttgaatgagggtaggaatcttccagatccttccagaagagcacacgagacatacttctctgacacagaacagtaagcacatcatcagagggcctggacaagaacatagagtagataggaagcataggattgacaactaatgaatatatacccacaccaaaagctagcacagaacttacatacaacaagacgacacgaggaagaagtagaggaccagaagtagagcaggaaagcagaggatagccaagagcaaccagtccaaacaaagtaagagtagaaccacagtcccatgagaatgtagagaacctggaatcagaaagattgagctggccgagatccggccgaaaagaagaagcagtcataccaagggacatagcgaatccaacgagatagaaaagcagaccttgtggcccgacaaagacaaccctgaatcataggacacagatactagcattacaaaactgtggaatgcaaaagaagcaggcggaatcctaaaccagaaaatcattgaagctagggctgacacaccacaaggatcacaagaggaagaacaccggactgaccctgaacgagctcaatcgaaggcgcgaatgacaagatatggaaataga

SEQ ID NO: 535777 - DNA, 141 bp, Homo sapiens
caaagaatactccactcatcacttcgggctctaagttttacaagttgatagttatttgtgtcatctctgatgtctaggaatgtaaaagtgattctcaactcagatgtgtaataaaaatcaatcagatttgttctaccgaca

SEQ ID NO: 535778 - DNA, 267 bp, Homo sapiens
attcggacagattcaaaggcaattccgcagtcatggatggactacagaacatccggagtcctgccagttgggcatgtgcaggtggcacaggtccagccagggagccacagccgaagtgatttcctattgttcactgtgaagataaggtcaaaggttgtgggtagccagtaagggcttagtggtcgttatctggataggggccccaaggtggccagtgagggccgcccccccacggcctccagcaggagtgcatccttctcttgctta

SEQ ID NO: 535779 - DNA, 294 bp, Homo sapiens
ccccttatgcgccgacccaccactgagtattaactgctcggcaggaattatctgataccattcatttagccttctgagctttctgggcaggcttggtgaccttgccagctccagcagccttcttgtccactgctttgatgacacccaccgcaactgtctgtctcatatcacgaacagcaaagcgacccaaaggtggatagactgagaagctctcaacacacatgggcttgccaggaaccatatcaacagtggcagcatcaccaggtgggtcagaacataaggggtaccgagctc

SEQ ID NO: 535780 - DNA, 373 bp, Homo sapiens
cccgctcgtccagtatcaacagagtaacagttgtcttaagaagaaccttcctgttaatgtacgtaggctactttgtggctgccttggttgctgctgcacattaggttgcagtatgtgtgccagttatgtgcctcagataaaagaacacgaagatcgattgagaagttattagaatgggaaaacaataggttataccacaagctgtgctggcatgggagactgagcaaaaggaaatgtgaaacgagataacatgatggaatatgtcatcctcatagaatctttaccaaagacagccgatttttcgaccagattagcatttactttatcgtatagagacttttcacgtactgtggtctttccaatggtgccttgc

SEQ ID NO: 535781 - DNA, 238 bp, Homo sapiens
ggatacaggcactgccacatgcccagctaattttgtgtttttagtagagatggggtttcatcatgttggccaggctggtctcgaactcctgacctcaggtgatccacccgccttggctcccaaattgctgggattacaggtgtgagccaccatgcctggccactaccctgtcttgtggctgggtatgactccactaccctgctgcctctctccccgtacagcagcataatttaggaat

SEQ ID NO: 535782 - DNA, 913 bp, Homo sapiens
acattaagagggatgcaaagttactgtctatttaaaactgcaagtcagttaactctcttaattcccttattacctaaacttgtctggctcccaggaacagccttatagagagagggagtatgtatgtgggcaagaaaatgttcacctggaactattgtattgataagtaaatttaggatctacgatacagcttgttttccttatgggcattcgtttgggtgctcaagtcgatcgataaaactaggttattgctatggctatccgtggattcagacgcttaggttctgaaaagatttattcttttatgtaaagtgttgaatattggataatagtccatcttcaccttgaatgggtctctgtcatatctcacatttagtcttcaaggaaaaaccatttgctaccaaagtaaatcagtatttcgaatgtgcttctctgtgttgtgggtacacttagctagtacctgtcaaggcttttccagccagaatttggaggcaaactcagctaaggaagctgttcttttaaaacaaaaacctatcacaaaaatttataatggtccattatgggcttaaggtattgaggccgcccacatctttcacaaaggtataaccctcataaacaagaagtttaccatcgtcttgatgatggaccattatgaccgatgctctttcctgtacctgggccagagaataaaaactcaggaaatttctgagactccaacttggaattgcacttactattggctttgtaacgctcacatatatggctaatcttcaacggtactttggccacggtcttgacaaccatttagtctgcttcgaggacacgaaaggcttcacctttttggactcaccacctgcttgccacatgctatgacgcgcaggcgactgtcacgataacacactggcgacattcc

SEQ ID NO: 535783 - DNA, 234 bp, Homo sapiens
taacaatacctgctagaacctaccagtatgacagaacagacccaaaccactgtacccatatcgaacaataggtagtgtaacaaccataagatgttcctgggaaatcgtcaaccctctgctgcagtagaaacctgatgtataagatatgaagcgataaatccaaatggaaacccatgagtgaggacgcaattaaatctgtgtgtgctcctggagctacaacatcccttcctccct

SEQ ID NO: 535784 - DNA, 205 bp, Homo sapiens
cgctcaaacagtagcttgctttgtatgatttaaatgaaacattgagatggttcagttatgcagcttgaagactacaaatgattttgaggcttttctctagtaaaaagagttctatttgggaacaaagtgatttcatctttgctcagatcaaaactatctcatgaatctttgtggtttagataaatgtgccctcatttactcctaa

SEQ ID NO: 535785 - DNA, 302 bp, Homo sapiens
acacttaatcctggtcaacacagttacaccctttttcaaaaacaaccaaaataaaaccaccccttgggcgtgttttcactaagaggggatgacatcctcctgtcttaactatttccagctcttggcaaaatattaactctgtactctgatagtacagtaagtgatagttaataattaaggtcctatacactgaaacgatagtgaaaggttacttatcagtcctgttattgagactggtcactgtctgattcttctccaggagctttgactattatctcttcaggctttttcatcatctgtaa

SEQ ID NO: 535786 - DNA, 460 bp, Homo sapiens
ggacatggtggcgcatgtctgtaatccagcttactgtaatctcagctactcgggaggctgaggcaggagaattgcctcaaccgggaggcggaggttgcagtgagccaagatcgcaccactgcactccagcctggcaacagagcgagactctgtctcagaaaaaaaaaacaaaaaccagtttaggctgggtatggtggctcaccagcactttgggaggctgaggcaggtggatctcttgaggtcgggagtttgagaccagcctggccaacatggtgaaaccctgtctttactaaaaatacaaaaattagccgggcatggtggcgtgtgccagtaatcccagctacttgggaggctgaggcgcgagaatcgcttgaaccctggagatggaggttgcagtgagcagagatcgcaccactgcactccagcctgggcaagagtgagactgtgtctcaaaaggaaa

SEQ ID NO: 535787 - DNA, 123 bp, Homo sapiens
acccggcgccctttttttgtaaatagagggaggagacatgagacgactggacgttgcgaacgcctggtgcatggcgcttagtgggaaggctctgtgccactgcaggcccctgacacccctggc

SEQ ID NO: 535788 - DNA, 190 bp, Homo sapiens
attctgccaacaacctgaaagagcttggaagtagattcttccccagaggctccagatgagaacgcagcccagctgacatcttgatttttgcattgtgagatcctaagaagagaaccaagccatgtggcccctggacttctgccctacagaactatgagctattaaatggctgttattttaagctgttaaa

SEQ ID NO: 535789 - DNA, 369 bp, Homo sapiens
ggtcgactaaatattttataaactcatggtggcacgggcaacatcattgcagtcaagaacaaattcatatctagaatccattcctccagtgaggacacgcagtgccccttcatgatggaaagggttcagtgtggtcagcctgctggcaggtggctgagcccctggaagtggagccatgctgggggctcagtgtccatctctgctgctggaaggttcagcattcagtggtggcagccttggggggaggaagatctaatctatgttgtagagcccatgcaaagcccccatctctgctgctgctcattgataaagcatgaaggtggctggaaagcatgactgccatccacagtgcatggtttcaacctcctg

SEQ ID NO: 535790 - DNA, 185 bp, Homo sapiens
ggggggggggggggccccccccccccccccccccattttttttttcccccttttttttgggggggcgggggtttttttaaaaaaggggggcccccggggctgggggggggcccccccccttggggttttcccccccccccccccccccttttttttttttttaaacgggttttttttttttggga

SEQ ID NO: 535791 - DNA, 102 bp, Homo sapiens
tgtgcactgtcgccctcctcatcagcactgcatctgccaatgtggaggcgtgagcacatctatgactgaactccatcagcgagtcccgcatgagcgttgccc

SEQ ID NO: 535792 - DNA, 392 bp, Homo sapiens
ccatggcagacagaccagaaagtctggcacctgctgactccggccctccctgtcacttcgtcacacagcaaactcttaaaactttggtttagctcaacgaccattgaggtccatgttcactgttcctgctccagggaggatggtagcaaagttgacagccgaatcccttcctatatacgcacctccacgtatcctggatgactataggggcgaggggctacactgagaatgagcagtgatgcactctaggtcattgtggccaggcacggagctcttgagacgcatgctcccacggacagagggactctctatctggcatgttggcctgcacactaaataatgactaatgccaggacaagccccgtaaccctggggtgggtatggatggcctg

SEQ ID NO: 535793 - DNA, 253 bp, Homo sapiens
gcgtcgaactaaccggaaggttgtgagttcaaacccctgagctgacaaggtacaaatctgtcgttctgcccctgaacaggcagttaacccactgttcccaggccgtcattgaaaataagaatttgttcctaactgacttgcctggttaaataaaggtacaaataaataaatacacacatctcttagttgtccccttttctgaatccatgcccattcctcaccctgtcactggctgcaaatgccaagtcgacgc

SEQ ID NO: 535794 - DNA, 824 bp, Homo sapiens
  misc_feature (70)..(71): n is a, c, g, or t
gataagacctatataagaaaggcttttgtgacttatatccttataaagtatattttctccaagacgatgnnacattaatttcttccacactccgcgccttttataactaccacatagatttcgcccgataataagggaaaatattaccccatttgcacaacacatgtggagccctcgcttagcccgcttcacttttaatagggtagccgcgcccgcttcatttttccacagggcgccgccgcctctgcctatatacaccgggggccccactcctcccctcccccacttgggagaacacccttttctaccaagaaaattgggaaatttctccaccggacaaccccactggttttgggccccacatccatattttcatataacaatttataatcgtcttaacccaccagtacccctctctacagtaccactatcgtatcattaccactactcatactgtctaacccacaggaaatacctgtcaaattctaccccaagatcacgcttttttagtatagcaccacgaccccccctcgtcttcttatccacagtcgtggtaacccacgattgtcccaggtcattagagaacacttcttcgccccacatgtcaaacacgatatcccggcgactaccccaatcttgtcgtgaattgtctcagtgcttgttaatttctagcttacttagcactgggcaccggcaggtgcacacacccttgtatcccaccccccttggggcagcaaacagtagggtgacttcacaccaaagtccaggcgaacagtgacccctccttctttaaggtgcggaaacccccttttctcctcataaca

SEQ ID NO: 535795 - DNA, 692 bp, Homo sapiens
ggtcaaggtcccatacaggcctctgcctcggccgcgggcccttcagttcaccgtcgtctcgtctccctgtactgtccgcaggcctgggcagacatggccgttattccggtcgggtctcctggtgctgacgacgccgttggcctcgcctagcctcgctctccgtggcctgccatcctggagcctcgggcggcgccggatgtgtgtagatcacacatctctagtaggttcacctgacaggcctgggacatgagacctggcagggcgcgcggactcagtcgccgcagatactagaacgccggtgacgaggctcacgatgttgaggcttcttgattttcagtcacggacactctctatggctggcgctcgatcgtcctatcaggtggacttgagaacggtcagaagtcctacgtgagccaaatagtccgaaaccaagtaggcacctgtatctcgcctcccctgctccgcgctcgagtctcatgaaatcgtcgtctccatctccgtgcagaaatgtcgatgcttgaccaggcattccacaggaagcacccctgcggcatttggaacgcccagttcaccagacacgcggttcacagtcgagcagtctagtgcgtaactccaccaggtgttgcaggctttggtccgcactggactcggggtgctatgctcgtttgggtaggcgatgtgccgtgggagcc

SEQ ID NO: 535796 - DNA, 783 bp, Homo sapiens
  misc_feature (5)..(5): n is a, c, g, or t
  misc_feature (68)..(68): n is a, c, g, or t
  misc_feature (79)..(79): n is a, c, g, or t
  misc_feature (102)..(102): n is a, c, g, or t
  misc_feature (105)..(105): n is a, c, g, or t
  misc_feature (107)..(108): n is a, c, g, or t
  misc_feature (111)..(111): n is a, c, g, or t
  misc_feature (140)..(140): n is a, c, g, or t
  misc_feature (149)..(149): n is a, c, g, or t
  misc_feature (190)..(190): n is a, c, g, or t
  misc_feature (193)..(193): n is a, c, g, or t
  misc_feature (195)..(195): n is a, c, g, or t
  misc_feature (225)..(225): n is a, c, g, or t
  misc_feature (234)..(235): n is a, c, g, or t
  misc_feature (258)..(258): n is a, c, g, or t
  misc_feature (418)..(418): n is a, c, g, or t
  misc_feature (474)..(474): n is a, c, g, or t
  misc_feature (481)..(481): n is a, c, g, or t
  misc_feature (484)..(484): n is a, c, g, or t
  misc_feature (499)..(499): n is a, c, g, or t
  misc_feature (536)..(536): n is a, c, g, or t
  misc_feature (584)..(584): n is a, c, g, or t
  misc_feature (588)..(588): n is a, c, g, or t
  misc_feature (607)..(607): n is a, c, g, or t
  misc_feature (625)..(625): n is a, c, g, or t
  misc_feature (633)..(633): n is a, c, g, or t
  misc_feature (639)..(639): n is a, c, g, or t
  misc_feature (668)..(668): n is a, c, g, or t
  misc_feature (742)..(742): n is a, c, g, or t
gatgntatacacaaaggctgttcactcatttccataatttcttgatggacattgtttttctcattgtncttctgcatgnttttggctactgccatctcaaantcntnntgngtgacatggactcgccgttctcggagggnataaatgcnagcatctgtgcacacgcccttcacttcagcccctgatgctnctntnatgagctcagcaatttttctcaggttgatnccccgggtnnggttcatcttccgagaatgaatnttcaaaatgtccagccgggcctcctcattggggggtgggaattcaatttttctgtcaatgcgccctgggcgaagagtgccgagtccaggatatcaatcctattagtagccatgataaccttgatgttcttggtggcctcaaagccgttaagctggttgancaactccagcatcgtgcgcggcacttcactgttccctccagaacccccctccagcngcgaggngcngatggagtggatttngtccatgaggatgatagatggagcatgtgcccgtgcnatgagaaacagctccctcaccatttttgccccttcccctatgaatttntgtnccaattcagagccagaganacgaataaaggtacagtncgtatgangagccncagcccgggccaacagtgtcttcccagtncctggaggtccatacagcagcactcccttgggctgagcaatgcccagtgcttcgaagagctcaggatgcttaanaggcagctcgatcacttctttgatctccttgatctgtttgt

SEQ ID NO: 535797 - DNA, 139 bp, Homo sapiens
tcgaggagagcgggccagtgtcttcaacacggacacgctctgttgacaccagagctgggccagggaggacagctccactgaccacccagagctgggccagggactcaacaatggggacagaagtcccccaagctgcctg

SEQ ID NO: 535798 - DNA, 412 bp, Homo sapiens
  misc_feature (2)..(2): n is a, c, g, or t
  misc_feature (6)..(6): n is a, c, g, or t
  misc_feature (13)..(13): n is a, c, g, or t
  misc_feature (196)..(196): n is a, c, g, or t
  misc_feature (215)..(215): n is a, c, g, or t
  misc_feature (266)..(266): n is a, c, g, or t
  misc_feature (320)..(320): n is a, c, g, or t
  misc_feature (323)..(323): n is a, c, g, or t
  misc_feature (351)..(351): n is a, c, g, or t
  misc_feature (396)..(396): n is a, c, g, or t
  misc_feature (405)..(405): n is a, c, g, or t
tncctngtgccanctgaatgagatatctttaagagatacgggtatcatcatggacactgtatgcggatgagtgatcccagcagttccctgggcacgctctacatggccggtgcactgttgactgtccaccatcatttctgcctgcagcttactaaaacgggagttaggcacgtgcccccttggtgctatatttcgnctgaaggactagttcctgnaggttccgggtgctactctcatctctccccagggtgggttcttaatccttnggggggaaaattgtttcccgggtgggggacggacactggaagttggggtccagnccnccaccagggttgtgggtgcgtcccctgntcttgtcctttcttaaagttaagtaaacttgggggctgggtaagnctggggtgnaattgtg

SEQ ID NO: 535799 - DNA, 136 bp, Homo sapiens
  misc_feature (125)..(125): n is a, c, g, or t
agtgggcatcataatatgtaccgcaatgtaattacaatgttttagcaactttgtacttgttattttcacagcttgtcaggcaagacctcagaataaaagtgtcatgcgacacaaggtcgacgcgnccgcgaattta

SEQ ID NO: 535800 - DNA, 385 bp, Homo sapiens
gcttgatacagcttagacacacacacatattatacacacacacacacacacacacacacaaacacagttatcaccaggcaatacttaccccttagcgacaatgccctctgacattttcttttctattatatcctatttcatttttataaaaacccacccgattggttatataatcctattaatgggctacaaacctacagtataaaaaatactaacatacacataatcgtttgagcctgatgtctctttctggttaagcacactatttccaaacttaactaagtgtttatggatccaaattcggctaattgatacttaggttcttccacccctgtaacaatccctgcagaatttgtttttcttttccaaagtctaaatgcactca

SEQ ID NO: 535801 - DNA, 241 bp, Homo sapiens
tcattgggctctaagggcggcttctgggggtcgtaactctgcacccgatccatctgacccatgcacaccttggccgcatctatgtcggtgtggaccacaagctcttactgtacaatgcagtactactggacagtggttttcaccaggactggtgaggcgggatcggccagaactgctctcgccaggtgatgaagtcctcctgcaagttcctatcgtctgcgcccaaccccgaacacggttt

SEQ ID NO: 535802 - DNA, 308 bp, Homo sapiens
gcttacagcaatgaagaaactgcaataaaagtatattcaatacttcagcactctttttagtttgtagctacttatattgtgccaaatgtagacagaccaaatgaaggaataagaaaaaattcacttcagtcaacacaacaaatatattcaacagtatgaattccaatgaataatgaactatggcaggttagataatagtgctatatattgtgaaggctaattgcttgtgttgtttcagccttttttaccctacgcagagaaagttgtctactactctggcacctattccactctttcttcttcttttc

SEQ ID NO: 535803 - DNA, 1321 bp, Homo sapiens
  misc_feature (271)..(271): n is a, c, g, or t
  misc_feature (273)..(273): n is a, c, g, or t
  misc_feature (282)..(282): n is a, c, g, or t
  misc_feature (652)..(652): n is a, c, g, or t
  misc_feature (702)..(702): n is a, c, g, or t
  misc_feature (727)..(727): n is a, c, g, or t
  misc_feature (747)..(747): n is a, c, g, or t
  misc_feature (754)..(754): n is a, c, g, or t
  misc_feature (759)..(759): n is a, c, g, or t
  misc_feature (761)..(761): n is a, c, g, or t
  misc_feature (788)..(788): n is a, c, g, or t
  misc_feature (801)..(801): n is a, c, g, or t
gggagtccggggacccgcgatcagccccggaggacggggtggggtcgccccaaacaggagcgccgggaccgctgggaccccgcactcggctgtcctgcctgccgcctgtggtagcctgggcagtgtgatggtccctggatgatggctgacaatttttcctggccccccctcccagtccctgccccacttcctggggccgccactttcactttctcttcctgcctgaagcctgatccccttgcgaagaactgtgggcctcccgggaggaganangggctttgnctttgaaacccgggacgccaggggcgctcccgcaagtgggggtcctccgggacttggaacgccccggctgggtggtgtccgggcgtcctttccccgcttcttcccacctcggctggtcccgtttcctcctgcgcccagtgctggacctgtctcggcgcccgctgccctctcaccgccccacgcaggatcccggcctggtcaccgggcagtgtgatgcttccctgactgccgctggggacagcgaggcacacacagggcttgggcctgctgccggaggccacacggcctggctgagttgctcctggtctcccgcctctcccaggcgacccggaggtagcatttcccaggaggcacggtcccccccaggggngatgggcacagccacgccagatggacgagaagaccaagaaagcagagganatggcctgagcctcacccgagcagntggcgggcggggatgaacanggtggcnaatgnangtgtgccatctggctggcagagcaacngggtgcccctgangtgtgcaatgttgaagcctgatggtctccccaagcgctagggaacaattcagattcctcatggttgcaaaaattggggcatttccagctccattccagccatcaacatcacacggacggacatgggaagaaagacgacccctccagacttctttcctaaagagcataagctcaaaaaattgtacacagcttccttccgtaagttccttgttgaccaggaaacttgatttccccaacaagcttaccagttcaagtttgaagggggaaaactggttatatgcccaatgattattcaggtacaaaatccaggggtccgttggtaaaggcaagtgcgacgagcaatgggtcactggcgggctaggcccaggggatttaattccaatgcttgaacactttggccatgcctggggtgtattgccccaaaaactagtgtcttcgttacaaaaaaaaaatccgcgcctattcgggggacaagaataaaggccagtctactctgccgttttaaagaaaccgccaaggaa

SEQ ID NO: 535804 - DNA, 168 bp, Homo sapiens
ctctctaggttctccacgtcgaatattatcaggggttatcctgaggagatcgcaagagctttccatattacaaatgactttactgaataagaggaagcccggtacgccaagagaaccagtggtgtgaagagaagtgaaatgttgtgtctgacactgtaacactgtaaa

SEQ ID NO: 535805 - DNA, 1240 bp, Homo sapiens
  misc_feature (271)..(271): n is a, c, g, or t
  misc_feature (273)..(273): n is a, c, g, or t
  misc_feature (282)..(282): n is a, c, g, or t
  misc_feature (652)..(652): n is a, c, g, or t
gggagtccggggacccgcgatcagccccggaggacggggtggggtcgccccaaacaggagcgccgggaccgctgggaccccgcactcggctgtcctgcctgccgcctgtggtagcctgggcagtgtgatggtccctggatgatggctgacaatttttcctggccccccctcccagtccctgccccacttcctggggccgccactttcactttctcttcctgcctgaagcctgatccccttgcgaagaactgtgggcctcccgggaggaganangggctttgnctttgaaacccgggacgccaggggcgctcccgcaagtgggggtcctccgggacttggaacgccccggctgggtggtgtccgggcgtcctttccccgcttcttcccacctcggctggtcccgtttcctcctgcgcccagtgctggacctgtctcggcgcccgctgccctctcaccgccccacgcaggatcccggcctggtcaccgggcagtgtgatgcttccctgactgccgctggggacagcgaggcacacacagggcttgggcctgctgccggaggccacacggcctggctgagttgctcctggtctcccgcctctcccaggcgacccggaggtagcatttcccaggaggcacggtcccccccaggggngatgggcacagccacgccagatggacgagaagaccaagaagggctgtgggtgagcgtggaggatgctcagattgcacagcggtcaccatcgtggctcacagtgcgccctgatatgacagtggcgtctctcagggacatggtttgcctggactatggcttcccaccagtcttgcagccagtggcgttgattggcgcagccggttggcacgagaccaggagaccctgtgttcccatggggttgcggcagcattccggacagttgcctaactctaatctgggtgtcagcccgaaacacttccttcaacctcaggagcttgcactgggaagcggaatagcggatgttggcaccatctgggcgttcacgggcctctacgctgagaccgcgtgagcccctgtggagccagtggcacccaaaaggccggggggtcccccggaacccgggagggggacgcccaagattgagtcgcgtagtccccaccctgtggctggaagaacccccgggtgacgctctatacacagcacagcgcgcgtcgataaaaatgtagtccgtgcacccgcggctacatgagtgccgcatacatcagcacg

SEQ ID NO: 535806 - DNA, 104 bp, Homo sapiens
acctgggtgtgatacggcttagaactgggcatctagatcgggatctgatcacttgactgagctaacttgctctttccttttatttaaaacacaaaacaaaactt

SEQ ID NO: 535807 - DNA, 105 bp, Homo sapiens
tgcttgtccagattgagcgaggagggcaaagctatgacccccgaaaccagactgagctcctagaacatgctaaagagcacacccgtctatgtatgtgtgtggatc

SEQ ID NO: 535808 - DNA, 223 bp, Homo sapiens
ctatattctattctattctattctgttctgttctacactattctattctattctattctattcttttctattctattctattttattctgttctattttgttctattctcttctattctgttctattctgttgtattctattctattctattttattctgttctattctattctattctattctgttctattctattctattctgttctgttctgttgtattc

SEQ ID NO: 535809 - DNA, 383 bp, Homo sapiens
  misc_feature (21)..(21): n is a, c, g, or t
  misc_feature (158)..(158): n is a, c, g, or t
  misc_feature (210)..(210): n is a, c, g, or t
  misc_feature (248)..(248): n is a, c, g, or t
  misc_feature (307)..(307): n is a, c, g, or t
  misc_feature (376)..(376): n is a, c, g, or t
gactgcatagggctcggcgtngtgactcacacctgtaatcccagcactttgggaggccaaggcgggcagatcacaaactcaggagatcgagaccatcctgtctaacatggtgaaaccccgtctctactaaaaatacaaaaaattagctgcgcatggtngcaggtgcctgtagtcccagccactcaggaggctgagacaacagatgcacgncaccacacccggctaatttttacagggtcctgctacgnaccattttatgtccctacctacagtgcacaaggggttaaaatgggctccccaaaaaggnatactgcctttgaccatccctgggttcacacttcataatcccacttcaattttaactaactttggttgngtaaagt

SEQ ID NO: 535810 - DNA, 871 bp, Homo sapiens
tacagcaaaccaccatgggcacatgtatacctatgtaacaaaactgcacgttctgcatatgtatcccagaacttaaagtataaaaaaaaaaattcttttagaaaagtattttttatttttatagagttagggagtacagttgcagttttggttttgttggttgggttttttcttgaggagtctcactctgtcgcccaggctggagtgcagtcgtgtgatctcggttcactgcaacctccgcctcctgggttcaagtgattctcttgcctcagcctcccgagtagctgggattacacggtgcttgccaccatggctggctaattttgtattttagtagagacggggtttgccatgttggccaggctggtctcgaactcctgacctcaggtgatctgcccaccttggcgctggggttgcaggtgtgagccaccacacctggtcacaggtgcagtttcgttacatggatatattgtgtagtggggaaatctgggctttggtgtaaccatcaccaaaatactgtacattgtacccaaaaggtaattgctcatccctcaacccctcccacctttccaagcctcccgctgtctataattcccacagcgaatgacccctgtatacaaccctgttttaactccccaattataaagtgaaaaacctgtggcattttaatcaaggcacctgaaggttctatacacagatcttaattcctctattccgtccacgacgttgttgcactcagcaaaatcagctcacagttcaaaccacagtcggctgacagggcacgatacatacagattcattcacttgggtgagaaaattacccagggatacactttcacacgttcttattccaacatcggatcgctatagg

SEQ ID NO: 535811 - DNA, 375 bp, Homo sapiens
tttttcccctgaccaagttacctgtaaactggaatttgcaaggggatgctgtgatagtaacccctttctattgctgtaatgttcatataacctgggaaactgagagaaggggatgtgtaaataaaagcttaaacattttagtaatgtgttaaaatgtcactctctcttaccctgtttcccttttttgccagatgaggagttttttatatttatattgtacactacacgggaagcctgaaacgacaagaatatggggttggggataggtgtttatattagagtgcacttaaaaaatctgaggggaaacatttgaggagtttaaagaccctcccgcgaaaatcttgtgtttgccacaataaaattttcgggggttta

SEQ ID NO: 535812 - DNA, 1127 bp, Homo sapiens
ggagagagagaactagtctcgagttttttttgtttttttatatacgtttggatttttttttaaatcctgaaaagtaaactttaaaaaagttctgtgggagaaatttataaaaccaagtggcatgtgagggtctggtgggaaagctgaggggctggacgcagggttgtgggagagttgaacaggagggagattctccaccttcagttccatgtgatagcctcacgtggtagtgactaccagggaaggtgtggggaataaatttacgctccaacacaacggaccaacgcggctaacgcgcaacaacaccggcacggtgtggcaacggcgtggcgcgacgggtggcgcgcacccactacaacgacacacttaacacaggcgctccaagcgctaccgccgtgattacgaacctcacaggacacaacaactgtgctccgtggcccccaattagcgaacgcgaagcgacgaacgccccccatccagagaggggggaacagtgccaaaacgatgagccacagtgacgccagccggtacagggctaagactccccgagagcagatcatacacaccccacaatcatcaccccacaaagaaacacccacgagaggcacaaaatacatggcgacagtagagcgcatcaagaaacagaacgatgaggcacctaaaatggctacacccgacgggcactttgcgtgccgcgacgaccgcaacaccctccgcgaaacatacagtaggcgagcccaaccaacgtggggaagaacacgcccatcagtagaaggcaccacaaaacaacgaactgggagaccaactctgagctatagaactaccatataatgagtggctccacaccacctccactgatgtgaatgattgtttgcaccccaccgcgggggtaattactaatcagacactccccagaggaatacaacctgcaacgcgacatgtcttccacccgatgcaacgataccaagtagagacgcgcgtccccacaacttcgtgccgctcttttgggagatactcgtatgcaattaaagaatcaccatgggagcagacactccacgaacgtcagttcttgagtggagtccaacaactattgggtcaggtgaataaacacttgtcgggtacttaat

SEQ ID NO: 535813 - DNA, 376 bp, Homo sapiens
  misc_feature (190)..(190): n is a, c, g, or t
gtcgtctctcacgatccccggcacgatctttgccttctggagtaccagcagagatcacattccatgtcagcatgatgggctgcccgatagcccctcaccctgagatgggacgccatcttcccagctccaccatccccatcgtgggcattgttgctggcctggctgtcctagcagtcgtggtcatcggtangctgtgcgttcgctactgtcatgtgctcggacgaagagctctggtggaaaaggagggagctactctcagactgcgtccagcgacagtgcccagggctctgatgtgctctctcacagcttgaaaagcctgagacagctgtcttgtgagggactgagatccacgatttcttcacgcctccccctttgt

SEQ ID NO: 535814 - DNA, 81 bp, Homo sapiens
  misc_feature (46)..(46): n is a, c, g, or t
  misc_feature (48)..(48): n is a, c, g, or t
ccaaatggcggatgacgccggtgcagcgggggggcccggggcttgngntggccatgggatggggaaccgcggtggcttccg

SEQ ID NO: 535815 - DNA, 113 bp, Homo sapiens
tatagtgtatacctatacaaatgttcggtcaatttgacgcatttataatgttaatgttagatagatagaatagagagcccagagctgccgatctaagtgtagtctgtagtgat

SEQ ID NO: 535816 - DNA, 333 bp, Homo sapiens
accagcacacatcttagaagggaacagagatatttcagaggtcacactagacttagaaactgcttacagatgtatctccggagagagaggaaggagtcaacgatgccttccagatcactgctatgagcccaatgggtcgctggtgacgcttcatcacttacatcagcatcctgagagcaggacaggttctatgtgagggcaggtagcatggagagttccactttggacatattgaatcaaagcatgcctgtgcaaatcatcccagctagtgatgtctcacatgggctgtaggacaaaagtaggaccaagaacgcacaactagtcgagaaacga

SEQ ID NO: 535817 - DNA, 636 bp, Homo sapiens
gcagatcacctaaggtcaggagttcaagaccagcctggccagcatgtgaaaccccatctctactaaaaatgcaaaacttagccgggcatggtggcatgcacctgtaatcgcagctactcaggaggctgaggcaggaaaatcgcttgaacctgggaggcggaggttgcagtgagctgagatcacaccactactccagcctgggcaacagagtgagactccatcttaaaaaaagaaaaaagaaagaaaatgctttgaagaaaatgaaaataaaaatacaacatatcaacatttgcaggatgcagctaaataatgcttagagggaaattttatagtatttaattgtatttaagaaaagaagggccagatgatggtcgtcacgcctgtgatctcagcacttcgagaggccaaggcaggaatatttcctttttttttttttttgagatggaatctcactctgtcacccaggctggagtgcaatggcatggtctcagctcactgcaacctctgcctctcgggttcaacgattctcgcgcctcagcctcctgagtagctgggactacagcgcctgccaccacacccagctaatttttgtatttttagtagagacggggtttcactatgttggccaggctagtc

SEQ ID NO: 535818 - DNA, 570 bp, Homo sapiens
  misc_feature (34)..(34): n is a, c, g, or t
tttttttgtaactgtaaaaatttagctcattttnccattcatgtacagtgggtcataaaatcaccataaagcagtcctgttccaatttttttttaacgtgccctggagaattttaaaaaaaatgatcctaggtttgttttttcatgcgggaagcagaagggggctatcaaagcctcttccccccccctataagggaataaaggtattatttctttcccccgaaacggattcaaaggtagaaaatattttagcctccggtggtttttaaagggcttccaaagggcccaagaaactgttttttgccccgaaaaaaaaaacccccccccggggttttatttgggaaaaattggaagagaaaaaaatttgttaaaaaagaaggccgggtctatttttttttttttttaaaacggggcccctaaaatcttttgaggaagggaaggattttttttgctggtcaggggcttttcccttttatttggtggtttggggggccaggggccctaagtaaaaaacagacttttcccaaaggattggtttcaaaaaaacaggtggtttttagccaggcctgta

SEQ ID NO: 535819 - DNA, 395 bp, Homo sapiens
  misc_feature (234)..(234): n is a, c, g, or t
ctggtgagtgtgagaaggagaggagccaagttggaatccaaggtttcagtctgagcaaatggacaaatgcatttgccaagtcctatttatgttaacttgcagataagtatcatctgacatatctactcccttagccctagttcacagtgtcatcaccacttacctgagtaattataccaatgtagatgccctgcctgttgtctttcgtcagtttaggatgccatgaagaacctntaagaactatttagtaaggcataactcttacatgctagttgttgcccctttccaactcacttgctctcggaaaaaaaggactggcatcgcagagctaagctacaaagcaaagacttgagccccaagcctcagttcttgagtcctacattaaactttcacac

SEQ ID NO: 535820 - DNA, 288 bp, Homo sapiens
atggtcatatcgggtagaacggacaatattcataataataaaacacctccataagaatcaaatgaaatgaaagtagaagtgcttggtagaagatagaacaagtcaataactgtacaattcagtaactgcaaggaggtatgatataagcatagattgtttttttttaaactagggagtggtcaacccaaattgtccatcaagggagtaggacagggaaaaaggacaaccggggagggcattgctggccatagggggtacgggacgcttcgaaatccagtaactcatggg

SEQ ID NO: 535821 - DNA, 125 bp, Homo sapiens
ttatcattagtctcatctatctctctatccttactttctctatcctctctatccttaatctcttcctgcaacagcttcccttttcttagatttcaccttaggttcaacatccacaagtagtgtat

SEQ ID NO: 535822 - DNA, 394 bp, Homo sapiens
  misc_feature (365)..(365): n is a, c, g, or t
aaaagccaaaaaaggccacaaaaaacaaatttattaaaacataaaaattgcatatgtgccacatgtgttgtttagtacacctgtactttgtagaatattcaaatcagggcatcatagctgctgcctgaaggaaacatttttaatttctttatgttgagaataaaatccttttctaccttttgtgacattgtatagttagtttcttaacaatgcctagccttggatctgatgcttctccaatgataatttagtatacttgttcaaacttgaccatatcccagataacctcccagactctcaattttatcttttacatcaaccagagcaagagaagggggggaaaatatttattcattggtatatcnttaattttttactttatggactccactaa

SEQ ID NO: 535823 - DNA, 557 bp, Homo sapiens
gtttttttattgtgtttgtttgggaataataaggcatccttttattggctggacgccattaacaaagaaccgattacattagcaacaaaaaagtgtttcctggagtgagaagtcacaaggcagttatttcccaaaaggttaagtaaaacaggtggtaccaacatcatgtaattaaagatggttaaatttctactattggtcttataccatcttggattcttctggaagcaattttgattggagcaaaataagataaaaagattacttggtttatcttcaggaatggtaagggtctaatttattcaaacaggtttattatatttattaaaatctaaaatctcctggaagaggggttctaacgaggagtggggtctttttttttttctcgctttctcttgtataaaaatctcgagtgatgagtctctataaacgaggggattttagaaagaagagaacagaacacttctgtgtttacagtgtggtgttcgtgacagagagttaaaagagggggtgaaagaccattaaatataagaggctttaaatttgggcaaaaatat

SEQ ID NO: 535824 - DNA, 539 bp, Homo sapiens
atatatgaaagggagttgattaagggaaaattaactcacatgatcaccaagacagaagtcccacttgctgtctgctaacctgaggagtcaaggaagccagtagtggtctcacatctgagtcccaaaagcctcagaagtagggaagctgacaggtgccaccttcgaatctgtggctgaaggcccgagagcccctggcaatagcacttggtcattagagtccaagaggccaaagaactcagagtctgatgttcaagggcaggaggcatccatggcacgggagaaagacgaaagtcctgacaactcagcaagccagtttatttcacctgtccttctgcctgctttgtgtctagtgtgcactggtcagctgatggaaaggtacccacccacagctgacagatgagtgttccttatcccagatccactgactcaaagtgttaacttcctctggcaacatccttaccgatcacacccagaaacaatacttggcatccttcaatcaaatcaagttgacagcttaatattaaccatcacagaataga

SEQ ID NO: 535825 - DNA, 366 bp, Homo sapiens
  misc_feature (7)..(9): n is a, c, g, or t
  misc_feature (49)..(49): n is a, c, g, or t
  misc_feature (52)..(52): n is a, c, g, or t
  misc_feature (54)..(54): n is a, c, g, or t
  misc_feature (57)..(57): n is a, c, g, or t
  misc_feature (260)..(260): n is a, c, g, or t
agaattnnngggatggggagaggactctaaacagacagctccttagccnctnanagnccctgggaagagccacaggataggcaagggtcaagggaataatagcttttccttcttcctgagaagccttctagaattcccctaaagaactaggggacgcaatgtgaatcaaatagagaagccttcctgacttcaggatgttagggatacacattttttgagggcggagactctcattgttcatttttttttttcctgtccangcaggttctcggtgtggtggttaaaatgacttccaagcttgggccccagacaatttctttggaagaatcttgctttaaaacctaaatttaaagctaaagccccata

SEQ ID NO: 535826 - DNA, 276 bp, Homo sapiens
tgaaccacttagttgttacgattctgcccacacgattgccaatacaacgttatgtgctttctttagctctgttggctctgcaaacattgcccggtgtgtttcatctatgcccttctaagaacatcagatgcagtcacatcctggaagatcctatcttttgtaagcttctaagaagcagcctcttgtcatagctttttcctgttgttaaagtgcctagtgaccaagagggctgctaagaaagctttctgaccacttgtggctgtcattggacagata

SEQ ID NO: 535827 - DNA, 283 bp, Homo sapiens
attaaaggaaggaaatttgaaatagggaaaacctgttaaaacataaatcccaaggaaggtttaaattctttttaggccgttcaaataaaaaattgggccctcctcattagtttaggggggggtttttaaaaactaaacggggccagcaattttttgcaaaggaatttgtgagccgcaaagcaatatacaattcactttctttcccagaatagctaagcatttgccattagaactgaaaattttttttttaggggcactttttttggggtatgggatttccagg

SEQ ID NO: 535828 - DNA, 101 bp, Homo sapiens
accggcacgaggcgagatctaagcaaactaacacagaaacagaaaaccaaacactgcatgttcttactgctgaaaaccaggagaaaaataattcatcaatg

SEQ ID NO: 535829 - DNA, 319 bp, Homo sapiens
gcaacctgtaagccatgcaaagagtaactccatatccaacaaaaaacctctaagctctatttggctggggcaggggtgtcaaatatgccatggtgtgttttatccgtgctccgacccatagtctgaagtgcagcatggctgtagacgggtcgggaccactcaagccttacaggaggccgattccaagaaatgcactaatactttcaaggtcattcaggtgggctccgcgtacactttctaccctgtcatctgctcgaagatacttcttgaccttttctcctttgcccaatgctacaccgtcttctggattggcaaaaac

SEQ ID NO: 535830 - DNA, 421 bp, Homo sapiens
  misc_feature (26)..(26): n is a, c, g, or t
  misc_feature (406)..(406): n is a, c, g, or t
  misc_feature (408)..(408): n is a, c, g, or t
  misc_feature (412)..(412): n is a, c, g, or t
ctgcccctgtctttcccctcctgggnataaagacagacatccctgcctctgctccccctacccacttagtgtacaccttgttacagagctcagaacactgaattatggcccatttatttgaaaatcttccctggccgggcatggtggctcatgcctgtattccccagtactttgggaggccgaggtgggctgatcacttgaggtcaggagttcaagaccagcttggccaacatggtgaaatcccgtctatactaaagatagaaaaattagccggtcatggtgttgtgcatctgtagtcctaggtactctactcgagaggctgaggcaggagaatctcttgaacccaggaggtggaggttgcagtgagctgagattgcgccactgcacttcagcctgggcgacagananaaanctctatctc

SEQ ID NO: 535831 - DNA, 447 bp, Homo sapiens
gcgggcgcctcccccagcctcgctgccgccttgcagtttgatctcagactgctgtgctagcaatcagcgagactctgtgggtgtaggaccctccgagccagtgagatgaacccggtacctcagatggaaatgcagaaatcacccgtcttctgcgttgctcacgctgggagctgtggaccagagctgttcctattcggccatcttggctcctcccccgggtgttggtgtccctctgttgcccaggctggagtgcagtggcaagactggctcactgcaacctccacctcctgggatcaagcgatcctcccatctcatcctccaggagctgggactaaagacagttgaccattaaacaacacaggtttgaactgagtggatccacttatatgcatacgtgcattttctcctgactcggccacccctgagacagcaagaccaatcactcct

SEQ ID NO: 535832 - DNA, 586 bp, Homo sapiens
  misc_feature (47)..(47): n is a, c, g, or t
gggtttggttggagaaaatggcctgatcttaaaactattcagtcttnctgggatttttatgcatagaacccccaaataaccatgaaataaccagtgccagtattcataggaaagtgagaaactgtaatatttggcccttattctattcaacaggttttagaggcacgccccccttttttccttaaattttggcttaatttttttaaatgggcctttaattcttaaacggtcctttatttgagatggaaataagatctaaagttagttgcccttgcctgtaaaacaagtgatttgcaaattattattttccctttttttaacaaaaggaaggaaatttggttcccggaaatcttaattttcaccccttcgggaaaccttaattggaactggcagtttgccctgggcgggatatggaaacccattgctctcccctgctacttagttgattttaaagggaatttccagggatgagaaatttgtgaaaaaaaaattggatttcttttgatgtttcaaaagggggcctatgaaaaactgatttgttaaaacatgctagggggccaaaaataaaggcccgaatgccctttta

SEQ ID NO: 535833 - DNA, 230 bp, Homo sapiens
cccacgtgtactgggtggcgctacttgtatccggttgggcgaaccttgacagtgatgtggtaccgctccgggagcggcactggaggatattcagtctctactggcacctttggagacagtgctgaggccgatgggtgtagtgggcagggaaccagttgtaatccaaggaagcagcctggcgtaccagctatagcagccacgtctcactggcaggcttccagtggggcaca

SEQ ID NO: 535834 - DNA, 497 bp, Homo sapiens
agctttgcagtttgtttgccgttttgtcagattctgagacttccatttatataacagtgttgccgcagtaacctctgagaaggtttaacctcctttaaaccaaggattttctgacacgaatgacttttgaatgacagagagtgacaaactgtggtatttgctcaaagctacctaccaaggcatttcctcatcttcttgctttcatgttatttttaatggctctttttcctcagcagtatttagccagcttgccagtttgaaaggaaagacaaatgatcttcatgcggctggcttccttaacgcgatattgaatgagatttaatgagagatgtttgtttaaagtgtgattgctttcctttcacagcagaaatgagcactttttttctgatctctgcctcagtggacattattcacttcaatttgtttgtccttaagtagaaaaaaggatgttttttcagtttgttagaccatttactgtaataaaaagctgagtgtga

SEQ ID NO: 535835 - DNA, 397 bp, Homo sapiens
  misc_feature (267)..(267): n is a, c, g, or t
ctaatcgagtctcggtacctggggtggcacaacccagaacgacaccagcatggtcgctattgagacactgtcaagattcacgttataccatccatagtgcattattgtcgcttttcttctgtctagtaatgtagagacttctacagcatgttcgtccttttcttcaataaagaatttcttaaaagatggattagactcatctcacacgttttaatctcttctcctgtctagatcatgtatttggctgacaattactgcactttggtntgtttcagggtttgtttgctgcttttgattgctacgttttggagagagcaatcctgctgtgaaaccgtgtggctgtgtatcgtattcggcttactcttactagccatcattttccccttttttaggttta

SEQ ID NO: 535836 - DNA, 973 bp, Homo sapiens
ggcggacgcggaggccagttccccagctccagaccgccgtcgatgctgcctgtgtagttgcagccgcggactgctcccgaccagactcgcctcggggaacaggacgcgcgtgagctcaggcgtccccgacccagcttattctcggaaccatgaacccctaacttgcgcccggtgcggcaagatcgtgtatcccacggagcaaggtgaacgtgtcgtggataagttctggcataacagcatgcattccattgcgagacctgcaagatgcacactgcaacatgacagaactacaagggctacgagaagaagccctacatgcaactgcagactacacccaagcagtccttcaccatggtggcggacaccccggaaaaccattcgactcaagcaaacagagtgagctccagagtcaggtgcgctacaaggaggagtagagaagaacaagggcaaaggcttcagcgtagtggcagacacgcccagagctccagagaatcacgaagacccaggagcagatcagtaatataacataccatgaggagtatgagaagagaccgcaaatgggcccatagacggagggcgaagggcaatggagccagaaagacagatagaagaataacgaagagcaggccagcagctaaccggcaaggacacaatgaacacacgcagcacgactcaacacaatcacacagacacagaagacccaggaaaaaccaagagcaaggaccaagacagaaaggacgacgaggaaccaagtacctactagggacgaaaaccaaggaagccctgcaaggcaccaaagatacataccatcaccagccggcaaagacgccacaaagagagcaagaaggaaaaaaagggagaccggagcacgggagtcaatggacctaacaagggacaagacaaaaaacacgcaaaagacacaaccagacaaagaccagagggacaacaacgaccacacgtagagaaaagaaag

SEQ ID NO: 535837 - DNA, 406 bp, Homo sapiens
cttcttcacctcaataggttatcttatgcactgcctgagtgtacacataccaatttgaataccttattctaatttataacaccatattgcctctcagagaacattgaatttaagactttacactcagctaaaatactttctgtcatcttgtaataaaatatttttatatgtagagggaaactaaggaggaataattgttgacctcttagttattagtacattcacaactacaaagatttcccattggagaaatcctactaaaaactcaagtggagaattctatatggagtacttatttaaatatggaccttttaaaagtaaaatgaatgtttcaaatgcttctcaaaacattaggttcatgcttgaatgcaatattctaaattttaccccattttttcttaattat

SEQ ID NO: 535838 - DNA, 193 bp, Homo sapiens
  misc_feature (33)..(33): n is a, c, g, or t
tcctagagcgctagcactcaacgattgggaatnttcaaaatactgtatcatttacaaaactaacaacaatcacaaaatacttagatataattctaacaattaagtccaagatctacatgctgaaatcacaaaatgctaatgaaagtgatagaaaaagagctaaataaatggtatatacacacatacacataca

SEQ ID NO: 535839 - DNA, 489 bp, Homo sapiens
gcttccatcattagtacatcgcatataggcatctccactgcctacatatccaccatcatcacgagctagtcagcaagagccatcatgatcactgaagtttcctccaagaccgaagttgtcattcccaccgaaaccactcgtccaggagcatcaccaaattttccagaaccacttcgacctctttggctggatgaagcactagccatctcttgctttgacagggcttttctaacttcacagttgtggccattcacagtatggtatttctgaatgacaatcttatccacggagtcatggtcgtcaaaggttacaaaggcaaagccccttttcttgccactgcctcggtcagtcatgatttcaatcacttcaatttttccatactgttcaaaataatctcttaggtgatgttcttcagtgtcttctttaatgccaccaacaaatatctttttcacagttacgtgggcacctggtctttgagaatcttctctg

SEQ ID NO: 535840 - DNA, 1016 bp, Homo sapiens
tttctttcttgttcccttctctttttcttatttttgttttttcgaggctttttatggtcttcccttgcaaaaattttgttgcatggcaatcattgcattgtcgtttgtgaccatttctcttcttacctgagcccgttcacctggttgagtcattggagtatcaaatgagggcctgcaggttggctgtactcatcgttgcctgctgctttcggacccgcttccacatgctccggttacaatggtgcgagcacattctactaccaggtttctagagcactgccctatgcccaccttgtacccagtccagaggtccgtccaccacagcagccacaggtggagggctcgtctccctgggggctcaccccaggtggctctgccatgctgtcagggaaggagggacttgccaggagaacccgcgcagtcccaggcaccctctagcgtccactcagcgggaacagcaccctgcatctgggggagttgaagcagtcgctgacccccgtccccagcgggcccgggccctcactccatgaaccacacggggtttatttgcggatgttcctggagagctcgctttgtgaagaaaccatcagcaggctgtagagcatcgccaggctcgattgtgggggcagggaggcagcctcagtgtctagggcccgcccactgacaccagccgtacctagtgtcgtgccacggtgccccgtagcagcaggtcctgcggccaaatctgtctcccgttcatgggcctcaccagggaaggaggaagccctgctgttgcagacacctctgtggccccccaggagtgtgagtggcattggggagggggccgtggcactgaggccgaaagtgcctgccagacggcacggtctgggtgcgggtgttccctgtgagcccgagtccgcttcaggaggggagcctgcaggtgccggctggtgaggggatgacagcgactgtgggtgggaggaggcagcgcccatctcagcaagcaccaggactgcctaaaactccggcaacccagc

SEQ ID NO: 535841 - DNA, 321 bp, Homo sapiens
ctcgccccccttacccctaaaatcctcacatctactttgtatttttcaaattttcctctttgaaaataaatttctgctcaaaggaacaatattcttgctgaatgctttctctgtaaatgcttcacagttttgaaaacaaaggattgcaactccccaaattgtccccaagttgaaattactccctgcctagtcggtgtaacctttgcaaaaccagtctgtggtctctaaaaccataattgcgggcattgctgtggggatggagacccttgcgtgtgccttgtccctgggttactcgaaagagctctgaatttttagggggaa

SEQ ID NO: 535842 - DNA, 317 bp, Homo sapiens
cgagctcttaccgggtgcggcgtcggaataggcaccggatgcagctgcagtaaggtgggtcatgcaggaagctgagggaggtggaaggccgtggctcgtggcattgccgcctagtcggggaagagcaggaagccggagaagacgctgtcagagccctggatgcccaccatgtcgtagtagacattgacagccagaccagctcctcgccacctgcaacctcagcagcacaccggccgagtagacctgattggttttggacgtgtggacaccagaaggtgaccactttgacgccgctgcggaacagcagcacgcacagg

SEQ ID NO: 535843 - DNA, 279 bp, Homo sapiens
agactctaccttagcacaatgacgtcagaagtaaaaaccatggtgaaacagttgaaagcagtacgaaagcacaccaactgagagcaacaaacaaatggacgaaaatgaacaaggagatagcagcatgtgagctacgtcatctctcaacatgaagccaaaatcaagtcattgactgaataccttccaaatgtggaacaaaagaaaagacagaaggaggactctgtcgatgccctcagagaagaactagtccagcttcgagcacaagagcaagtccatgaa

SEQ ID NO: 535844 - DNA, 471 bp, Homo sapiens
gtttgggcagacacgagactacaagacagatggcttgcttcttaatccaaggttcttcttataccaaaagaacaaagaacgaaaaaagccacaaaagactcaaagagaagcagatttcccaccacagcacaacctcagaacaattctgagttgctcattttaagatcaacgaggcatttatagtgcatgtatgcctgatagaggaaatcaatgtgaacggcaaacttccctctaaaacagcctaatacaacactggtccaggaggaacaaggcaaggaaaccccctggtgaatgactcatctcaggaagaggcagggcagggtcaggagagtctatggaggagaagacctggaacaagacctctctctcttgctctcttacacacacacacacacaaacacagacacacacacacactcacacctctatgagcacaaatctatgaatagagagcctcattctctgacctca

SEQ ID NO: 535845 - DNA, 152 bp, Homo sapiens
gatctcagaggttaccaggtagactaacccacgttgacgtaaccaggtagactaacgtctttacgtgtgtacttgcgcttactttgtagccttcatcagagtttgctgaagataggcggatataggctgagcaagaggtggtgaggttgatc

SEQ ID NO: 535846 - DNA, 1914 bp, Homo sapiens
  misc_feature (180)..(180): n is a, c, g, or t
  misc_feature (426)..(426): n is a, c, g, or t
  misc_feature (1006)..(1006): n is a, c, g, or t
  misc_feature (1471)..(1471): n is a, c, g, or t
attcctttaaacttgtcggtggacagaacgcggctgcaccacagccttgtctgtctccatgttcggccctatctggtcacatgctcttaagttcacctaagacacgaacttagtggtctgatagtagatgacaactacattcgccaattccgatcagatataggctctacgaggcatagngtagaatacgcgaagatatggtctaagtggcgtagccaggtgtagcgtctatctgtcctgtgcaatagtgggcatctcatgcaccttattagggaccctgtatttgtccaacgttcgaagctaaaccgatctcatatagtggggagaagcgaagatttgagactcactatacaattcagttctcatcttgacagtttgaggaagcaggcgcagtctagagacaaaagcttcaatagtcgcccgcanagagactagtagatatatagatacagagcgtctggggacaccccctcaactcaggaatcaaatttgaccctgacaaaggtgtcgggcccccatagtgccaatactcatagctctgtccacagaacgtccttctcaatgtcgctatgcaagacaggtgcgttcctctcatacatgggcagacggctacacgacatgtacatgaccacaatatagagcactaatttggcccccagtagcgggtgcctctatcacaagcccgaacttggcggcccccgcgggcagaaataccacctgtgggaacaccttttgggtgggttataggtagaactccgtggaaagtaataacgggacaacacgccccttaggagcctttagcaaacgcgagggttggctaagccccgtgtattctttttgcgagcggcgacctatcccttaaggcgtttcatcttagaccacgagacactagggcctacataagggcggctcggtgaaggaggggacaacaaccatacgtggttttacctaggggtaggatttaccaaaacgccttgcaccccttgaaaccttgcgtctgtgtggnacacaccggtttacgttccttgccaccattaatgggcacttttcagttgcgcgcccctaggggaaaagattacctcaatagggccttgtgcacgacttgggcacgtacccccacgtatttacctccccgggggaccaaaacctctccttagagggtattatcccccgacgaagccatgactagagtgtctatgatattaaaggagagccctcgcttataaccgacagtttccccaatatttccctttcaatcccagagccgccaactgaaaccgcagccccctgggtgaggtgcaccaatccttgggcatttgtgctatgagcccattatcccaattgggtgtttagacaccacaccctggaaacgggggcccataccttaatatgtgaacccaaattcctgggtctgggggttgagaaacaggccccttgccgctaatctaatctcacaggcgggccgccgcanaagcctagatcgcatcgtaacagcacgttatatagccggcccttaattagatggccggacagcaaagtagggtgtactccatcaccgatatcaacatgggggctaccaccctacagcgaacaattgcgactaggttgggcccccgctagaagtgtttgtgtcactgctgaccgatacgaaatgctcgaaaccacacaccggtggtgtatcgccctaacaccctcggtaattatccagttgctcccctaaggcgggccccaaatatgtccccggctaagacccttcgcaggcaacaaccgctcacactgcagacacgccgttgtcctgcgacagagaacgcccgagccttggtttagtaacgccgcaccccccagcgactactgacaccatcccggcgacacaacatactgatagcctagcagaacataagagagcacggcaac

SEQ ID NO: 535847 - DNA, 310 bp, Homo sapiens
gtggaagagggtgtgtctccgagccagcccagcatggacggggattttagacggccatcgcgaaggaagggcttccagccggttttcttgaaggagtctttcctggaccctggggccaccacttaattaatttattaccggaggagttgcttataaggtcaaacacgttgagagacattctctgtcaccccgtggaagtcttttcaaaccgattttcccaaataaaaagccctttataagaggaggatcccgcccgcgcgcaccgccgctgggttgagacacctcgggcctgatatgcagagcaccatct

SEQ ID NO: 535848 - DNA, 231 bp, Homo sapiens
atggtggcgcatacatcctcatgcaatgggtttttgatttctctccattccaggggacatgggtggcagaatgctcattaagatatgtcgttagcggttaaccctgtgagcccctcatagagtccgtcccctgaggtggcacaggagggcagcacataccagttcctgtcccgaatccgggtcaaggaccagtttctcatcctatgggacgcagtttctcatccatgggag

SEQ ID NO: 535849 - DNA, 388 bp, Homo sapiens
ggccccccccccttttaaaaaaaatttgcccccccctttggggggggaaaatggggggcccttttcttttttgcccaattttttgccccccctttggggaaaaaaagtttttttttttttttttcaccccccggggggggggggggccaaaactttttgttttggttttggcctttttaaaaaaattttaaattttacccccggccccaggaaaaattcccttggggtttttggtttagggggccccctttcccgggggggaaccaaaaaattttttttttcccccccctgggggggtggggttttttttttgggaaagtttttttttttgggagacccccttttgttttgggggttttttccaataaaaggggccccttttgcccca

SEQ ID NO: 535850 - DNA, 1006 bp, Homo sapiens
agcggggttggcggcgggtgccgcgcgcccgagcgggccggtggtggcggggcctcccgcctcggtccggtggtgtgggcagccgtggcggtcgccggtggaccgcgaggggcgtgatgaatagggagtggggtccgtgctcccggtcagctgcagaggagcagacgaccatgccctcgagataaaattggtctcgcattgaatctcgagcggtatcagcccagatcagtgcattgccttcactctttgcgggggcatgctgggggtgctggatcgtttgagcttcaccgatctgccgaatgctgggcgtaacttgtgcccacgggaaggtctgcaccgatttgcacgcacgggtgacttacacccagacgagatcccatgagggcaatgacgtagataacgaagacactcacttgaggcccaggctgccaggaggcgagaagggaaccttaagaagtcattcagggcacgcgccgccaagagggggcctagcaacatgacaatgagcggacttgacgcagagcacagagacattgacctgacgccaggatgcaacgcgtacactatttggcaaacaagtggatatcaggaagaaagcgggggaacatggactttcacagttcaatgggacacagaaggttatgccggtggcgtgacaaggagaaggcttagaggataccagttgtcaaaaaatatcgcgggcgtagacagcttggaaagcaagaccaagggtggcgaatgttagccagccttgggacgactcgacattcatagacgggatttgctcattggttggaccagcgggatccacagataggctgaccacatacaggagctagcgagagttggttggaccaatagaggcggaaggaacaggcaggcgggcggggctggaggggaacccagtggccaccggggtggcggccccctttggagccgggcgcagagggcaatcgcaatgggagcaagacggctcctgcacggacgttggcacacacaccctggg

SEQ ID NO: 535851 - DNA, 615 bp, Homo sapiens
tggggcccagtctctactaaaaatacaaaaaaaaaaattaggcaggcgtgatgctgcatgcctgtagtcccagctacttaggatgctgaggcaggagaatcacttgaacccgggaggcagaggttgcagtgagccgagatcgcgtcactgcactccagcctaggcaacagagcgagactccatctcaaaaaaaaaaaaaaaaaaaaaaaaaacggggggggggggcccggcgggggcccaccttgggggggcccgggggggaagaacaaataggaggcgccgaggagacgtctcagagaacccggtctggggggcaacggtgggagttagaacccccacttgttctactagtaaaaatctacaacaattatccgcccgcgcgctgggtgtggggcaccgccgtcttgggggcccccacgagccaattttggggagcggcggcgagaaggcgggaagagcaccgcgggaacgcccggggggaggcgcggcagcgcgtcgggggcaagcgcagaggaggagatgatccacagggtgggacgcccgcccaggcggggggggaccacacaagcgagtgaaggacctcccggggccctaaaaaaaaaaaacactcacaaa

SEQ ID NO: 535852 - DNA, 808 bp, Homo sapiens
taaaaggcataggtagctgaggcatgggagttagaagagctgaagcaggcgctcttgggtctggagcggcccaggtgcagtccagtggaggaacgcgcctgcgagaccaccatcatgccatgggcacttaggggaaggcttcggctgcgtggtcaccaaccgattcgaccagttattatgacgacgaatcggaccccttcagaggtgctgaaggcagcagagaacaagaaaaaagaagccggagggggcggcgttgggggcccatggggccaaagagcgcagcatcaggccgcggaccagacacaactccaacgcggcaggcaaaacagctgcgcaaggagtcccagaaagaccgcaagaacccgctgacccccagcgtaggcgtggttgacaagcaacagaggagacgcagccgcccgtggcgcttcagacagaaggaataagacgcagtggaagaagacctgatcaacaacttcagggtgcaagggcacacgtcaatgatcagaagacagaaaggcgaccacctcgtgaacgaacattcgagaagccacattgacagaacacgggtgcaggcggcgaataacaacaagatcgaccgattatggcaccggacctcaatcacagcgacgcggcaggtctggcaacagggacgcagggggccggagcacgtggcaaaggggccgaggacatggcacacgaaccacgagggcaacagtggaacttgcacagcactcgaggcactgacacacatacccaccactcaccgcggcctgcgacacagacacaccagcagcgcaaagacacacag

SEQ ID NO: 535853 - DNA, 114 bp, Homo sapiens
ttagaggatctttacagcatcctaaccagaggcaccgcattcccgaacagaggcaccgcatcccccgtggttgcgcctggactgctgacgcacagaggcagaggtgtgtttact

SEQ ID NO: 535854 - DNA, 882 bp, Homo sapiens
tgtcgttacgtccttggcttggcgtatgagtacctgcggccccgcctggaatggagtcgggctgcgacagagacgccctgagtgggccgggatgggcgggcgtgcccgggctgcgccagaagctcgcgccgttagggactgagagcacaagtgcgccagcgcgggcttaggggcctgtgggccaagtgcggcacttggggcgagcgcagagaggcggggcgaggaggccacgtggccggcttgtgagaggctgtccgctgtggacgaggggcgccgggagcactgtctcacggcgcatcccggtacgtggaagcccctcggccaggctgctggggcctaagggccgtgtgtatgctgccgtctccgtgaggaaaccaaaacattctgaccaagacagataactctggacctgaaagacctacgtaacaccacgataatttgtcaagacacacagttactgcacacaatcagcttaagacaacggaggagataggcacaaaacgcaacaacttaatggaacattaagacgctaagatgaagcacgtgaaagggaataaagccataaaaaaattggatacgaaaaatattcctaaagcacatgagaagatctgggatctcgacagaagattcaaaaattattaacgaacggcagaaaaagggaggattctacgaaagacagaattaacggggcccatataggcaaggttgactccgcggcacaggaggagagtgaccaggataatcctccgggaacatatgcaaggaggccagagaagaacaatccagaaaataccgtggttggaagactcaggcccggagccaccaaggacaaggaaaaccaggtaaacaacgacagacggaataccacttgaagtggaaacc

SEQ ID NO: 535855 - DNA, 1474 bp, Homo sapiens
gagacagagaactgagtctcgagtttcccggctggccacaggtcgtccgctccttacccggtcggctcacacaccggccctcgagtgccgcaccgtggagtccaagatgtgctgcaaagaacaccaagcttactcacgagtggtcctggcccgtcaacacctctacatgctactcagggacagacattgagaaacacggcttatacgacaacctgggccttagaagtaccactcctgccatctggaaccccaaattgcacggtacgaggacagatgttgcacccccatgactattgcgtccgaagaccttaccgtatacgctctcgtcgtcctgcattgtcaacacgcacaccccgtggtgaccttcattgcttgagccaaggaggcgtcagtggacgccaccccaggggcgcgacccgaaactctagggtctcgccgcaaacaagagaggattgatcgaggatgccaaataagcgggcattcaaacacccactagtgaggaaagcccttacctaacgtgcaacttaagttgataaccccttcccacggagccattgcacccgaggaaggtggcgaccatcgacacttagccctagcgaaactcaatccagacgaatgcgtcatgacacactccctctttcttgaacaaacagcgtgtgtgtcataccaccccagaccagggacgatactcattttagtagctgtgcccacaccgagtgacgcgcacgccacaaagcatatgtcggctgctgtgagagaccacccgcagaacgactcatttctctcttgcgttcgtgagaggtaagcttacagtacacgcccgcctctaattatttagtagatagcacaccagtcccagcaatatgttcatcgcggcaacaggttaggcctcgcaccaccccgacgcggcggcgtgtaaatctcacggccgcaccccacagtatggagaactcggcgctacgagtgcacaaaccaactaccacatggtcgcagttgcgcaacacaaccacaataccatagagtttccactcaccgcaacaccaattctagactcctccacagctccgatcatcaccttctccgtcccactatactaggacccacagacactagtcaaacccacaaacaacgaccacgcaacctcctaccgcgccaggccacagcctagcaccaacccaccgatcgacaggcaacagataggcatttagtcagtcagtcaagatacactacaacttcaagctcaagcccgcgctactagagctgtagtactgagactacctgtgcgcgctagacaacagtgaccacacaacacaaaacaccaaacagaagctgaacgagccagcaccactgcccgcgtggcactaatcttcatgcgtactccaccggcagcgtcgtgtatgacactctgtaaaccacacactaggatcgtgccctcgatcatacgccaagtcagggcgagcccaccactttctgt

SEQ ID NO: 535856 - DNA, 334 bp, Homo sapiens
  misc_feature (314)..(314): n is a, c, g, or t
gcatgggcttcagcacgctcgccacctccacaacagaagtcccaggagcagagatggaacggtctgagcacacagcgtttacatgcgtgcacgtcgctggccgcctcacgtcccggacagcgggaccggccatcgccgcccactcccaccgtcctaccccggcaggggcttaccggggccgtttcaggctggagaaacattcccactcccctttggcctacgctgtactctgagctgtgaatatttataacctgtaaatacggccagctcttgtgacacagagactattttatcaattgtcagtcccgttccantaccagaggattctccacat

SEQ ID NO: 535857 - DNA, 200 bp, Homo sapiens
gtcctgccctcctgctgactctgctctcagatgtggagacgctcctgctctcatgcttggcctcatggctgtgattctgccttggcttggaccagggcctgggaatgttgaaagaaaacgttcttctcaagaatacaaagccagtgatattttcagcaactttcctgtataattctttggatgaataaagcctatttact

SEQ ID NO: 535858 - DNA, 208 bp, Homo sapiens
ttgatatggctgtctcatcacgaaggtgccaatcagccactaccagttagtaggaatgggtactgggagtgagatttactggtatctcagaaatagaccatcatagagctgcatacttgaatcatatggtctgggtggcctcatagaatggtttacattcaatcaggcatcgggtttggtccaaccagctttaacattaaacaaaaaa

SEQ ID NO: 535859 - DNA, 1351 bp, Homo sapiens
ggcgcggagcctgggcggagctggcttgctggctccgtgggccggctctccggccggagacatggccctgttgtgccctgtgccctgctagtgcaaggcctcgccccgatacggtcgccatgcccacagagaggaaagctgactcaatgttccggtgcccacgactgcctgctccgcgcgagtgaccgtggcggattacgccaactcggatccggcggtcgtgaggtctggacctgagtcaaggaaagccgtagccaacgctgttcagcgagggaagtaaaatctcttatgtggccttggaaggcctctcagtgttcctgcagaggaagctctttctggggctaggtgagccctgtgacatcatcgacagcagtgatgagattggatgcccagtgaggaaatgcatccatgaggagaacctgtctccagaaaacaacacacgacaaagcaagaaggacacaaagaagaacctggacgtgggctggacggatgaacgacgtatcccatggatactatagggctattgcttggcgctcctaatattccggtccttgaggaccattgtgcactttttaccctgaatatgtaaagacttgccttggactggccacttgcactggttgccttatgtgggagccagggttgtacctgcaatgtgcacctaacaaggcttgggcatgcttacccttggcgttatgccgtcttgcgaccaaggcatgtccaatggcagaaatgcttggggcatgtcactcccggcgcctagtcaggtagaatcccgcatcttcttgttaccatagtggtatgacgcccaatatgcatggctacgaaagcttctcccccgaggaaaattccagggcgcttttacgccagaacataggcgaccactctaagtgcaccatatttcaaacgggaaactttgcccacgaagtgtgccgtaccctatcatcacttgtgttggccagaacacgcgcaattggatggggagaaacacgaacacttgcgtacactcacaatgttgggacacagttcacgacgtactccaaagggtattccggagaagcacgtgctaggactccgcccactagggtgttacatactagagtcagcaaggttgtgtacacgggggtgaggcaatgtcgacggccgacccaaggtttcactgcgaacccactagcgaaatggctgtcaatagccgcaacttcgcagagtaagtacagtggaacacggcttggcgtcgcaagttggaggtttacagcaacccgtctaacttatatctaattcaataccgggatcgttggactggggcaagtagtcacacatagccacagcagtcgttataggaatccatatt

SEQ ID NO: 535860 - DNA, 801 bp, Homo sapiens
ggctggtactggcccgggagtttgggatgcacagaggaaataatgtgtcattcaaagctcagcttacagacacagccttcataacatagtaagcaaccatgggctgttctgtgctcctgacaacttcaactgttaccttgaagttgggtgaaatagcagaaacaggctgcactgaggtcttactcttcaatagcttttattgttatgcctgtcagaagtcaaaccacaacccccgagccttcacccaccttaccccgcgagaccgtcccacgatgctcacgacttagaaagctttcaggtaatggccgaacagtcaaggcactgtgataactgagaagctgctaacagagaaatggtacactccataagaatgaagagcatcctcataatcaaacatgactgacccttggaagccattccgtgaacacaccaggctctgagtaaccagcaaggactacatctgggccatccaataagcagatcagcagataccatttagaaagtgaagcactcaccagatagtgatcagcgatggcgaacgtacagtcactaaaggaagggcaatacatcacaaaagtcacaccccagtaggggatacaggtggacacggtaggctcatgcatacaagggcataccagataaagatagagagaaaacacgaacatagaacagaaaggacaacaaccggcacagcaaagaattagaagacaggggatacgggcgcagcaaatgtaccgaaaggagaatgcatgaagcgatatgtaaaaggcgataggcgtgacattagcagaaagcgagaga

SEQ ID NO: 535861 - DNA, 208 bp, Homo sapiens
actggctgtcactacgtgggctatgtggctgattgaagagtatgcactgagcgatctcacggtctgttgcgtcatccgcactatgtagcttgtcataacttatgcctcatagggatagtacaatgaaagtgtacgctatgtgtttagtcaggcagttgacaatgagtgtgaggcgtattataccaagcgccgtcgcctacgcacggca

SEQ ID NO: 535862 - DNA, 586 bp, Homo sapiens
tttaatatgcggagaatgtatattgcctctgctcctatcagggttgctaaaccctggtacatcgtatataaaatgtattaaaactggggtttgttaccagttgctgtactttgtatatagaatttttataaattgtatgcttcagaaataatttatttttaaaaagaaattaaaagttttaaactcacatccatattatacatttcaggggggaaaggtgtaatatggatgtgagtttaaaactttcccccctgaaatgtatagaatccatttgtcatcaggaatcaaaacccacagtccattgtgaagtgtgctatatttagaacagtcttaaaatgtacagtgtattttatagaattgaagttaacattcttattttcaagagaatttatggacgttgtagaaatgtacaaatgcatttccaaactgccttaaacgttgtatttttatagacatgttttttaaaaatcctaagtttttaaataactatggatgtgtgtatttcggttatttgttattaaaacatgtacatcagtaaagagtgtttacaaaaataatacatatacccatactacacaacaagaga

SEQ ID NO: 535863 - DNA, 253 bp, Homo sapiens
ccttcctcgggtaaggcagtgcgtgcctcgtctgaatattgatcgtggctgttgggttgatctttgtgtgtctggcacatggccctgcgatgttttaagtcagggaaattactgccgtggtgtctgcttgagcaaatgggcagctgtcgtactcccaacttctttactcaattgcggaatgaggtggtgatgcgagaggcagtgtctttctgggtctgtaagtccctggaaaatggcaatgtctgataagata

SEQ ID NO: 535864 - DNA, 320 bp, Homo sapiens
gtcgacatttcttacctctatttctttgcgtgtcagtgtgtgcactcatgcactcacacataggtgccacacataggtcccacacatatggaggtcagaagataactgtcagcagaaggcccccctctctctaccatgtaggctctgggaatcaaacgcagctcatcatgtttggcagtagggaccctatggagtcatctcactggctccagaactctgtgtttgaaataagcttttcaggtgattttcccccctagctaggcaggcctctcgtcttagcaccaatagtcgacgcggccgcgaatttagtagtagtaggc

SEQ ID NO: 535865 - DNA, 145 bp, Homo sapiens
gattcctatccgacagttgaccgagtcagaacagaaaaagaaaaacaaatttaaaaaatgagaatattttaagggatttctgggacatcaagtataccaacattcacattatatgcatcccagaaggagattaataagaggtttt

SEQ ID NO: 535866 - DNA, 289 bp, Homo sapiens
aagaaataaaacagactgataggaagctctcagatcacgccacgaaccagaccccacgtgataaacctcttccctcctaggcttaagatatcagctggttgagaagagctcttcggacctgttactaccccaagctgtgtgatatacttgtctaacagaaataccttctataccaacctttttttctactattagatagaaaagtctacttttacagcagttctgtgaattacagagcagagtgactgtgggtctggaatggctggtgtacttcggaatgtactatcaa

SEQ ID NO: 535867 - DNA, 177 bp, Homo sapiens
taaaaggtttttttggcccccggtttttggaaacccccccccccctttttttttttggttttggggaaaaatttttttttgggggggaaattttgggggggggggggaaaaggggggggttttttttttttttttttttttttggggccgggcccaaaaaaggccccccccttttta

SEQ ID NO: 535868 - DNA, 97 bp, Homo sapiens
tgttctagaggatcccggtgtgtcctttgtctttttttaatggagtgttagttaccccagttacagagctgaatatcatttagagcattatgctacc

SEQ ID NO: 535869 - DNA, 211 bp, Homo sapiens
ccctatcacaccctggctatttttttttgtatttagtagagatggggtttcgccatgttggccaggtgtggtgatgggcgcctgtaatctcagcctctcaaagtgctgggatcataggcatgagtcaccacacctggccaaacgtggggatttattgtgcctattttacagtttggcgaactgaggtctaagcagctgcaaacacacaatg

SEQ ID NO: 535870 - DNA, 190 bp, Homo sapiens
aaagagacgagatgttgtggatccatctgaaatcagccgctggtgtgcgtgcttggacgggtggtagtggacagggtggtgcctgggaggatcttgagcgttctaaatgctaattacacagtgagctttgggctatttattccatgagcttctcgtctcttctcttgtacatctcgtctcttctcttgta

SEQ ID NO: 535871 - DNA, 232 bp, Homo sapiens
acctgaggtggctcttgctctcctggggtgaaagtgcctaacagtcaccatgcagtcgttcaggtgggcaagacatttggtaggagggctgaatgaatgcagagtctcgtctttttgtgtacataggaagcctagcactctgaggagtgacgagaacaagctcctggattgagtatggggactgagcccacttgcgggacctgaagcaggtcacgaggagaataattggggc

SEQ ID NO: 535872 - DNA, 202 bp, Homo sapiens
  misc_feature (12)..(12): n is a, c, g, or t
  misc_feature (92)..(92): n is a, c, g, or t
  misc_feature (94)..(94): n is a, c, g, or t
  misc_feature (107)..(107): n is a, c, g, or t
  misc_feature (115)..(115): n is a, c, g, or t
  misc_feature (120)..(120): n is a, c, g, or t
  misc_feature (192)..(192): n is a, c, g, or t
agacctactctnccctcaacttccgagaaaccagccctgagcaaaggggttctaaggtccataccaagatgacggtaatgatcagaccatcntnacacggaatgggnaggtcgtnagtanggccacacagcagcagcatgaagtgctctaaagcagagccctctgccaccagagaccgtcctcacccctganctcccggaat

SEQ ID NO: 535873 - DNA, 631 bp, Homo sapiens
  misc_feature (1)..(1): n is a, c, g, or t
  misc_feature (8)..(8): n is a, c, g, or t
  misc_feature (19)..(20): n is a, c, g, or t
  misc_feature (24)..(24): n is a, c, g, or t
  misc_feature (29)..(29): n is a, c, g, or t
  misc_feature (32)..(32): n is a, c, g, or t
  misc_feature (44)..(44): n is a, c, g, or t
  misc_feature (51)..(51): n is a, c, g, or t
  misc_feature (60)..(60): n is a, c, g, or t
  misc_feature (62)..(62): n is a, c, g, or t
  misc_feature (85)..(85): n is a, c, g, or t
  misc_feature (111)..(111): n is a, c, g, or t
  misc_feature (118)..(119): n is a, c, g, or t
  misc_feature (130)..(130): n is a, c, g, or t
  misc_feature (145)..(145): n is a, c, g, or t
  misc_feature (154)..(154): n is a, c, g, or t
  misc_feature (158)..(158): n is a, c, g, or t
  misc_feature (161)..(161): n is a, c, g, or t
  misc_feature (184)..(184): n is a, c, g, or t
  misc_feature (201)..(201): n is a, c, g, or t
  misc_feature (206)..(206): n is a, c, g, or t
  misc_feature (215)..(215): n is a, c, g, or t
  misc_feature (224)..(224): n is a, c, g, or t
  misc_feature (233)..(233): n is a, c, g, or t
  misc_feature (239)..(239): n is a, c, g, or t
  misc_feature (243)..(243): n is a, c, g, or t
  misc_feature (248)..(248): n is a, c, g, or t
  misc_feature (251)..(251): n is a, c, g, or t
  misc_feature (273)..(273): n is a, c, g, or t
  misc_feature (280)..(280): n is a, c, g, or t
  misc_feature (282)..(282): n is a, c, g, or t
  misc_feature (293)..(293): n is a, c, g, or t
  misc_feature (302)..(303): n is a, c, g, or t
  misc_feature (309)..(309): n is a, c, g, or t
  misc_feature (311)..(311): n is a, c, g, or t
  misc_feature (330)..(330): n is a, c, g, or t
  misc_feature (333)..(333): n is a, c, g, or t
  misc_feature (338)..(338): n is a, c, g, or t
  misc_feature (344)..(344): n is a, c, g, or t
  misc_feature (346)..(346): n is a, c, g, or t
  misc_feature (354)..(354): n is a, c, g, or t
  misc_feature (381)..(381): n is a, c, g, or t
  misc_feature (406)..(406): n is a, c, g, or t
  misc_feature (408)..(408): n is a, c, g, or t
  misc_feature (422)..(422): n is a, c, g, or t
  misc_feature (429)..(429): n is a, c, g, or t
  misc_feature (432)..(432): n is a, c, g, or t
  misc_feature (447)..(447): n is a, c, g, or t
  misc_feature (456)..(456): n is a, c, g, or t
  misc_feature (458)..(458): n is a, c, g, or t
  misc_feature (484)..(484): n is a, c, g, or t
  misc_feature (495)..(496): n is a, c, g, or t
  misc_feature (518)..(518): n is a, c, g, or t
  misc_feature (535)..(535): n is a, c, g, or t
  misc_feature (541)..(541): n is a, c, g, or t
  misc_feature (546)..(546): n is a, c, g, or t
  misc_feature (570)..(570): n is a, c, g, or t
  misc_feature (617)..(617): n is a, c, g, or t
ngccaaantttttatttannattntttanttntttaaaaaaaanttaaatngtcttattngnggaagggaaaggggaggttcttncaaattcccaaggaaatttcaaaaangcaaaanngccaacattanccattttcttttttnggtttactnggtnaanaacactttccttaaaaaggcatnttatttcaggtttttcntactnaaaaaattnaaatttcanttggaaaanaccctnaaancttangantagcaaaccccaaccacccccnaaaaacnancttttttttanaggtaaaannattcancnctccattttaaatggctanatnttttntggaanancttaaaantgcctgcctcatttgctgggaaaaaanaaaaaggaagtggcctttaggggananttttacttggaaanttacaanacnagtacaagtcttaanacatttaananttgctttttgaaaaacaatgcgaaantcaaaaaaaannaaacatgttttacttttttccncacaaaaacaaaaaaantatggnggggnacttaacagggaatttaaaaaaantaacacaatttttccttttagtagtccttgggtagttatgaaaaaanagtttccacttttt

SEQ ID NO: 535874 - DNA, 198 bp, Homo sapiens
ctagaggaccccccatcagcagttgcatgaataacaggcaatgtggtcatcatcctcgtgtacatcattacacagtgcataaaaaagaatgaaataatgtcttttgcaacaacatggatgcagctggatgcttttatccataagcaaattcaggaacagaaaactaaatacatatactcacttactgatgggagaaga

SEQ ID NO: 535875 - DNA, 407 bp, Homo sapiens
  misc_feature (195)..(195): n is a, c, g, or t
  misc_feature (252)..(252): n is a, c, g, or t
  misc_feature (356)..(356): n is a, c, g, or t
ttctactgaaccctcaaccacaaccagccagcagtgcaactgaacagtctgccaccacaactgcaggcacttccactgagacaacaaccacaacagccaccactgccacttctgctgaacccacaacgacaaccacagcaagcactgcgactgaacagtctgccaccacaactgcagccactgctactgaggcancaaccacagcaggcaccactgccacctatactgaacccacaaccacaaccatccagnacttacaactgaacagtctgccaccaaaacagtaggcatttccactggggctacatccacagcagtcaccactgccacttctaccaagacacccaccatgaccnacccagcaagcactgcaagtgaagagtctgctaccacaactgcagccactg

SEQ ID NO: 535876 - DNA, 693 bp, Homo sapiens
tgggcgggaggagtggcagcgtgcaaggcagcccagtttcgcgaagggctgtcgtgcgctgccgatgggccctgcaggcacccgggcacgcgcctttccccgcaaggcaacccgggaacgcggctttccctcggcgggccaaggaatgctccaaagaaggcacgggtcagcttcccgacacgaaaagggcgccgcccaaacggaaagaagccccaaggaagcgacagacatcgggcggcgaggtatggttcaggttaaatctcttcttgtgcaacggtgtttgggcccaatgcggtaaagcccccgaaaaaaagaaggggcccacaccagccgaagcgggtatttaacccacttccttgacacgaggcaacccaacaagatgtgtttgccaaaagccccactacggcgcgccacagagcgcggtcgacgcccaaaccgggggcccccacatgcgaggaccgcgaagtgtggacctccaccccacaccgacacaccactacagcgagaaaggaatttacaccgttgtgcgggaaaccacagcgggggggaaaaagcaggaacagacacttttggagtgccgagactgttccccacggccccctctgtgtattgagacaagcgcatggtgcaatcaaccagcgcgccaagtgcccacagaggttgcagtggctttataatttacaacccgatata

SEQ ID NO: 535877 - DNA, 174 bp, Homo sapiens
tgccgtccaggctgacctcgacaccttgggctcaaaccatctgcccacactggcctcccaaggtgctgtagcatctcttcctcaaagatgagccagccgtcattcgaagaggaggaaaaactggactggggaagaatctggggcaaaatgaagccaaaccgagaacgaggagaa

SEQ ID NO: 535878 - DNA, 314 bp, Homo sapiens
cctggagatgatgagtatgtgtatcataagatctgcgaatgaagcataaaaggatgatgactgaatgcagggatagactgtgctggtataatatgcatgggaaagggggagagtgtcatatggcagttaatcaaatgtgaatcacaggatggtgagagaaaaatattctcaataaaccctttaggaattggcaggttcacagtaaagcaaatttggaatattggtagaaatgcggaatcgtgggatcatcagagcgatgaaaagttagttgtcagaaaagggtaaaaggtgacatatccatatacagtcacgta

SEQ ID NO: 535879 - DNA, 677 bp, Homo sapiens
ccagggttatatatataaaagtcaaatccactaccatacaggttgacatgtcatgacaacattttcagttgcctatctacattagctaatgtgtgacatgtaatgggacaagcgtgttcacatttgattgaaataagcataaagaaaagctgcctccaaaaaagagaaaagctgtcttaaatcatgggttttatagctccagaaatatacaaagtaaggaatctcttatgacttgaacttggagggatacctgtataactgatacataacacacgggcaaactgggggagtaaccaggttgagttaatcttttctcctcagtttcgaccaggtaacagtaatgggtaccgtgagtcgtttgaaaaagaacttaaccttaaaaactagcaaaataacattctcaaataattaataaagaatcccagtagcagaaatgttttaactggcatgtttcttctttgtccgctaaaatgtattgacaccacacatggaataatgcattatgacaataattaactttttgaagttaggtgtattgagagtatgaaatgaatgaataagataaaatatccttgcatatgcatgtaagacctataaggaacgcagtattgaaaataaaggaatcaaattttacccatggaatttaggggtgggtcatcatcattatcttaatctat

SEQ ID NO: 535880 - DNA, 357 bp, Homo sapiens
ccccccccttaaaagaaaggtttaaggtggccggggcaaggtttttttttttccgaaagggcccccccctttccccaggggtcccttgggcctttttggggcccaaaaaggaagggttggggggtggggggagttttccccccccccggtgaaaaaacccttttttaaagttttaaaaggggtcctttggggggacgggttcccccgggcccccccttttttttttcccccctttttggtagggcccccgtaagaacccgtttgaaagggccccccccccctttccccctcccgggggttgggggggaaaaaaaggggttccccccccccccccggtggtggccgggtggggctcca

SEQ ID NO: 535881 - DNA, 1104 bp, Homo sapiens
  misc_feature (344)..(344): n is a, c, g, or t
cgttgagagaagtacgaggaagtgaggggactagcaagacagttcctcgagagtaggccgatggacgaggcatcggggttgaggctatttgaacagctcacatctgggccaggggctgctggggatgctcggatcagtaggatctgctggtagccaaccgaggacgaagcgtgaaagcagcagtcagaaggggaacggcatctgtgtggcccaacagacttcctgtggagtccctcatgcatgtgagcagcgttgaagttgcctctgcattacgttcaggccctgatcctaaagcccaggcgcgtctagcacccagatgagtcccatgcctttgggaatcccanggattgcgtagctccaagcgggagaagagtttgtacagttggggtgcgtagtcgaatgccatcagtcacaagggaccatgccagtcactagagcaggatgtgacgcgtccactgatcatgaactgctagggggtcgatcgaggagctggatccgcagtcattgggctgttctttttgggccgctcgatgcaccacttgccggtcagtgtcgttccctttctccgttgggcctggcgtatcctcgccacgtgagggaacgcgggtttgtacccatgggggaacattgactttccttccggagtccttgagcaccttcagctaaggaccgcagtgccctgtaagagttcctagattacctcactgggaatagcattgtgcgttgtccggcaaagggctccatttgggttccagcccaatccctctgcaaagtgcggagattcctcagagcatactctccagtggatccaagtactctctctctaaaagagaccacctttctgcaaggtgtttggccttagggcagtacacgaattacagtggggaagatggcagaaggcttcctgggactgtcccagaaatgtgattctcctgaaagccttaatgggccataaacacataaagaggggtcccatccaacaaaaaaaagacagggggcgcgccgaggattccccgagggcacaataacgacccgatatgacaaagagcccaaggagcgatatcaaacaggcgcgaaacagcgagggaagacaacgaaatgtga

SEQ ID NO: 535882 - DNA, 407 bp, Homo sapiens
  misc_feature (266)..(266): n is a, c, g, or t
cagtggtgcaatcacagctcactgcagccttgtcctcccaggctcaagctatccttgcacctcagcctcccaagtagttgggaccacaggcatgcaccactacgcatgactaattttttaaatatttgagacggggtctccctgtgttacccaggctggtctcaaactcctgggctcaagtgatcctcccatcttggcctcccagagtattgggattacagacatgagccactgcacctgcccagctccccaactccctgccattntttaagagacagtttcgctccatcgcccaggcctgggatgcagtgatgtgatcatagctcactgtaacctcctctggggctcgcagttctcccaccagcctcctttttatttttttgtacagatggggtcttgcttgttgc

SEQ ID NO: 535883 - DNA, 387 bp, Homo sapiens
aggagcagatagcccagcagatggttatgtctgtaaactagagtatgaagtcaggaagccctgtggctctgaggccacttgtggtatcattcttttcccatatcattgactatttagaaatggttaccttcaggacagtgcagctgcatttatcagagcactattgctaagttattcttttctggcttgtgtttttctgggacagtttagaattgggaggcctattctcatagaacaccaaaaatgatgttcagtgattcatttaacatacaccaatgtactctggctgctggggggacaaccataagcaagacatgcccagggtttgccgtggctccagatctactccctgtaggagttcacggatcacacaaacagtcataaccg

SEQ ID NO: 535884 - DNA, 118 bp, Homo sapiens
tggagatgaagtctcactcggtggcccaggcggtagtgcagtagcacgatctcggctcacggcagcctccgcctccttcaattctccggcctcagcctccggagtagcgggggatacc

SEQ ID NO: 535885 - DNA, 205 bp, Homo sapiens
ctattaatttccatcctttagcagggtgggccctaggcaggaagctggcttttgggaaaggagtgagaacgtgcagggcctgcctagcttgggtgctttaggaaggtggcattccgtgcttgcctccttgaggaggggggcattttgtgttttttgcttatgaagcgccttttttaaagtttggcaataaatccatttttatgga

SEQ ID NO: 535886 - DNA, 265 bp, Homo sapiens
aacaccagcgcatcttctaggtgactctagagtatccccttgcagtacggattgcacttactgcacttccccattattgtcttcaaaggatcggagctccaactccctttccaggcgtgtctcaagagttggcctatttcgaggatctcatccttaaagccactgagccccatatggttctcttcaacctctatgatgactggctcaagactatttcatcttacacgggcctctcccgtctcatcctgcattctagtcgctgccc

SEQ ID NO: 535887 - DNA, 650 bp, Homo sapiens
aaggttgaataatagtccattgtatgtatataccatattttctttatctgttcatctgcagatagaatttgggttgttcccacatttggctattgtgaatagtgctgcaatgaacacaagagtgcaaatatctcttctatatcctgatttcaattcttttggataaattcccagaagtagaattgctgggtgatatagttctatatttaatttggtgaggaatctccatattgttttccatagcagctataccattttacattcccactgacagtgtacaagggttccaattcttccacatccttgccaacacttgttttcatttttttaatgtcatcctaacaggggttaggtgatagctcattgtggttttaatttgcatttcctggattagtgatgttgagcatcttttcatatacctgctggccatctgtacattttctttggagaaatgtctattcaaatccttttttcgttttttaaccaggttatgtgttgttctgcttttgagttatagaaattccttatatgtattttggatattatttatcaaatacatggcttggaaaaatttttttccattctgtaagattggctttttactccattaaacatttcctgggctgtgcaaaaacctttttaatttgaag

SEQ ID NO: 535888 - DNA, 95 bp, Homo sapiens
gatatcgggatattattgtgtgaaaatgctgctttttctttgatgtgatctcattgatgtccacatccaagttccaataaagtgctagaatgtgc

SEQ ID NO: 535889 - DNA, 260 bp, Homo sapiens
taaaaaaggaatgaagaggctgaacgttgtgacagtgcgcctgtatcccagtctactttggaggctgaggtgggaggatcatttgagcctgggaggtagaacttgcagtgagccgagatcacatcactgccttccagtctgggtgatggagtgagaccctgtctcaaaaaaaaaagaatgtacattaaatgctatagcttagttctcccatgtggacttttaatacaggcttatgattgtccataggaattccatcattt

SEQ ID NO: 535890 - DNA, 187 bp, Homo sapiens
gccagcgggggccaatggatccgctgttccagagcaccactccactggtgtatctgtcccaacgcataacctgaacgtaatcacgaaggaacctcagacaaagcaaaactgagtgacagtctagctaaggaactggtgtgtgacctctcgcagagtatcgagatcataagaggccagggacattccg

SEQ ID NO: 535891 - DNA, 150 bp, Homo sapiens
cagccggtaccgttctttagacaaagttgtgacccattttactctggtataagggcagaaacggtcacattccattatttgtaaatgttacctgtctgttagctgtcattatttgtgctaactcatgtaatagaaatgaatgaggtgtag

SEQ ID NO: 535892 - DNA, 141 bp, Homo sapiens
gctaattgaacttgacttagtaggaccattgtgccaactcaaaacctggattagtaaaatctcaatgtttaggaacctttgttccatgggtggggttaacaggggaatgtaatccaacttgccccaggaaacccaaagggg

SEQ ID NO: 535893 - DNA, 113 bp, Homo sapiens
acagcaaggcccgtgtgagcttacagcgacgtaagcccaggagcaatggtttgggtactcactttcccctctaggtgtgccaggcgctggaggcccctagaggaaagatcagt

SEQ ID NO: 535894 - DNA, 224 bp, Homo sapiens
caactcccacatacaatcctatgctgtatcctactgccatgtgcttcagggagtaggtgtgcaagggacatatttcctccctccttccccaaatattttatctacttggagattctcaaggtttaagaaagtgctttgtgagaccgctccccacaagctttgcaactaggtatgaaacagggttatttcagacatgaaataggggggtggggtagttttgctct

SEQ ID NO: 535895 - DNA, 261 bp, Homo sapiens
ccacgacgcagttctctcgcatggtcgtcaaatacagcaacacaattttctataagtgtggttcggggggttgggaaaatcaacctcactggggtatagggggtggtttggggttgggtttttaatatttttttctgaaacagagtatggctcttgtttgcccaggctggtgtctcggctcacagcaacctcgggccactagattcaagcaattctcctggcccagactcccgagtagctgggataacaggcttgcacaag

SEQ ID NO: 535896 - DNA, 264 bp, Homo sapiens
  misc_feature (238)..(238): n is a, c, g, or t
  misc_feature (240)..(240): n is a, c, g, or t
catcagctcgctacctgttaggctgcagtgcattccagcctgcggtaacaaagtgaacctgtctcaaaaggaaaaaaaaaaaacaagaacacacagatgttcctggaaaaggaatgttccttgaggacccctggtggcattcaacacctggtggaaaaaggggaagggaacccggggtatgactggagagggacaaacctgggactggggatttatagcgcacaaacagggcattcancntgattggataaagggagattctga

SEQ ID NO: 535897 - DNA, 192 bp, Homo sapiens
acatagtattgatagtctgcctatctgccaggctatgtcggacatacttctggtgggcactgtgcggaaacttgaggatgaaatcagtgagctgcatgtcacttgacaaggcatggccgtgtctcctacacttcgagtgcaaggctccatacgcccaaatgccctgttgctgatcaattactcattgttaca

SEQ ID NO: 535898 - DNA, 326 bp, Homo sapiens
ccccatttttacaaaaaatttgtaaaattagccaggcatggtggcgcacgcctgtagtcccaactgcttgggaggctgaggtgggagaatcacttgagcccaggagttcgaggctgcagtgagccaggatcatgccactgcactccagcctggtccacaaaaagacactgtcaccccctttcccccacaagactggcaaaggctgggcagcctggggctgatgaaacaaaaatgttcgctggatcccaggccctggcacccctcaggaaatacaaaaaaaagaatattcacatttgtttaatgtgcataaagccaaggaaaggcca

SEQ ID NO: 535899 - DNA, 125 bp, Homo sapiens
aggccggtccagatcattctctcgccattcttatcttttggtttatccacatcatatagggcaccagtaacatccggtattgcagtgatgtgcatcctcctcttcccattatcctcgagcaccag

SEQ ID NO: 535900 - DNA, 878 bp, Homo sapiens
gcctaccagagccactagcgcacgaacagctcgaggggagaagcccttcctgtgcccgcgctgaggccgtatgttctccgagccttcgagccttccgtcggcagcagagcgcccatgaaggggtgaagccatagccactcgcgtagaagtgctggcttgaggacttcaacgtgcagtctcggaggtacctggcacatgcaccaggtgatgtgcaccatcaggcgactcggccgttctgaggtgcctgctaatggtgacaagtacgttacgttgtgcgttccttgtgtgatcctcaagacggactacagcggcttggtgcaacctcgtgtgctcagacggggccattcacggctgctgagtgaagtgcagggccgagaaccttcgcctgagcagttcgccagcacgtcaacgaacgcatagtccgaggtgcacgtctgcggcgtgagcgccccatttacgcgacctgtaatcagcattgtgcggaaatcctcttgtggtagtcagtctggagcctgaaggaagacacgatgcgagacctagtcgacagcctacgtgacggccagcgcaggttgtgcacccacatggcatcaagagaagcttgggtggacaggggggtttgggttgctttacccctttggtgagccgcgagttggaatatgccgtgaccgaaggtttcgaaaaatcgggcgctcccgggacgcacgacaggcgggagcggtagagggcatttgtgatggagaagccactaacccaaccaggggcgaatcgacgtaagagggggcatctctcccgcccggcgacgctcaagaggtaagagtgatttgacatcgggccacacagccatgtgaacccacagttgcgttgggcctaattaacac

SEQ ID NO: 535901 - DNA, 412 bp, Homo sapiens
ataagcttgcggccgccctgggtctgtgacgccggcgccagcgccacggtcggtggagcctcctaagcggcgcgatcctgcacgccctccgcgaccggcttctcccgcacccgcttctgaccgtcgcccaggcctgtcccttccccgctgactgccgccttttctttctgcaccctggatccccagggcgggactctgcgctggacccgggatcccacgagggccaccagcccaggggctcctgcccacccgcccttgggactaaaattcggctttgtaggagcgggtttggggaagtctggatagagactggacaaaggagtgtggccacagtgagaagtggatagcgccacagctgcggcgatggactcgttcataggaataaaatcttgctaacagcaaatgagcaaaa

SEQ ID NO: 535902 - DNA, 95 bp, Homo sapiens
ctaccccacggaggactacaaggtatacggctacgtcaccaactccaaggtgaagtttgtcatggtggtagattcctccaacacagcccttcgag

SEQ ID NO: 535903 - DNA, 481 bp, Homo sapiens
  misc_feature (108)..(108): n is a, c, g, or t
  misc_feature (124)..(124): n is a, c, g, or t
  misc_feature (476)..(476): n is a, c, g, or t
tgatgcctgtgcttccatctcaaaaaaaatcattgtaagtaattggatttttgtgtgtgtgtgatgttctgaagataggctttctaggccaaatcgtcactcaaggcnaattcgaacacaattnagtttaaatcagaatacattcgagtgataattccttacctttttaaatagttcatagaaaactttttgtagacattatctggtttaattctgattgtaatccacatgaattctcttatccacagtaaggaacagtaatttagaagactaataaactgttccaagatcacacagctagtaaaagtggaactcaacctaaaactccagagtcaagcttttccatcatgtagactcagtttaatagtaatagttaattaaaaattctagagaaaaatgtgggaaacaatttcctcacaagtgaccagctgcaaatgttatttggtattcccattaaccaaccattttattggggngcctt

SEQ ID NO: 535904 - DNA, 316 bp, Homo sapiens
tgagcagagagaatcagtgagatactgtgtacaaacgtagcttatgtaaatggtaacatgtgcagaaatataagattatatgacttaagtccctgctataactaaccattacttctcaattataaatgtaaacatttatagcatatttataaaacaaattattctatttatcataattatcttaaattcttttattagtttcagcatgacttgaaacattacttaatattcttagatatattcttgattggtgctataattgtgtcgttcattggttaaaacctatccaaggccggtaaatgattaaattatatga

SEQ ID NO: 535905 - DNA, 1167 bp, Homo sapiens
tcgttgcgctctgtcctcttgtcttcctggcgtgtttttcgttctcttttttctctcttgtcgtttctcctctctccttgtctcgtcttcgtttggtctttgttccttttccgtccttttctctcctcttcctctgtcctgctcttccttcgctctcttctcctctctcttccctcgtcttcttcctcctctgtcttccttgtctttctctccttctgttccttgcgctgaccctttctgctgtcacctttttcttttgtttctcctcgctgcttcttctctcctctctcttttctcttcctctcctctctctctcccctcgttctctctcgttcttctcttcttctcttcctctcctcctcctctttcttcttctctttctcttctctcttccttccttccttctctcccttttttctcctttctttcttcttctctctttcttttctcttcttttcttttcttccttcttttttttctttcttctctctttctttctccttcttttctttctttcttccttttctccctactctttttctcttgtttcttctccctctacttctttctttatcttcttctgtctcttgttttttcttttctttctctcttctttcttttctttcttcttctcttccttctgtctctttctttttcgttcctttttctctcgttctctttctctctctctctttatcctcttctcttctctctcctgtctccttctcctctcccactctctaccctctctccttttttcctctctctttcctttgtccctcttcctctctctctcctctcgttgcttttatttcttgcctctatcctttcttctctttcatctttttctttgctcacttctgttctcgtctttcctctcttcttactcgctccattttgttcatgtgcctctgcaataacctgcttctctaacctcttcgagtctacgttgtcttgctgcgacttgttatgtgagtgcctattctatatttagcaagagacactattactcaaagtattgttcggttaggccagattgacaccgtattgataaaccatatgcgtatattctttctgtgctatatatgaaaaataacttgcatgattatttcattccggacgtcatttctcagagattgcctacggaatcgctgcctatggtaccac

SEQ ID NO: 535906 - DNA, 676 bp, Homo sapiens
ggccggaaaatattccccccaaggagttcctctttaaacacccgaagcgcacggccaccctcagcatgaggaacacgagcgtcatgaagaaagggggcatattctctgcagaatttctgaaagttttccttccatctctgctgctctctcatttgctggccatcggattggggatctatattggaaggcgtctgacaacctccaccagcaccttttgatgaagaactggagtctgacttggttcgttagtggattacttctgagcttgcaacatagctcactgaagagctgttagatcctggggtggccacgtcacttgtgtttatttgttctgtaaatgctgcgttcctaatttagtaaaataaaagaatagacactaaaatcatgttgatctataattacacctatgggatcaataagcatgtcagactgattaatgtctactgtgaaaatttggtagtaaattttcatttgatattagatataaatatctgaatataaataattttaatatactagtcatgatgtgtgttgtattttaaaaattatctgcaacttaattcagctgaagtactttatatttcaaaagaatgaataaccattgataataaaatcgtactttaagggggtttgtccaaaataaattttgtgggctttatatatcacactattgttg

SEQ ID NO: 535907 - DNA, 361 bp, Homo sapiens
  misc_feature (306)..(306): n is a, c, g, or t
ggatccacctgaggtcaggagttcaagaccagcctggccaacatggtgaaaccccatctctactaaaaatacaaaaattagccaggtgtggtggcgcctggttgaggcatgagaatcgcttgaacccaggaggtggaggttgcagtgagccaagatcatgcctactgcactccagcctgggcaacaaagtgggactctgtcttaaaaaaaaaaaaaaaaaaaaaatcggttagatgagaaagcatgtatattttctatatacaaaaacaagaaaggcgttttgagcccctgtgctcaggcccactncccacactgtggagtgtactttcattttcaataaatccccttattccttccttgc

SEQ ID NO: 535908 - DNA, 195 bp, Homo sapiens
ctccttgctcatctccccgtcacacgcctcatctccccgtcaaacgcatcactccccgtctaagcatcactccccgtcgtagcatcactccccgtctaagcatcactcctcggcccgtggactgtgtgaggcctgtagcggcccccggcgcgccgggcccgggtcttcccggatttccggttgcttgcgcgaact

SEQ ID NO: 535909 - DNA, 559 bp, Homo sapiens
tcagtcggtaccgacgctctctctgtggggactacagtgatgagcgcgactgcagtgtgaaacgccccagatgccctctgaattacttcgcctgccctagtgggcgctgcatccccatgagctggacgtgtgacaaagaggatgactgtgaacatggcgaggacgagacccactgcaacaagttctgctcagaggcccagtttgagtgccagaaccatcgctgcatctccaagcagtggctgtgtgacggcagcgatgactgtggggatggctcagacgaggctgctcactgtgaaggcaagacgtgcggcccctcctccttctcctgccctggcacccacgtgtgcgtccccgagcgctggctctgtgacggtgacaaagactgtgctgatggtgcagacgagagcatcgcagctggttgcttgtacaacagcacttgtgacgaccgtgagttcatgtgccagaaccgccagtgcatccccaagcacttcgtgtgtgaccacgaccgtgactgtgcagatggctctgatgagtcccccgagtgtgagtcccgaactgg

SEQ ID NO: 535910 - DNA, 153 bp, Homo sapiens
cgccacagcttctcgagtagctgggactacgggcactatggctccccatcctgggttcaagcgattctcctgcctcagcctcccgagtagctgggactacaggcatatggcaccacgcatggctaattttcttatttttagtacagataactc

SEQ ID NO: 535911 - DNA, 738 bp, Homo sapiens
  misc_feature (47)..(47): n is a, c, g, or t
  misc_feature (75)..(77): n is a, c, g, or t
ggacgagctggccagcactaagcaaaaactagagaaagctgaaaacnaggttctggccatgcggaaggtctgagnnnctcaccaaggagtacgaccgcttgctggaggagcacgcaaagctgcaggctgcagtatgatggtcccagtggacaagaaggaagagtaagggcctcctttcctcccctgcctgcagcgtggcgttccagcctggtcacgtgcctgcttgcttcctgagagcccggtccgtctccctccagtacttcgtgtttgtgccctgtctgcttcccccattcccgttccactaggcgtcagttagctcgtctatctcgtgcccttgctccatcactctccatgacacattatccaggggcacctgattgctacatcgtttcccgtaatgcgtttgtctgtcattcctgtcttggcctggccaggcctggcacatgccttggcttccacgcctgaaggcgctggggagcacgagttaggttgtaggtccggcttgcggtcggggctgacttcctgtcgtgtttgagccccttttgttgttggcctctgggctgttgttcttgtggtcccgcagcgagaggtgggtggcagcacgtggtactggagtctcgtcttgagggcaatagaagtcgtctatggtggggctgggattcctgttccctgggtgcggcgcctactcccggcgtgaggaaccgggggtaatggagggggcgggagggccaatgccag

SEQ ID NO: 535912 - DNA, 313 bp, Homo sapiens
  misc_feature (43)..(43): n is a, c, g, or t
gcttttcgaccacgcgtcggcgagtgagggcagcgggaacctnaggagggcaagatggatacgatgacccctcgtgctggcagggacgtgggcaggagctacgagtggtgctcaaagtgctggacctagtcaccatgaccatcgccctggcttctacgagacagcagcctcatgagccaggtctcccacagcacctggcttcgtgcatgggtctgtgtgcgcggcctgaaagtagctcaaaactccttgtaataggctacggtgtggtgggtcacacctaatccccaaatgtcagaacgagcagtacgcgacg

SEQ ID NO: 535913 - DNA, 117 bp, Homo sapiens
cagagtccaaacagtgccccgagtccatacagtgcccagagtccaaacagtgcccagagtccaaacagtgccttgtggtaatgaagtgggctagggcatatataattttaagagcga

SEQ ID NO: 535914 - DNA, 183 bp, Homo sapiens
tcgaactcgagctgtataccagcacgccaggtctttgagttaagctgtggtcgtagtgtctgggcgagcagttttgttgattaactgttgaggttcagggctaagcatagtggggtatctaatcccagtcggggtcttagctattgtgtgtcagatatgttacagccacttccgtagtcaatg

SEQ ID NO: 535915 - DNA, 309 bp, Homo sapiens
gcgcgaattcatcatcctgctgcgcgaattcatcatcctgctgcgcgaattcatcatcctgctgcgcgaatacatcattctgctgagtagatcatccgttgtgcaaactcatcatcctcctatcatgtgcgggcagacgcgcctgctacctggatgccagcctgtcactgactgctgtgcttttggcgaggccagatagtgcctgacccgtgacctagcttgcttagaagcgtggagccatggccccagtgaaaccagctttctccaaggagatgacctttctgccgccaaggaaacccttttcagctg

SEQ ID NO: 535916 - DNA, 117 bp, Homo sapiens
ctggtttatgactcttaacgtgtacataggaatatgtatttgtcaattttagttcacaaacatatccataagaatgtttacacacggctgtctcctcttgcaatctgtcaatcataa

SEQ ID NO: 535917 - DNA, 799 bp, Homo sapiens
gcctctttccttgacctaacgcatccatggcctcgtgtgtcccatagaagcatctgaatgactgggtggcagctccaaagcattggatgctggaataaattgagccggtgtgtatttgctcctcgtccatccaccggatccccacaagtttgagatggagtgtctccccctcatcattttcctgaggaacagacttaagtatgccctgatcaggatgatgaacgtaccaagacagattttgcatgctgcgggtttcattaagaatcgtatggtcaagagtcctgaaatcctgatatataccatactccatgtctggcatttcataggagtgttacatgcagctattgagccaactgacagggtgagcagaagttgtccgatctgaatcttatgacgaccaaggtggtcgtctatagctgatagcatctgtgattactactcctgagcgagtgccaatgtacagagtgagtgcacatagtgaagaaatgcatcttgtgtcgggctcgagaacggaatccgctcatcttggtgactcatgtatgccctgctacacatctctgttaggcccagatccccgtcatcaaggtgaatgatgccattcagatggatttagagacttggtaagattactgattttcatcaatgttcgagcactggtaacctgtgtactggtgactggaggtgctaacctacggaagacttggtgtgatcaccaacagagagaggcaccctggatcttttgacgtggttcacgtgaaagatgccaatggcaaccagctttgccactcgactttccaac

SEQ ID NO: 535918 - DNA, 185 bp, Homo sapiens
ccggcgtggcgagcggtggggggcttcctttcctcctgggcccgtgtgctgagctctcctgggctttacggcttgacactgctggtctggggacgacgacacgtggcctcgtgctgccgctgttcttcacccctcacacgtgactaccctcctattccttggtgtcgtcttgtgcctgccacaac

SEQ ID NO: 535919 - DNA, 418 bp, Homo sapiens
tgtaaaaacgaacagtcgtattctagaaactgtatatcccgtgtgtaaacttagtggcactgcacgcctgatgcaggtgctgagatggggacctgtaaaacggcacaggcattttgagtcagaaacacatgtgactttcctgctccaaaatgtgctattcaaaagtctttcttagttgtgactaaaacaaactttgaacttactatttcaacagtattataaggggaagacccaaggaatgggactggcactgggaaaacagctaggaagctgctctgaaaagccagggagtctggaagcatcctggtactccagagcgaacaaggctgagcgcttgatgtggggcttagaggcttaaccaacttggttcgaatctagccactgacacttattagtgaccagtgacgaaaggctcagt

SEQ ID NO: 535920 - DNA, 537 bp, Homo sapiens
ggatctagaggatccctagggacgacgagtctcacgacggagagtctttaaaattaacggccggtttttcccgcgggtggctagtgagccttatctctccacttcccaggcatggtgaagacccggtttctctagcggtgcagctgcaaggtcactagacagataatctcaagtcgtaaagcatgtggttccttaaaaagtaagaaatgatgtaatgcatgtcttaactgaataacggtcttggtttctggcttctgtaatacgcttcccccggcacggatctacccccagcccaggaaatgcttaaaaggtagctggacttttggctcaaggctcagtccttgggatgttaatcggacggggttgatgcacctaaacaattaaataattccacctcaacccctcgggtctctctgattccttaattatcccgctgcagtgtctctactaaaaatgcaaaaaattagacaggcatgggggcacgtgctgtagtcccagccacttgggaggctgaggcaggggaatagttcgaaccca

SEQ ID NO: 535921 - DNA, 1051 bp, Homo sapiens
ggagagaactagtctcgagttttgaggttttttttcggaaggaaaattggtataattccaattattttaatgtacagaaaactcaacagtgtacatttaacccagttatagtgggcaagtcctttagccttggcctttacagagctgggcgatacgagccacagacttaggacccaggacatggccaccccagtgacggggggatctcatcgtatctagtcatggtaatgggtccgtgatagcttcacaccagtttagccaaagggccttgggtcttccgagattcacctggtgtgaaggcgacaggggtgcaggtcttcctgttggacatagagcgtcccagtctggcctttcccttgataatgcacgtaagggacccccatttaacgacacagggcaggcaacaagacacaccgagctcgaaggggatccagcgctcgtggtgcaaatcaccaccagcttgaagcttagcgtgggactccaccaagggggtgacggtgtatacacctccagtgctcagaaaggcacaggggggctacacctaacagtagggagaactgtcaccacttgggcacagacacagccctaatatatctggagccccggtacacacaaaaagtactcggcagtaaaattactccttgacttgggcacatacagggcctagataccaagatgatgaggcccagccttacacagccagcctgccaagatacgcagtgatcagggggcgcgccccaaggggccccttgagaatacaagcgggtgacaaaaaatcccgacaggggaaggcacacatataacagacacggattactacagaaggacagggctccttcaataccacgtttgacaaacccgtgaattatacgcaggggaccaatttttgaccaaaaaaacgggggtagaaggacacaattatggggaacataacgtgttcctgtgtccatatgtccccaaaattatactatataaggacctttttctccaaactacgtgggaaattccacacaatttacttatagccatccatgcattcattcaacgacag

SEQ ID NO: 535922 - DNA, 244 bp, Homo sapiens
gatgtagcatcgtgggacggggatatgggagaaaaatcaaatatcggccgcatcgttgtttattttacctgggtgcaggcgggctgtccgaaaaaagagtcagcaaaaggtggtgagattactagttcttataggtttgggataggcatacaaagtacattcttaagggcgggggagaatatatagtattaattagggtggggcaggaacaaatcacaatggtggaatgtcatcagttaaggct

SEQ ID NO: 535923 - DNA, 903 bp, Homo sapiens
gcaagctttccaagggagtggtagtgtgatcgccatcttagggaccaagatgtttctcggtccgtggcgcacctggcgcgggcgagaccccttcaagacgccacatgctgctgttggtgctacgaatggtctcggggacctccgcgagaagatccccagggggccacgagagaccaggccctcgtgcgtgcgctcgcaaggcgtgggcagtgctgccgaccgtgagaacgagtacagttgggaaattttgagtctccgtgaaagtattatgcacttgtgtgggatttggtgagggatcttacagtggtggatctgagacagactgctgtggattggccctggatttaagtgaaagtagccgtatgtcgtggtggaggccccaaaaaagtgagcccaggggcatgacttttgaacgggactatcttcagatttgaccaccttgtacttagcacggatgggtgagatccggtcggttccggcgtcgtaactgggagtggggctccgaactttttacctaggggcttaacatactcaatgactagggggaacttcagcctcatgtattgcgtcctatggtactcgaaggtgcgtttctcgaacgtcttttgctgataaggcaaaagtatggctgtggactcaaggggcgaaccttagatgtagtgtttgctatgggaggaaatgtactattgattattaaagggggtgcccttcattagtcaggttgctgaatacgtatggggggacaattgagcttctgggtagcgttaatgggaaagctgatttaaagtgttccggaactttgaatggtctagggcagggaaaaagccaaacattgtttgaggggaagtgcaagttcccgaatatggataaagggcaataaggggttaaaagggtgttctagca

SEQ ID NO: 535924 - DNA, 1023 bp, Homo sapiens
  misc_feature (37)..(37): n is a, c, g, or t
aagacgccccttttgttggcctgttggtttttgtacntctactgctttggtttgagacacacgccatgctgccctatgaccagtacctgcaccgctttgctgcgtacttccagcagggcgacatggagtccaatgggaaatacatcaccaaatctggaacccgtgtggaccaccagacaggccccattgtgtggggggagccagggaccaatggccagcatgctttttaccagctcatccaccaaggcaccaagatgataccctgtgacttcctcatcccggtccagacccagcaccccatacggaagggtctgcatcacaagatcctcctggccaacttcttggcccagacagaggccctgatgaggggaaaatcgacggaggaggcccgaaaggagctccaggctgcgggcaagagtccagaggaccttgagaggctgctgccacataaggtctttgaaggaaatcgcccaaccaactctattgtgttcaccaagctcacaccattcatgcttggagccttggtcgccatgtatgagcacaagatcttcgttcagggcatcatctgggacatcaacagctttgaccagtggggagtggagctgggaaagcagctggctaagaaaatagagcctgagcttgatggcagtgctcaagtgacctctcacgacgcttctaccaatgggctcatcaacttcatcaagcagcagcgcgaggccagagtccaataaactcgtgctcatctgcagcctcctctgtgactcccctttctcttctcgtccctcctccccggagccggcactgcatgttcctggacaccacccagagcaccctctggttgtgggcttggaccacgagcccttagcagggaaggctggtctcccccagcctaacccccagcccctccatgtctatgctccctctgtgttagaattggctgaagtgtttttgtgcagctgacttttctgacccatgttcacgttgttcacatcccatgtagaaaaataaagatgccacggagga

SEQ ID NO: 535925 - DNA, 143 bp, Homo sapiens
ctggtggggggaaagtgaacagttcttgatgcccacgttgcatgcctcgtagcagcttgtgaattcgtgctgggatcatctggcacaatgggcccgagcaggttggggccagaccctgtatctgctgtagagatattatatgg

SEQ ID NO: 535926 - DNA, 139 bp, Homo sapiens
atacttcaactattgtgcccggcgcaagctttgctttatcatcaaaaacctcctgccagacaatggatccctgtttatggttgcaataatatccaaaaccttttgaatgtagaaagattctagtttcttaaaatctgtg

SEQ ID NO: 535927 - DNA, 459 bp, Homo sapiens
tgtggtgtcatcggatgtgtccccctcgctccaactgagctgtacagcgagtgacccaggctgggactgacccctgctgagaagtaccaggcggtcttgtccctctgcctgaagcccagacagtgctctcaccccatacggaagggtctgcatcacaagatcctcctggccaacttcttggcccagacagaggccctgatgaggggaaaatcgacggaggaggcccgaaaggagctccaggctgcgggcaagagtccagaggaccttgagaggctgctgccacataaggtcagcacttctgcatttggctttggggtgcatgctggagttggaggtgtgaagctatggcaccaggcaggggcttggggcatgcctggcttgtcctacagaatgggagggcctgtcctcacagacctgcacgtctctgcccccgtggctgaagaggtagattggtacagc

SEQ ID NO: 535928 - DNA, 2101 bp, Homo sapiens
  misc_feature (62)..(62): n is a, c, g, or t
  misc_feature (68)..(68): n is a, c, g, or t
  misc_feature (73)..(73): n is a, c, g, or t
  misc_feature (1928)..(1928): n is a, c, g, or t
  misc_feature (1936)..(1936): n is a, c, g, or t
ctccctgttcatcattgcctccaagacctttactacccaggagaccatcacgaatgcagagncggganggagnggttctccaggcggccaaggatccttctgcagtggcgaagcactttgttgccctgtctactaacacaaccaaagtgaaggagtttggaattgaccctcaaaacatgttcgagttctgggattgggtgggaggacgctactcgctgtggtcggccatcggactctccattgccctgcacgtgggttttgacaacttcgagcagctgctctcgggggctcactggatggaccagcacttccgcacgacgcccctggagaagaacgcccccgtcttgctggccctgctgggtatctggtacatcaactgctttgggtgtgagacacacgccatgctgccctatgaccagtacctgcaccgctttgctgcgtacttccagcagggcgacatggagtccaatgggaaatacatcaccaaatctggaacccgtgtggaccaccagacaggccccattgtgtggggggagccagggaccaatggccagcatgctttttaccagctcatccaccaaggcaccaagatgataccctgtgacttcctcatcccggtccagacccagcaccccatacggaagggtctgcatcacaagatcctcctggccaacttcttggcccagacagaggccctgatgaggggaaaatcgacggaggaggcccgaaaggagctccaggctgcgggcaagagtccagaggaccttgagaggctgctgccacataaggtctttgaaggaaatcgcccaaccaactctattgtgttcaccaagctcacaccattcatgcttggagccttggtcgccatgtatgagcacaagatcttcgttcagggcatcatctgggacatcaacagctttgaccagtggggagtggagctgggaaagcagctggctaagaaaatagagcctgagcttgatggcagtgctcaagtgacctctcacgacgcttctaccaatgggctcatcaacttcatcaagcagcagcgcgaggccagagtccaataaactcgtgctcatctgcagcctcctctgtgactcccctttctcttctcgtccctcctccccggagccggcactgcatgttcctggacaccacccagagcaccctctggttgtgggcttggaccacgagcccttagcagggaaggctggtctcccccagcctaacccccagcccctccatgtctatgctccctctgtgttagaattggctgaagtgtttttgtgcagctgacttttctgacccatgttcacgttgttcacatcccatgtagaaaaataaagatgccacggaggaggttgtaggctcagcctctgattttttttttcctgtgatggtgctttatgtagcagagggcaggagcgctcagcaggacgcaggctgtgcctctgcggacacttaacactaagtggtgagcgggtctagagtggagcaaggtgccctgagaagacaatagtggggtgggggcacaatcagtcaggacggcaacttggcctgtgtcaccaaatcccaagactgttttccactcctcacctctgtgactggagaaattggatactctgttcactcgatggttctaaaaactgcattgagattatgtttgtttcgggtgaattcctggacaagaccgaggatgactgccatctcctggcaagacgctcaggtagttcttttgctttaaaaggcagatattgaaaactggaattttttttttttgagtctcgctctgtcacccagactggagtgcagtggtgcaatctcggctcactgcaacctccgcctcccgggttcaagctattctcctgcctcagcctcccgagtagctgggattacacggcgcacaccaccatacccagctaattttngtattttnagtagtgaaggggttttaccatgttgggcaggctggtcttgaactcctgacctcaggtgatctgcccgcctcagcctcccacagtgctgggattacaggtatgagccaccacgcccggcccattttaaaatttttgtagatcagtgtactgttgtaaaaaaaaaa

SEQ ID NO: 535929 - DNA, 1954 bp, Homo sapiens
  misc_feature (62)..(62): n is a, c, g, or t
  misc_feature (68)..(68): n is a, c, g, or t
  misc_feature (73)..(73): n is a, c, g, or t
ctccctgttcatcattgcctccaagacctttactacccaggagaccatcacgaatgcagagncggganggagnggttctccaggcggccaaggatccttctgcagtggcgaagcactttgttgccctgtctactaacacaaccaaagtgaaggagtttggaattgaccctcaaaacatgttcgagttctgggattgggtgggaggacgctactcgctgtggtcggccatcggactctccattgccctgcacgtgggttttgacaacttcgagcagctgctctcgggggctcactggatggaccagcacttccgcacgacgcccctggagaagaacgcccccgtcttgctggccctgctgggtatctggtacatcaactgctttgggtgtgagacacacgccatgctgccctatgaccagtacctgcaccgctttgctgcgtacttccagcagggcgacatggagtccaatgggaaatacatcaccaaatctggaacccgtgtggaccaccagacaggccccattgtgtggggggagccagggaccaatggccagcatgctttttaccagctcatccaccaaggcaccaagatgataccctgtgacttcctcatcccggtccagacccagcaccccatacggaagggtctgcatcacaagatcctcctggccaacttcttggcccagacagaggccctgatgaggggaaaatcgacggaggaggcccgaaaggagctccaggctgcgggcaagagtccagaggaccttgagaggctgctgccacataaggtctttgaaggaaatcgcccaaccaactctattgtgttcaccaagctcacaccattcatgcttggagccttggtcgccatgtatgagcacaagatcttcgttcagggcatcatctgggacatcaacagctttgaccagtggggagtggagctgggaaagcagctggctaagaaaatagagcctgagcttgatggcagtgctcaagtgacctctcacgacgcttctaccaatgggctcatcaacttcatcaagcagcagcgcgaggccagagtccaataaactcgtgctcatctgcagcctcctctgtgactcccctttctcttctcgtccctcctccccggagccggcactgcatgttcctggacaccacccagagcaccctctggttgtgggcttggaccacgagcccttagcagggaaggctggtctcccccagcctaacccccagcccctccatgtctatgctccctctgtgttagaattggctgaagtgtttttgtgcagctgacttttctgacccatgttcacgttgttcacatcccatgtagaaaaataaagatgccacggaggaggttgtaggctcagcctctgattttttttttcctgtgatggtgctttatgtagcagagggcaggagcgctcagcaggacgcaggctgtgcctctgcggacacttaacactaagtggtgagcgggtctagagtggagcaaggtgccctgagaagacaatagtggggtgggggcacaatcagtcaggacggcaacttggcctgtgtcaccaaatcccaagactgttttccactcctcacctctgtgactggagaaattggatactctgttcactcgatggttctaaaaactgcattgagattatgtttgtttcgggtgaattcctggacaagaccgaggatgactgccatctcctggcaagacgctcaggtagttcttttgctttaaaaggcagatattgaaaactggaattttttttttttgagtctcgctctgtcacccagactggagtgcagtggtgcaatctcggctcactgcaacctccgcctcccgggaggctgaggcaggagaatctcttgaacctgggaggcagaggttgcagtgagctgacatcacgccagtgcactccagcctggctacagagcaagactctgtctc

SEQ ID NO: 535930 - DNA, 231 bp, Homo sapiens
gggacaaagcgccggtgcagcccagcagtctccagtcggggccccggggcacggacgagaagccgagcggcaaggagcggcgggagtgccggggacagggacaaagaacaggagctgtctgaagaggataaagcagcttcgaagatgaacgtggagatgcgtcgtggaacgactaggggacgaaggatacatcccgtgtatcgaccagcgctggaggaattgcgaaggcag

SEQ ID NO: 535931 - DNA, 1359 bp, Homo sapiens
  misc_feature (62)..(62): n is a, c, g, or t
  misc_feature (68)..(68): n is a, c, g, or t
  misc_feature (73)..(73): n is a, c, g, or t
ctccctgttcatcattgcctccaagacctttactacccaggagaccatcacgaatgcagagncggganggagnggttctccaggcggccaaggatccttctgcagtggcgaagcactttgttgccctgtctactaacacaaccaaagtgaaggagtttggaattgaccctcaaaacatgttcgagttctgggattgggtgggaggacgctactcgctgtggtcggccatcggactctccattgccctgcacgtgggttttgacaacttcgagcagctgctctcgggggctcactggatggaccagcacttccgcacgacgcccctggagaagaacgcccccgtcttgctggccctgctgggtatctggtacatcaactgctttgggtgtgagacacacgccatgctgccctatgaccagtacctgcaccgctttgctgcgtacttccagcagggcgacatggagtccaatgggaaatacatcaccaaatctggaacccgtgtggaccaccagacaggccccattgtgtggggggagccagggaccaatggccagcatgctttttaccagctcatccaccaaggcaccaagatgataccctgtgacttcctcatcccggtccagacccagcaccccatacggaagggtctgcatcacaagatcctcctggccaacttcttggcccagacagaggccctgatgaggggaaaatcgacggaggaggcccgaaaggagctccaggctgcgggcaagagtccagaggaccttgagaggctgctgccacataaggtctttgaaggaaatcgcccaaccaactctattgtgttcaccaagctcacaccattcatgcttggagccttggtcgccatgtatgagcacaagatcttcgttcagggcatcatctgggacatcaacagctttgaccagtggggagtggagctgggaaagcagctggctaagaaaatagagcctgagcttgatggcagtgctcaagtgacctctcacgacgcttctaccaatgggctcatcaacttcatcaagcagcagcgcgaggccagagtccaataaactcgtgctcatctgcagcctcctctgtgactcccctttctcttctcgtccctcctccccggagccggcactgcatgttcctggacaccacccagagcaccctctggttgtgggcttggaccacgagcccttagcagggaaggctggtctcccccagcctaacccccagcccctccatgtctatgctccctctgtgttagaattggctgaagtgtttttgtgcagctgacttttctgacccatgttcacgttgttcacatcccatgtagaaaaataaagatgccacggagga

SEQ ID NO: 535932 - DNA, 153 bp, Homo sapiens
catgacataggacgtgtgttgctaacactgtaggaccagcacctgataaatgtcgcatctctgatgagagcttaataaatagaaaacacttaaggaagaaagactcgaacccattctcggattcccacggagaagacagccctcattactgca

SEQ ID NO: 535933 - DNA, 794 bp, Homo sapiens
ggctctgcactgccccgcaggtagcgcccccgccctgcgtgtccatatgtgctgctcgctgccggcaccatgtctccctggattaaactgtgcgcgcctgcgctggaggatatcagccgatggagatgaaggcgaccgaagagcggggcgcagtcgtgcgccgctgcccatgggagggatgtggacatcagccccaaacaggacgaaggcttgctgaagggtcgtcaagagagagggctacaggtacatgagatgcccatgattggggaccgagtctttgtccactacactggctggctattagatggcacaaatgtttgactccagtctggatcgcaaggacaaatttctcctttgacctggtgaaactggggaggtcatcaaggcttggtgacattgccatagccaccattgaaggtgggggaggtgtgccacactcacctgcaaaccagaatatgcctacggttcagcagtgcatgtcctccaaagattccccccaattgtccagcgcttgtatttgacggtggagttgtttgagtttaagggagaagatctgacggaagaggaagatggccgggacatcatttcgccagaatacagactcgcggtggcggctattgctaagcccaagtgagggtgctactcggtggcgggttgccctggaggggtactaccagggcgcgagttttttgccggcggggcccggtttgacattgcgcgggggcgccggtgttgcctatggctggggggcctggcctgggcagggggttccccgttccagcccgtttttggtt

SEQ ID NO: 535934 - DNA, 1822 bp, Homo sapiens
  misc_feature (62)..(62): n is a, c, g, or t
  misc_feature (68)..(68): n is a, c, g, or t
  misc_feature (73)..(73): n is a, c, g, or t
ctccctgttcatcattgcctccaagacctttactacccaggagaccatcacgaatgcagagncggganggagnggttctccaggcggccaaggatccttctgcagtggcgaagcactttgttgccctgtctactaacacaaccaaagtgaaggagtttggaattgaccctcaaaacatgttcgagttctgggattgggtgggaggacgctactcgctgtggtcggccatcggactctccattgccctgcacgtgggttttgacaacttcgagcagctgctctcgggggctcactggatggaccagcacttccgcacgacgcccctggagaagaacgcccccgtcttgctggccctgctgggtatctggtacatcaactgctttgggtgtgagacacacgccatgctgccctatgaccagtacctgcaccgctttgctgcgtacttccagcagggcgacatggagtccaatgggaaatacatcaccaaatctggaacccgtgtggaccaccagacaggccccattgtgtggggggagccagggaccaatggccagcatgctttttaccagctcatccaccaaggcaccaagatgataccctgtgacttcctcatcccggtccagacccagcaccccatacggaagggtctgcatcacaagatcctcctggccaacttcttggcccagacagaggccctgatgaggggaaaatcgacggaggaggcccgaaaggagctccaggctgcgggcaagagtccagaggaccttgagaggctgctgccacataaggtctttgaaggaaatcgcccaaccaactctattgtgttcaccaagctcacaccattcatgcttggagccttggtcgccatgtatgagcacaagatcttcgttcagggcatcatctgggacatcaacagctttgaccagtggggagtggagctgggaaagcagctggctaagaaaatagagcctgagcttgatggcagtgctcaagtgacctctcacgacgcttctaccaatgggctcatcaacttcatcaagcagcagcgcgaggccagagtccaataaactcgtgctcatctgcagcctcctctgtgactcccctttctcttctcgtccctcctccccggagccggcactgcatgttcctggacaccacccagagcaccctctggttgtgggcttggaccacgagcccttagcagggaaggctggtctcccccagcctaacccccagcccctccatgtctatgctccctctgtgttagaattggctgaagtgtttttgtgcagctgacttttctgacccatgttcacgttgttcacatcccatgtagaaaaataaagatgccacggaggaggttgtaggctcagcctctgattttttttttcctgtgatggtgctttatgtagcagagggcaggagcgctcagcaggacgcaggctgtgcctctgcggacacttaacactaagtggtgagcgggtctagagtggagcaaggtgccctgagaagacaatagtggggtgggggcacaatcagtcaggacggcacagattacaggctcatgcctgtaatctcagcactttgggaggccaaggcaggtggatcacctgaggttgcgagttcgagtctagcctaacatggagaaaccctgtctctactaaaaacacaaaatcagcctggcgtggtggcgtatgcctgtaatcccagctactcaggaggctgaggcaggagaatctcttgaacctgggaggcagaggttgcagtgagctgacatcacgccagtgcactccagcctggctacagagcaagactctgtctc

SEQ ID NO: 535935 - DNA, 475 bp, Homo sapiens
  misc_feature (163)..(163): n is a, c, g, or t
tttagaaaacctgaaagctaatcgaacatcttgaaagacaagctagtcactctggtaaacagctagaaaaaaatcagtttggagaaaattgagaaagagaccagactttctccaggagctgcaacataggaattgtgtatttaaagcattacggacagcaatntgatgaccagaaataagtgcaaaaacatatgatgtaataccataggatacaaagaaatgagtatgaccacacttaatgacaatctataattttaaccatttattcaagattctactaagtgtaaaattatttaataatgtctattaaattgatatttatatcttgcatcctatatcatgtcaatatgtgatatagaaaagagaatacgtgaattttttagctaagcttgacagattgaaagacaagtgtcatttttttttgtagagggtgatatataccaggaaatgaataaagacattttaaatttaacac

SEQ ID NO: 535936 - DNA, 2490 bp, Homo sapiens
  misc_feature (2317)..(2317): n is a, c, g, or t
  misc_feature (2325)..(2325): n is a, c, g, or t
tgacatctggtcggaccatgtctaaagagttgaactgtgtgcaggtatgagcccttggttctgccagtgtctggggagttgagcctgggcatgggtgtgagaccctgggtctgtccatatctgaggaggtaggatctggtatgagtatgaggatctgggtgtgtccgtgtctgaggaggtgggccctggcacaggtatgaggcctggggtctgtccgtgtctgaggaggtgggccctggcgcaggtatgaggccctgggtgtgtccgtgtctgaggaggtgggccctggcacaggtatgaggtcctgggtctgctggtgtctgcagagacagggcccgacatctcagggaagaccacggtaagctcttcagtttgtcttgtggctgtggtcagtcatctgtagtctgccctgttggtcttcccatgtgttgccagcacctgcctgctgccttgcttcctggaggtgggttgggccagggccctccgagacgcccctgtgcaagaccagggacagggtttccggcaggaggtggggggcggggtgtgccggccctccctcagcaccttgtcctgtctctcctagtgggtgggaggacgctactcgctgtggtcggccatcggactctccattgccctgcacgtgggttttgacaacttcgagcagctgctctcgggggctcactggatggaccagcacttccgcacgacgcccctggagaagaacgcccccgtcttgctggccctgctgggtatctggtacatcaactgctttgggtgtgagacacacgccatgctgccctatgaccagtacctgcaccgctttgctgcgtacttccagcagggcgacatggagtccaatgggaaatacatcaccaaatctggaacccgtgtggaccaccagacaggccccattgtgtggggggagccagggaccaatggccagcatgctttttaccagctcatccaccaaggcaccaagatgataccctgtgacttcctcatcccggtccagacccagcaccccatacggaagggtctgcatcacaagatcctcctggccaacttcttggcccagacagaggccctgatgaggggaaaatcgacggaggaggcccgaaaggagctccaggctgcgggcaagagtccagaggaccttgagaggctgctgccacataaggtctttgaaggaaatcgcccaaccaactctattgtgttcaccaagctcacaccattcatgcttggagccttggtcgccatgtatgagcacaagatcttcgttcagggcatcatctgggacatcaacagctttgaccagtggggagtggagctgggaaagcagctggctaagaaaatagagcctgagcttgatggcagtgctcaagtgacctctcacgacgcttctaccaatgggctcatcaacttcatcaagcagcagcgcgaggccagagtccaataaactcgtgctcatctgcagcctcctctgtgactcccctttctcttctcgtccctcctccccggagccggcactgcatgttcctggacaccacccagagcaccctctggttgtgggcttggaccacgagcccttagcagggaaggctggtctcccccagcctaacccccagcccctccatgtctatgctccctctgtgttagaattggctgaagtgtttttgtgcagctgacttttctgacccatgttcacgttgttcacatcccatgtagaaaaataaagatgccacggaggaggttgtaggctcagcctctgattttttttttcctgtgatggtgctttatgtagcagagggcaggagcgctcagcaggacgcaggctgtgcctctgcggacacttaacactaagtggtgagcgggtctagagtggagcaaggtgccctgagaagacaatagtggggtgggggcacaatcagtcaggacggcaacttggcctgtgtcaccaaatcccaagactgttttccactcctcacctctgtgactggagaaattggatactctgttcactcgatggttctaaaaactgcattgagattatgtttgtttcgggtgaattcctggacaagaccgaggatgactgccatctcctggcaagacgctcaggtagttcttttgctttaaaaggcagatattgaaaactggaattttttttttttgagtctcgctctgtcacccagactggagtgcagtggtgcaatctcggctcactgcaacctccgcctcccgggttcaagctattctcctgcctcagcctcccgagtagctgggattacacggcgcacaccaccatacccagctaattttngtattttnagtagtgaaggggttttaccatgttgggcaggctggtcttgaactcctgacctcaggtgatctgcccgcctcagcctcccacagtgctgggattacaggtatgagccaccacgcccggcccattttaaaatttttgtagatcagtgtactgttgtaaaaaaaaaa

SEQ ID NO: 535937 - DNA, 563 bp, Homo sapiens
gcgggcgggacatcggcccgggtcctcgccgcgccgcgccgcgccgcttcggcgccgcagcccgggagccggccacccctacacgcgccaggactgtcccctgcgctcacaatacacaaagctagtaagcagcgatcacgagaaattgaccagagcatgactagagaccgagaacatcgagtacgtgaaacaatcgaacgaaggacaaggaagactacgcagaaaccaagagcaccatcaacgggaaacacgaaaagcagaacagacggaagacagcaaaaagcaaaaagcaccagcgcagacaagagcaaggaagaacacacaagaaacgagagaagaaaaagaaaaaaaaaacgaaacaaagagacaacagaggaagacaaaacacacagagacgaagcaacacacgcacaaaagcggcaccacagcacagcagccagcgacgagaacaaacacagcaacaaaaccagaagcacgagccgaccaacagcgcaggaggagcacaccacaacagaagaagcaccacacgggcaccgcggaaccgacggcgaccgggaccaccg

SEQ ID NO: 535938 - DNA, 1919 bp, Homo sapiens
  misc_feature (41)..(41): n is a, c, g, or t
  misc_feature (1746)..(1746): n is a, c, g, or t
  misc_feature (1754)..(1754): n is a, c, g, or t
ggggaacacaacttaggctaggtacgaggcctgggtggtcnggctatcggactctccattgccctgcacgtgggttttgacaacttcgagcagctgctctcgggggctcactggatggaccagcacttccgcacgacgcccctggagaagaacgcccccgtcttgctggccctgctgggtatctggtacatcaactgctttgggtgtgagacacacgccatgctgccctatgaccagtacctgcaccgctttgctgcgtacttccagcagggcgacatggagtccaatgggaaatacatcaccaaatctggaacccgtgtggaccaccagacaggccccattgtgtggggggagccagggaccaatggccagcatgctttttaccagctcatccaccaaggcaccaagatgataccctgtgacttcctcatcccggtccagacccagcaccccatacggaagggtctgcatcacaagatcctcctggccaacttcttggcccagacagaggccctgatgaggggaaaatcgacggaggaggcccgaaaggagctccaggctgcgggcaagagtccagaggaccttgagaggctgctgccacataaggtctttgaaggaaatcgcccaaccaactctattgtgttcaccaagctcacaccattcatgcttggagccttggtcgccatgtatgagcacaagatcttcgttcagggcatcatctgggacatcaacagctttgaccagtggggagtggagctgggaaagcagctggctaagaaaatagagcctgagcttgatggcagtgctcaagtgacctctcacgacgcttctaccaatgggctcatcaacttcatcaagcagcagcgcgaggccagagtccaataaactcgtgctcatctgcagcctcctctgtgactcccctttctcttctcgtccctcctccccggagccggcactgcatgttcctggacaccacccagagcaccctctggttgtgggcttggaccacgagcccttagcagggaaggctggtctcccccagcctaacccccagcccctccatgtctatgctccctctgtgttagaattggctgaagtgtttttgtgcagctgacttttctgacccatgttcacgttgttcacatcccatgtagaaaaataaagatgccacggaggaggttgtaggctcagcctctgattttttttttcctgtgatggtgctttatgtagcagagggcaggagcgctcagcaggacgcaggctgtgcctctgcggacacttaacactaagtggtgagcgggtctagagtggagcaaggtgccctgagaagacaatagtggggtgggggcacaatcagtcaggacggcaacttggcctgtgtcaccaaatcccaagactgttttccactcctcacctctgtgactggagaaattggatactctgttcactcgatggttctaaaaactgcattgagattatgtttgtttcgggtgaattcctggacaagaccgaggatgactgccatctcctggcaagacgctcaggtagttcttttgctttaaaaggcagatattgaaaactggaattttttttttttgagtctcgctctgtcacccagactggagtgcagtggtgcaatctcggctcactgcaacctccgcctcccgggttcaagctattctcctgcctcagcctcccgagtagctgggattacacggcgcacaccaccatacccagctaattttngtattttnagtagtgaaggggttttaccatgttgggcaggctggtcttgaactcctgacctcaggtgatctgcccgcctcagcctcccacagtgctgggattacaggtatgagccaccacgcccggcccattttaaaatttttgtagatcagtgtactgttgtaaaaaaaaaa

SEQ ID NO: 535939 - DNA, 2309 bp, Homo sapiens
tgacatctggtcggaccatgtctaaagagttgaactgtgtgcaggtatgagcccttggttctgccagtgtctggggagttgagcctgggcatgggtgtgagaccctgggtctgtccatatctgaggaggtaggatctggtatgagtatgaggatctgggtgtgtccgtgtctgaggaggtgggccctggcacaggtatgaggcctggggtctgtccgtgtctgaggaggtgggccctggcgcaggtatgaggccctgggtgtgtccgtgtctgaggaggtgggccctggcacaggtatgaggtcctgggtctgctggtgtctgcagagacagggcccgacatctcagggaagaccacggtaagctcttcagtttgtcttgtggctgtggtcagtcatctgtagtctgccctgttggtcttcccatgtgttgccagcacctgcctgctgccttgcttcctggaggtgggttgggccagggccctccgagacgcccctgtgcaagaccagggacagggtttccggcaggaggtggggggcggggtgtgccggccctccctcagcaccttgtcctgtctctcctagtgggtgggaggacgctactcgctgtggtcggccatcggactctccattgccctgcacgtgggtgagtgtgtttctgtgtcttgcagcccctgtgggagacagtgttgcagtctaaggtcggggtagggggcttgtgtccctgaacatcatgctgtcctcacaggctgctggcctctctgcagctggctgggatatttatttcatgtccagaaggaaggtctgggtttttttgcgtgtgcaagttggcccccgtctttgcccctcacaactgcagtcctgtttctctcctatcctaggcagagtcagatccctgcactcagggccacctctcactggaggggctttgtctaggtccgagtcctcccatgtcgtatcttctggctctccatgcagccttccttcgttgcagaaggagctgtgcccactgcccacaggacgcagggtgtggccacttctgttgactctgcttttgtgtcacaggttttgacaacttcgagcagctgctctcgggggctcactggatggtgagtgctgaggctggttctctgccaagtgctggccagaggcgcgtgtgttggtcctggtcccccgctttctcccccactgtcctgtccctcccctccccgtgcagctgctcagctcccactcatcctgctcctgtttcaggaccagcacttccgcacgacgcccctggagaagaacgcccccgtcttgctggccctgctgggtatctggtacatcaactgctttgggtgtgagacacacgccatgctgccctatgaccagtacctgcaccgctttgctgcgtacttccagcagggcgacatggagtccaatgggaaatacatcaccaaatctggaacccgtgtggaccaccagacaggccccattgtgtggggggagccagggaccaatggccagcatgctttttaccagctcatccaccaaggcaccaagatgataccctgtgacttcctcatcccggtccagacccagcaccccatacggaagggtctgcatcacaagatcctcctggccaacttcttggcccagacagaggccctgatgaggggaaaatcgacggaggaggcccgaaaggagctccaggctgcgggcaagagtccagaggaccttgagaggctgctgccacataaggtctttgaaggaaatcgcccaaccaactctattgtgttcaccaagctcacaccattcatgcttggagccttggtcgccatgtatgagcacaagatcttcgttcagggcatcatctgggacatcaacagctttgaccagtggggagtggagctgggaaagcagctggctaagaaaatagagcctgagcttgatggcagtgctcaagtgacctctcacgacgcttctaccaatgggctcatcaacttcatcaagcagcagcgcgaggccagagtccaataaactcgtgctcatctgcagcctcctctgtgactcccctttctcttctcgtccctcctccccggagccggcactgcatgttcctggacaccacccagagcaccctctggttgtgggcttggaccacgagcccttagcagggaaggctggtctcccccagcctaacccccagcccctccatgtctatgctccctctgtgttagaattggctgaagtgtttttgtgcagctgacttttctgacccatgttcacgttgttcacatcccatgtagaaaaataaagatgccacggagga

SEQ ID NO: 535940 - DNA, 231 bp, Homo sapiens
ccggagtgcaatggttgatcactgctcactgtagcctctaccttctacctcaactgtcctgagtagctaggactacagattgtgtaccaccatgcccagcttatttttgtatttttgtagagatggggtttcaccatgttgcccatgctggtctcatacccctgagctcaagcaactccaacctgcctcgtgcctcccaaagtgctgggattatcagtgtgagccattgca

SEQ ID NO: 535941 - DNA, 1875 bp, Homo sapiens
  misc_feature (33)..(33): n is a, c, g, or t
  misc_feature (64)..(64): n is a, c, g, or t
  misc_feature (114)..(115): n is a, c, g, or t
  misc_feature (1702)..(1702): n is a, c, g, or t
  misc_feature (1710)..(1710): n is a, c, g, or t
ggttattggggtttaatccccaagtcctaaccnttaccctgctttcaggctatggctgtctccntcttgggaaggaaaggagaagtgttccgccgccgtggcttgggctggganncctggttgggtgatgatgtgggtacattcgactgctttgcccgcctgtgagacacacgccatgctgccctatgaccagtacctgcaccgctttgctgcgtacttccagcagggcgacatggagtccaatgggaaatacatcaccaaatctggaacccgtgtggaccaccagacaggccccattgtgtggggggagccagggaccaatggccagcatgctttttaccagctcatccaccaaggcaccaagatgataccctgtgacttcctcatcccggtccagacccagcaccccatacggaagggtctgcatcacaagatcctcctggccaacttcttggcccagacagaggccctgatgaggggaaaatcgacggaggaggcccgaaaggagctccaggctgcgggcaagagtccagaggaccttgagaggctgctgccacataaggtctttgaaggaaatcgcccaaccaactctattgtgttcaccaagctcacaccattcatgcttggagccttggtcgccatgtatgagcacaagatcttcgttcagggcatcatctgggacatcaacagctttgaccagtggggagtggagctgggaaagcagctggctaagaaaatagagcctgagcttgatggcagtgctcaagtgacctctcacgacgcttctaccaatgggctcatcaacttcatcaagcagcagcgcgaggccagagtccaataaactcgtgctcatctgcagcctcctctgtgactcccctttctcttctcgtccctcctccccggagccggcactgcatgttcctggacaccacccagagcaccctctggttgtgggcttggaccacgagcccttagcagggaaggctggtctcccccagcctaacccccagcccctccatgtctatgctccctctgtgttagaattggctgaagtgtttttgtgcagctgacttttctgacccatgttcacgttgttcacatcccatgtagaaaaataaagatgccacggaggaggttgtaggctcagcctctgattttttttttcctgtgatggtgctttatgtagcagagggcaggagcgctcagcaggacgcaggctgtgcctctgcggacacttaacactaagtggtgagcgggtctagagtggagcaaggtgccctgagaagacaatagtggggtgggggcacaatcagtcaggacggcaacttggcctgtgtcaccaaatcccaagactgttttccactcctcacctctgtgactggagaaattggatactctgttcactcgatggttctaaaaactgcattgagattatgtttgtttcgggtgaattcctggacaagaccgaggatgactgccatctcctggcaagacgctcaggtagttcttttgctttaaaaggcagatattgaaaactggaattttttttttttgagtctcgctctgtcacccagactggagtgcagtggtgcaatctcggctcactgcaacctccgcctcccgggttcaagctattctcctgcctcagcctcccgagtagctgggattacacggcgcacaccaccatacccagctaattttngtattttnagtagtgaaggggttttaccatgttgggcaggctggtcttgaactcctgacctcaggtgatctgcccgcctcagcctcccacagtgctgggattacaggtatgagccaccacgcccggcccattttaaaatttttgtagatcagtgtactgttgtaaaaaaaaaa

SEQ ID NO: 535942 - DNA, 923 bp, Homo sapiens
ggaaaaaaagaaccattggatacataggtatggtctgagctatgatatcaattggcttcctagcggttatcgtgtgagcacaccatatatttacagtaggaatagacgtaaacacacgatcgatatttcacctccgctaccataatcatcgtatatccccagtcggcgtcaaagatatttagctgactcgccacacatccaaggaagcaatattgaaatgatctgctgcagtgctctgagaccctaggattcatctttcttttcaccgtaggtggcctgattggcgatgtataagcaaactcatcactagacatcgtactacacagacacgtactacgtggtatgggtcacttccactatgtcctatcaatagagagctcgtatttgccatcatagcgaggcttcattcactgatttcccctattctcaggctacatcctagaccaaacctacgccaaaatccgatttcactatcagtattcatcggggtaaatctaacttcttcccacaacactttctcggctatccggaatgccccgaagtaagtcggagtacctcgaatgcttacgccacatgaaacgtctatcatctgtaggctcattcatttctctaacagcaggaatatagagtaatgctcatgattgagaagccttcgcttcgatgggaaaagtcctatagtagagaaccttccataaagctggagtgctatatggatgcccgccaacctacaggaatggagacccggatacgtaattgtgaaaaggaggatctgagccccaagctgtttaagcaacccaggggccgagagttttcacaggcaaaaacaacaaaaacgttgggggcccacaaatttaaatggggcgggcaaagatattgacgcgcagaacgtgtaagtggtttcaacaccggcagataccaggttt

SEQ ID NO: 535943 - DNA, 751 bp, Homo sapiens
  misc_feature (48)..(48): n is a, c, g, or t
  misc_feature (54)..(54): n is a, c, g, or t
  misc_feature (152)..(152): n is a, c, g, or t
  misc_feature (279)..(279): n is a, c, g, or t
  misc_feature (299)..(299): n is a, c, g, or t
  misc_feature (383)..(383): n is a, c, g, or t
  misc_feature (456)..(456): n is a, c, g, or t
  misc_feature (503)..(503): n is a, c, g, or t
  misc_feature (547)..(547): n is a, c, g, or t
  misc_feature (561)..(561): n is a, c, g, or t
  misc_feature (563)..(563): n is a, c, g, or t
  misc_feature (575)..(575): n is a, c, g, or t
  misc_feature (620)..(620): n is a, c, g, or t
  misc_feature (741)..(741): n is a, c, g, or t
cggctccacgcaccagcaggcgacgcgagaatggcggcagcttcagcngcggcnatctcacgagcatggtcgctgtcggctaagcaagattggagctcactcgtcgtccacctccagctcgacgtaagcggtggctgtgcgactgcggccantttgtggaatggaacaagcagggatcatatgtgaatcccccctgtgtagcggggcatggacagctcgctctctagagattgcctaactggaggaaccaccaggagactctcaaatacctagtttgantgcctttctatgcgggggangaagtactcagcaggacatactatgcaggttacagtgcagcccatcctaagcgcacttgctggaaggcgcagaatgccagtttncttgcctatgaacccacaggagctgggcacacgacgcacacaatgctggagcagcccagagcaacctggggtnatcccgcgggctctcatggacctccatgcagctctacaacggagganggtgccgagcggccggccatgggaccctcttacagttcaccatntgttaacctaagananctaacctagganaaaggtcattagacctcctggtaccctggcttcggggagacctgngtaatccgagaagactgccggggggaatatcctgattccgggtctctcccagaagcccatcagtagctttgctgattttgagcggcacttcctgccagccagtcgaaatcggactgtaggngccacccggt

SEQ ID NO: 535944 - DNA, 474 bp, Homo sapiens
tttccctatgctggcaggctggtctagaactcctgagctcaagcgatcctcttaccatggcctcccaaagtgctgggattacaggcgtgagccatcacgccgggcctcagggaccctttttaaagcactttatattcattaggtggagtcacatgtagctgtcattcttataacaggaaaactgtcaaatactagcaaaagtttatatggggtggcctaatacctggttaaaccttaataaaaggttatgaggtgataagaaaaagctcagaaaggttatgttggcttaaagtacctggttaataatcgggctccagatacctgttttaagcactaagctataacacgtgccctttctttcttttttttggttttttggagacagagtctcactctgtcagcacacgggagtgcaagggtgtgctctgggcttaccgcaacctcggcctcccgagtagctgggactacgggcgc

SEQ ID NO: 535945 - DNA, 575 bp, Homo sapiens
actcagtgaggtgaatactattactatctcaattttacagatgcaacaactgaggcatagagaagtcacttgcccaaggtcacccagcaggtaggtgagctgggcttcagtgcggccctgcctctgaggtggagtccctgcctccactgttgctggatcctcctttagctccccgtggctctgtttccggtagaaggtagaaggctgcagggaaggaggctggggccaggggtggtgtttgcgcctcggggacgcctgcagctggcactgccctccacccagctgataactacagccgggtctggcacgaagccctgcctggaggtgggcggcctgcggcggcggggggtctggctctgcgttcgcccctctcagccccgcctcgccccctgcggggtcagtgcgggtcccgcccgcccgggcaggcgccggcctctcaggcggtaaccgggtaaccgtgggcaggggcggtgccgcgccgggccgcggcctcccggggaggcgggcgggtggggaggtcgagctggagcgatgtgagaatgcggaggagaggcccgggaaacaggctgcggccg

SEQ ID NO: 535946 - DNA, 212 bp, Homo sapiens
  misc_feature (27)..(27): n is a, c, g, or t
  misc_feature (35)..(35): n is a, c, g, or t
ctcattacttatacttcctctcacgcntatacgtnttctcacgtttatacttctctacgctttatacttctcaacgctttatacttcctcaacgctttatacttctcaacgctttatacttcctcaacgctttatacttcctcaaagcttcatactcctcaacgctttatacttcctaccgggaaatgaaatgagaagtataaagcgttgag

SEQ ID NO: 535947 - DNA, 102 bp, Homo sapiens
atcacgccattcttcagccagagctggaagcccaagcgcccacggtctgggcggccacatcaggccacactgactatgatccatccagcaacgatcaccgtt

SEQ ID NO: 535948 - DNA, 159 bp, Homo sapiens
aaaaaaagggggggtttatttgggatttatttgggttttgaggtcctcccaaggttttgtgtttttgatgctaaaaactaaagtttgtaaaactgtagaaagccaaacccggggatggttaactgtttttttaaagggaaataaatctggttttgggga

SEQ ID NO: 535949 - DNA, 227 bp, Homo sapiens
ttctagaggatcccttcgattggcgggcaacttagcagggacccatctctacaaagtatttaaaaaataaaaaattagctgggtgtggtggcacacaagctgtagtccttgtagctacttagggatgctgagactagaagatcacttgagcataggagttcatggttgcagtgagttagatcacaccactgcactccagccttggaaacagagcaagaccatgtctc

SEQ ID NO: 535950 - DNA, 493 bp, Homo sapiens
cacattacactggttctttatcatactaataactctaattaattttcctttccctaccaaaaaatgaggttcattaaggtaggaactcattccatctttatcccagctacttccctgaatttaggacaatgccctgcatataaacaggcaatacctttttagcatttccttcaccaaaaggatagaaaaaatttatattcttccaacaaaataccttgagagggaaaaaatgacaactgtttaccatggataaagctccaaacaccctgttaattaaaaccattcaaacaaaaaagggacctaaatttaaaaatgccaagttttataaaggccaacaaaaaaactaacgtttttttttagaatgtccaaaataatggctacttttgggttcggacaaaacttttttttaatgggaaaggggggaaaaaaaggtcctcctgggaatttcccccccgtttcccaccctccttgggccctaatttggggtgggttc

SEQ ID NO: 535951 - DNA, 416 bp, Homo sapiens
  misc_feature (403)..(403): n is a, c, g, or t
tttttttgagatggagtactcgctctcttgcccgggctggagtgcagtggcgcgatctcggctcacctgcaacccctgcctccccagttcaagaggttctcctgcctcagcctcccgggtggctggaattgcaggcacacaccaccatgcccagctgctttcttgtatttttagtggagacgtggtttcaccatgttggccaggctggtcttgagctcctgaccttaagtgatccgccagccttggcctcccaaagtgctgggattacaggcgtgagcaccgtgcccaggctgttttttaactgactttggattttactccctttctatgcaaatttattttagaatctgttccttaaccttagggggttgggttagacaagtttcaagggagcctcaagtgnaaattgcttaagg

SEQ ID NO: 535952 - DNA, 645 bp, Homo sapiens
ggagcactgggactttttattctctttttccttgagtggtaccaacagatgcaaatgcaatctcgccatttaactttacaggtcgatttcctttcctgatgcagacatctgtggtgcccccttctaggaaggaaaagaatacagctacgatgtgccaggcactgtgttaggcgcttttatatagatcctcgttaggatgagactaagggatgaggacatctctttataaaaggtcccctaagtaatggataagcagaaacacttagaggtgagaaggtctgtcttgcaatgatccaaggataagattgccttacagatctgatgtttgtgtctcaaggacttatttccctatcaagattctcccactccatacttgctccttctaccccaacatgtgctcccgtgcactcctcagatggtcagaggggtaactccaagtccttagagaaatttggggaccaatagaatatgtgaatgtgtgaatattctttaatcaaatcttaaggagtctttgcgaccttctggtaggagagttgtttggcattcatattagaagccagatctcactatgtatcgacaggttgggctgtgtgtgtgggcctgtgtgtatacaatttccagggtgtctgtgtctgtagcttttga

SEQ ID NO: 535953 - DNA, 289 bp, Homo sapiens
  misc_feature (10)..(10): n is a, c, g, or t
  misc_feature (19)..(19): n is a, c, g, or t
  misc_feature (279)..(279): n is a, c, g, or t
ggttctaccntgcccggcntgatggtgaaagggcccgtagttctggggaagaaccgttcggccaacggcagcgccaaaagccctgaatgcggcggtttttgcggcgcctcgtccaccatcggcgggctgctctactcagagcccgagagcggttgcagcagcgacgacgagcacggtgatgctgggatgagagtcggagccgaatacctcgctcggatccctgaatttgatccaggtgctacaaagttccctgctcttgaccgtggagggatgcttgtntggtctcctt

SEQ ID NO: 535954 - DNA, 208 bp, Homo sapiens
ctgttactcgagaacctgaggtctgatcaaaagacaacgatgccgagcgtctgttcacccgatacgccaccaagtgctacacgtcagccttgcaaaatatgccccggagatcagcgaaactttcctattacctatctggctggcctgagcttggccgaaagttacgctggcagttacgcgaacattctagggccgtcccaggcgccca

SEQ ID NO: 535955 - DNA, 396 bp, Homo sapiens
gactctcgaggctcccctcgtgttatccccactaccaatgtacaaagattcccttttctccacatactaaccaatacttgttatcttctgtctttttgaatagccattctaacaggagtgaggtgatatctcactgtggttttaacttgcatgtccctgatgattagtgatattgagcatcttttcatatacctgttggccatctgtacgtcttgtcaattcagtttctttctccttttttaattgggttatctgttttgttattaagttccttatatattttagatatcaaccccttatcagatatatggtttgcaaatattttctcccatagtgttgattgtcttttcactctgttgactatttcctttgttatacagaagctgttttagtttg

SEQ ID NO: 535956 - DNA, 960 bp, Homo sapiens
gcgcagccattttggtttcctgaccttgggctactggctgaccgtttattgtggtgtactccgtgccatcatgtccgtcctgacgccgctgctgcttgcggtgcttgacacggctcggcccggtggctcccagtgccagcgctgccaagatccattcgttgcctgccggaggggcagcttgcggatcctcggaattgcgccgttgcggcttacctcctgcttcgtgaccttccttcctgccagcgggctggatcctgtcacagctggtacgatgctacaggacggccacgagtgaacggggtccgttctgtccctcacactgtgacctgagccagcaccaccggcccatcctggtcatgtaactgcatttgtggcctgggctcgcctggatcatgtcattcaattccagtcacctcttcttgcaatcatgacctcttgatgtctccatggtgacctccttgggggtcactgaccctgcttggtggggtcccccttgtaaccaactaagaatctattttacaactgttaacgcacaaaccaaaccaagcaccttcccgggggtactcaatttcccggttcgccgccacacagacgtacctggacattggcgccatgggccactacgtgcgaccctgacccagtgtgctgtgatcaccaaaagtcggtcacaaaatcgtgccgggatttcaccttttaacgtgaagcccacaatacattttgcaatgacaccccggttgaacccttgcacatttactgcaacctcgcgaaaaaacgacgcccacgaccataaaacgcagcgcgccgacggagcagcccagatcgaccaaggagccccgaattgcaccaacccagtgccacgacacccacaaagctagtgaccacgccaccatgccaaggaaacacgctgctaacccaccgatgccgcccgacgacccgcccaagcaggcccgacccacaggg

SEQ ID NO: 535957 - DNA, 752 bp, Homo sapiens
ggtgttggcttggatggtacctaccgcatcagttaacagaaatacaggagaaatggcgtgattcacgacgctggcagctctctgttgcactaacagatgcaaccagaactggagatggaccatggggaaggacttataggagagtctctcagggtgacgacgccgtggaaggcagtgcggagagctttcagagggtagcagcgtggacgagaaacgagttaagattcagatggacaagcgggaaggcagtagagagccctgagcaggacagcgatcaggaggtggtgacaaaagtaacgatgatgcacgagaataaagaggccagaagctggagttttatgtaaatgcgatttggtctataacttgaataacactagaagatttatattgcagaaagagaatgatggttgggcaactataggaactgatacgattatattcttcatgcagagttaaaaagcgccttgtgcctcctttggaccacttgccaagtccctgtctctttcagacacagacaagcttcatttaaattatttcatctgatcattatcatttataactttgatggtcacttcatcagtttttccttttgaaaggtgtatgaattcattacattttattctaatgtattatctgtagattagaagatcacaatcagcatgtatctgcctatactttggagttcagctgtctttatactcaaaagtgtccttaatagtgtcttgcctgaaataaatactaagggggtgtac

SEQ ID NO: 535958 - DNA, 144 bp, Homo sapiens
  misc_feature (1)..(1): n is a, c, g, or t
  misc_feature (97)..(97): n is a, c, g, or t
natttgactgttattcctcattcccagaagagcatttcatcagtcagtgatataagccttatcttatctaaagcatcagaagcatatgacatcagtnctctcaggacaatctctttatatttatacaatgaatcgatgataagc

SEQ ID NO: 535959 - DNA, 216 bp, Homo sapiens
aaccttgcctggtgttatcctccatctctaggctgtcttgggacgtacctgccaccgaggcagcccctccacctccagagccagtccctggcctgcacagtgccccagcaactggtccagtggtgtggaggactttgttcctgactgaccgcctggaccgcatgcttcctggaaggacacacacccccgccatggcacgatgaagaatggtgtggg

SEQ ID NO: 535960 - DNA, 298 bp, Homo sapiens
  misc_feature (61)..(61): n is a, c, g, or t
ggtttcaggaacagcccttcccccaccaatgggaccctccccaggctggagagtttatcantacgtaaggaaaggtccttccgcccctccaaagcccttaccatgcctaacagaggcatgcatttttaaatcagattattcaaggacttttgtttaaaagatgtttataatgtttgggaaagaggataggatgggaatgctgcctaaaggaagggctggtgaaaggtgtttatacaaggttttattaaccacttttaagggtacacctccctccaaactactgcattttttatggatt

SEQ ID NO: 535961 - DNA, 171 bp, Homo sapiens
gacctagagttactgttattgccaacacccatcatttacgattcttcttgccacaatcactaaatatctagtgctaaacctatcttgtattggcagcacagttactcagatctgcactcctgtctcttgggaagcagtttcagataaatcattggggcattgcttggactt

SEQ ID NO: 535962 - DNA, 405 bp, Homo sapiens
  misc_feature (29)..(29): n is a, c, g, or t
  misc_feature (329)..(329): n is a, c, g, or t
gagctcgcgcgcctgcagggccatgggcnccgccccgcccgttgttaccggtattgtaagaacaagccgtacccaaagtctcgcttctgccgaggtgtccctgatgccaagattcgcatttttgacctggggcggaaaaaggaaaagtggatgagtttccgctttgtggccaaatggtgtaagatgatatgagcagctgtcctctgaagccctggaggctgcccgaatttgtgccaataaggacaaggaaaaaggttgtggcaaaatggcttccatatccgggcgcgctccacccttccaggtaatccgataaaaagatgtgtcctgtnctgggctaaagttcaaaaggattaaggtcctttgaaaccacagaacttgcagggtaattgaaatttattcccccca

SEQ ID NO: 535963 - DNA, 293 bp, Homo sapiens
gtatgtcagcggctgtgggaatctctgggtggtagcagactttgagacagaggcaggtgaacgtgctagtatctctctctgagctcttcgcttcaacaaggccaggcttcacaggcggaagctcagaagtagacgaaaccgcgctggactccgatgaccctgctgatgtgaaactggactccgatgaccctgctgacctgaaactggactccgatgaccctcttgacctgaaactggactccgatgaccctgctgacctgaaactggactccgatgaccctgctgacttgaag

SEQ ID NO: 535964 - DNA, 258 bp, Homo sapiens
agtctgtcgatcagagtctgcagctccttgcagagagggcaggactgggtgagtaagatgcggcgtttggaagagcggtggacttattctgagacaagattatttgccggtggcttcctggtcagtaacttccaattttggcctggccttttccagtgtgggaaggcccatggtccccctcactgggaattatttctgggggggttgcatccaatcctggaaaggggtggggaggagggagggcaacagaagggacag

SEQ ID NO: 535965 - DNA, 447 bp, Homo sapiens
agcggtccacgggcggaagaaggcggcggcggcggcagaagcggcggcggcggcggcggcgggagccgaggaggaggttccggacgctgcttaggaaccggggactcaggagtgcccgcgccctgagcgctcagctccagacggcgtcatggctgagtacgggaccctcctgcaagacctgaccaacaacatcacccttgaacgatctagaacatgctcaacgtctggcccctgcaaaatggcaaacgaccaatcccccccagccgaacaacgacgtcgaggacgatcactacatggcagtgcctgcgtttagcttcctggagagccacaacaagctggacaaagacaacctctcctacattgagcacatcctttcgagcaattcgttccccctgccccgggtccccttgaaacccttaacttcaacctaatgcgtggcgtctgacc

SEQ ID NO: 535966 - DNA, 794 bp, Homo sapiens
gagagaaggccggaggggtcttgcggtctgtagtggcgctgttggaggccgtggcggatccgtaagctgctggttttgcggctggaaagagcggagagagggtctcgggcatttcttctgtcgggatcgcccgcgaaggatagttagtggtgcatggatgatgtgctctaccgtcatggtgatgaagctgtgtcataccttgctcactgaagatgaagaatctgggtggatctagcaatctgtggagggccaggagatctgggggctaatgaagcaggagagaaacaagaagttcttgagaacttatgggtgcgggaaagaaagaatatactggccgtcttgtttataggagatcacaaatcaacatctcatttccgaaccggggaagaagacaagaaaattaactgaagactgaagtctccaatatcagcaaagtatggaacagtaaattatcaggaagatatcgggacattgtggacttggcttcagtgaggtagaagaccatgatggagaaggtgatgtggtgggagattgatgattgatgacgattgatgattcactgatcctgaaagtccagatgattctgaaaagcgattccgaagtcagagacagaagaatctggtgaaggaatccaagctggtgaagcaccttgatgaagtggaggattccaaaaacaaaaaaagatgcaaaagggaatttttacaactgatgtttgttaaatccagtggttcataactccagaggttagttttggtttaaagttaggctttttgttaatggcccgggggggctgg

SEQ ID NO: 535967 - DNA, 274 bp, Homo sapiens
actctagaggttccccattccaaacagccccccagcagattgcagcggacatccctagaagtggttgtttcccttgcatgggacgaaagcttggatccaagcatccaggctcaggaataaacatggcctgctatagcagaataccagcgtgcatcgcaggagaacgtcgctatggaacctgcatctaccaggcaagactctgggcattctgctgctgagcttgcagaagaagaaaaatgagctctaaatttgctttgagagctacagggaattg

SEQ ID NO: 535968 - DNA, 579 bp, Homo sapiens
cgtctacgacgcccagaagagcgcccaagaagaaaagggccataagtggagtccctgtgctaggattttctcatcatagctgtgtgaggtgggcgcacaggagatcgatgggctatcagagaagaacatgtgatcatccaggccgagttctatctgaatcctgaccaatcaggcgagtttatgtatgactttgatggtgatgagatttgccatgtggatatggcaaagaaggagacggtctggcggcttgaagaatttggacgatttgccagcttggaggctcaaggtgcattggccaacatagctgtggacaaagccaacctggaaatcatgacaaagcgctccgactatactccgatcaccaatgtacctccagaggtaactgtgctcacgaacagccctgtggaactgagagagcccaacgtcctcatctgtttcatcgacaagttcaccccaccagtggtcaatgtcacgtggcttcgaaatggaaaacctgtcaccacaggagtgtcagagacagtcttcctgcccagggaagaccaccttttccgcaagtcccactatctccccttcctgccc

SEQ ID NO: 535969 - DNA, 220 bp, Homo sapiens
agagtttgagctggaggaatcttacaatggcaggttcattctgggaaccatcatgaatacgatcagggtggtgactcttcagctgttaaaccaacaggagcaagagaaggaagagagcagcagttaagaagaagaagaaaaagcagaagagcggctacgaagaccttcccaggagcagtcagtctcagccagttctgggcagactcaagcacgcttgaat

SEQ ID NO: 535970 - DNA, 1009 bp, Homo sapiens
tcagctagtacgagccggtggtgaatcggccgagggtgctgtgctccagtagcttcgctccatcagggttggcatcatctgatggcatgtcaagtgtgcccagcagcggatgctgaagcaccagagctcaaggccttcacctgctctaggccagccctgtcaccacctccactgtccatgaccaggccgaaggcagggaaccgccctccccagtcccggctgtccagcaaggccccgagacttttcttctgtgatttccaaaagctagggcagccgtgcgtgtttatagtttccgtctccgatcccgtcctaccttcccctcccggctgccccatgaagtttcctatcattccatgtgagaaggctgtgtttccacctgtaatcctacgcatctttgcccagttccctagggcatgagataagcggagggcccgacctagggaccatatgagagagtagtgaagacggggacgagccgggtagcgaatacaccaccttcatgacacccgggccttctcctgcccttcgtcccgcggcgggcccgagcgtggtgctctcctgcgggacctcgtcgcgggtccttgggcctgcccattccctggccctccgcgctgccatcgtccagaatcctgacatcgcgaagcggcgcggggattgttgggtcgcgcctgttgccccggcccttttcttcttccccttcccttccccggtcctcggtgtccccgcgtcggctccccacccgcctgctcctgttgccaggctcctctggtcgccatgatgtgccttccttggggcccagctgactggctttgccgtggctgggtcgtcctggtcttgcatgagaagcataggtcgactggcctgtttgtatcctttgctggtcttgctagggccccgggtcgttcccaggttgctgaacccgggagtccaccgatcgtactttcctgccccggacgaactcttgacggggcctctacccggtcccaccactggtcatccccggatacca

SEQ ID NO: 535971 - DNA, 156 bp, Homo sapiens
  misc_feature (107)..(108): n is a, c, g, or t
  misc_feature (133)..(133): n is a, c, g, or t
ttgtcacacgcacggagtgggatcttgacgatctcgtcgatcagctgcctcgcagcacgccgcgtcgttgacgtcgagcaccgcgccggcgcccttgagctgctcgnnggccaggtattcgccgatcgcggcngcgcccttctccggtggcgtggt

SEQ ID NO: 535972 - DNA, 312 bp, Homo sapiens
gcgatgacagagccgcgagcgggcggggccgtgcatgggccaaatcactgcccgcgtgaatacggcgactgattgtgatgagacagaatctgggggggtcacccaggcgggagtacaagggcacaatcccagctcacgtgcaacctccgcctatcaggttcaagcaattctccagcctcagcctcccgagtagctgggattacaggcgcctgccaccacgccccattaatttttgtatttttagtagagatggggtttcaccatgtaggccagactggtctcgaactcctgacctcaggtgatctgcccgcc

SEQ ID NO: 535973 - DNA, 365 bp, Homo sapiens
  misc_feature (326)..(327): n is a, c, g, or t
atctgtttaagtgtgcatgttatgtgtgtgtctctgtgtttacagatgtgtatgtgtgactcctgctattcaccctagggcctgacctagtttgagtatcattttgtttaggacatgtatccattactgaaggagctaatgtttcaggatagaaatgttcggcagaattgttaaagcctcagtttttccaaggtgaagtttttaatcccaggaacccacaagcacttctgtgtttggctgtgagtttgatctgtgattggactggggtgaagcaatgaattcctcaatcaaacacttccctctgaacttcactttgaatactaganntacttgactctctttcttgggcttggcaatattagaag

SEQ ID NO: 535974 - DNA, 767 bp, Homo sapiens
gtacccaggtgttattaacagcaagccagtcattagcatgtttctatagatatatattagctgaaagtatcctttatgggaaacgaagggatgggccaaaataaagggatgggttgggctagttatctgcagcaggagcatgtccttaaggcacagatcactcatgctattgttgtggtttaagaacgcctttaagcagttttccgccctgggcgggccaggtgttccttgccttcattccggtaaacccacaaccttctagtgtggatgtcatggccatcatgaacatgtcacagtgctgcagagatttgtttatggccagttttggggccagtttatggccatatttggggggcctgttcccaacacttctctttcttcaggtctatactcaaacgtcacctccacggagaggctttccctgatcaccctagctacccctgtcactatctctatcctgcttttttttcattatagcactttcataacatttatatattggtcatgtattggtctatattcaatctctcccataaaacataggttctgagagagggaggaatctactgtatgcttcaagctagaagatggttagcacgaagtgggtcttaatgaagagttgtgactgactgaatgattgttatatgaaagtcataagtctaggatttgattatattagtccggtttcacgatcagaagaggaatgttgttacgtggacaatcagtatgctggtacggaggtggagaaaatggggagaacggaataa

SEQ ID NO: 535975 - DNA, 550 bp, Homo sapiens
agatagaaaatttggcagtattatagaaaattatcgagactcacaggcatgaccatctaaatggtgcagcgtctggcacagagcaagcttcaaatagacttatgaaagagctcagtgtcatatacagatcacagagttataaatcagtggtttatttagtggaactcataaaggacagattatatgactggcatgttacactgcggaaggttgaccttgatagcgcttggcacagggatcttaagatcttaaaagacaaagaagtcgtattaggacgagtggtgtgacctgttctatgatgagggtatggattgcccgtaggatcaggatgcacgctacaccaaacctacgccagaatgcattggactatcatattcatcggcgtcaatctgactttatttgcacactattttatcggcctatcccgaatgccccgacgttactcggactaccacgatgcattcaccagatgaaacaaactatcatgtgtcggcgcactgatttatgtaacaggagcatgtttcacccttttcatgaattggggatgcca

SEQ ID NO: 535976 - DNA, 1891 bp, Homo sapiens
tgacaggaaaggaacagcaactggaaaacaagcattgcattgcaccaggatgtctgtgaaatggacttcagtaattttgctaatacaactgagcttttgctttagctctgggaattgtggaaaggtgctggtgtgggcagcagaatacagccattggatgaatataaagacaatcctggatgagcttattcagagaggtcatgaggtgactgtactggcatcttcagcttccattctttttgatcccaacaactcatccgctcttaaaattgaaatttatcccacatctttaactaaaactgagttggagaatttcatcatgcaacagattaagagatggtcagaccttccaaaagatacattttggttatatttttcacaagtacaggaaatcatgtcaatatttggtgacataactagaaagttctgtaaagatgtagtttcaaataagaaatttatgaaaaaagtacaagagtcaagatttgacgtcatttttgcagatgctatttttccctgtagtgagctgctggctgagctatttaacataccctttgtgtacagtctcagcttctctcctggctacacttttgaaaagcatagtggaggatttattttccctccttcctacgtacctgttgttatgtcagaattaactgatcaaatgactttcatggagagggtaaaaaatatgatctatgtgctttactttgacttttggttcgaaatatttgacatgaagaagtgggatcagttttatagtgaagttctaggaagacccactacattatctgagacaatggggaaagctgacgtatggcttattcgaaactcctggaattttcagtttccatatccactcttaccaaatgttgattttgttggaggactccactgcaaacctgccaaacccctgcctaaggaaatggaagactttgtacagagctctggagaaaatggtgttgtggtgttttctctggggtcaatggtcagtaacatgacagaagaaagggccaacgtaattgcatcagccctggcccagatcccacaaaaggttctgtggagatttgatgggaataaaccagataccttaggtctcaatactcggctgtacaagtggataccccagaatgaccttctaggtcatccaaagaccagagcttttataactcatggtggagccaatggcatctacgaggcaatctaccatgggatccctatggtggggattccattgtttgccgatcaacctgataacattgctcacatgaaggccaggggagcagctgttagagtggacttcaacacaatgtcgagtacagacttgctgaatgcattgaagagagtaattaatgatccttcatataaagagaatgttatgaaattatcaagaattcaacatgatcaaccagtgaagcccctggatcgagcagtcttctggattgaatttgtcatgcgccacaaaggagctaaacaccttcgggttgcagcccacgacctcacctggttccagtaccactctttggatgtgattgggttcctgctggtctgtgtggcaactgtgatatttatcgtcacaaaatgttgtctgttttgtttctggaagtttgctagaaaagcaaagaagggaaaaaatgattagttatatctgagatttgaagctggaaaacctgataggtgagactacttcagtttattccagcaagaaagattgtgatgcaagatttctttcttcctgagacaaaaaaaaaaaaaagaaaaaaaaatcttttcaaaatttactttgtcaaataaaaatttgtttttcagagatttaccacccagttcatggttagaaatattttgtggcaatgaagaaaacactacggaaaataaaaaataagataaagcctta

SEQ ID NO: 535977 - DNA, 1103 bp, Homo sapiens
tacggcgtgcaccgaagaacaaaatgcggccattacagtgcctgctccacagcttgtggcaccatcggacacctcgtagtggagtagacgggagtgcttcagatgaggagtctggaggcacactgccccctccagactattccagcctccaccactgccggactcagccatcttcctgcacccccagcctggatcctttaccagggaccagaggtccggggccgtggtgtgggctgagtgcccgtggtccaccacctcaccaaggcccatccaaggcctaccactgaaccccaggcacctcaaccagccagcactttcctgggggaagtggaccagatggggatgaccaggtcctgcatcgagtgcaagacagagtggcacaagaccgacagagacgaggatggactaatgaccacactgctgaggccagacaacgcgacaagacgcatactacacagggcccaccagagaagcagacacgacacacacaagagggaaaaagaacacatcggaccaaacaagaccagacgagcccacatacaagacataaccaccacacacaacacagcaatacacgacgccaaaaaccaaataccacgcgacaagaaccaatggcgaagaggggaaagagcccacaggacggccaagacacgcagggcccaggacagacgacgccaagcacagagagacatagaaagcaccaaaggcacagaagcacacagaacagaccaacgacagagacagagccacacatcacgaacaaaaacggaagcacacgacaataagacagagacagcgtcacacgtaggaaaacaagaaaaaacagccaaagagacacaaaccctcggagaactacacacaaaagagcacaaccacaccgagaaggacacgcaccaagggaacaacacgccgggagaagcaaaacaatcagaaaaacgacacgagcaccgaagacaacacacgcgaaacagccacaaacaaacccacagcacaacgcgcaaacacagacaagtgagacaaaaaacacacaaagcgcaaacaccaacaaacaccacaagcacaccggcaagccaagaggggaccagaccaacagaaccacaaaa

SEQ ID NO: 535978 - DNA, 645 bp, Homo sapiens
  misc_feature (601)..(601): n is a, c, g, or t
  misc_feature (604)..(605): n is a, c, g, or t
tgatgtcagtccccgctgtatctgagtcaatctgcgccccaacaaataccgtcagtataagcacatgttatgatattatcaagaattcaacatgatcaaccagtgaagcccctggatcgagcagtcttctggattgaatttgtcatgcgccacaaaggagctaaacaccttcgggttgcagcccacgacctcacctggttccagtaccactctttggatgtgattgggttcctgctggtctgtgtggcaactgtgatatttatcgtcacaaaatgttgtctgttttgtttctggaagtttgctagaaaagcaaagaagggaaaaaatgattagttatatctgagatttgaagctggaaaacctgataggtgagactacttcagtttattccagcaagaaagattgtgatgcaagatttctttcttcctgagacaaaaaaaaaaaaaagaaaaaaaaatcttttcaaaatttactttgtcaaataaaaatttgtttttcagagatttaccacccagttcatggttagaaatattttgtggcaatgaagaaaacactacggaaaataaaaaataagataaagccttaaaaaaaaaaaatgccntcnntggcctcacggtggagcttttgtcctccttccccttctac

SEQ ID NO: 535979 - DNA, 252 bp, Homo sapiens
  misc_feature (56)..(56): n is a, c, g, or t
ccttgcccaatgcccaaagttgggcaaaaaaaggcagggaggccagttagggccanggagtgagtgttaaaaaaaactggggcccttcgcctgctttttattgggaaaatgggcttcaattaaatggcgaaggaaaggacccccccagtggtccaaaaagggtgcttttttccacctggcccagaccctgtggggcaacggagcttccctgtggcatgaaccccccagggtatttaattatgaatcagctta

SEQ ID NO: 535980 - DNA, 126 bp, Homo sapiens
accttctcgctagtacgaaaattatgccattgaccggagcataactgtatattatgctctctctctccagctagcccataaaatctcgaggctagcagtctatctatacccctgtaagctagaaca

SEQ ID NO: 535981 - DNA, 928 bp, Homo sapiens
cccgctggccatgggagtatgtcaacgacttcgacctgctcaagttcgacgtgaagaagtgagccactggggcgcgcggagcgtccgggcaggccctggacacgcctgcagcagccggtcggtgtcctccaaccgtcagcactccgtgtagctccgtgcccctcgtcggcccagcttcaggcccgagcctgatagcatgaagacacacctcgagtggatcttgtacttgtgattggcggagcaactaccagcagatgaaacccccgaggcgctcaacctgacgccccgaggacgcgggtggaacgcggcctcatcggactcgacaccccaagtggccaacagcccgctggccaagaggcttttcgaccagcctttccggcgggccgctccaaccaaccacgcacgatcagccaaccagccctcacgcgcagacaccactccgtacccggggcgcctggcgtttggccccacgggaatgaggcttggggggcccagcacctgcttcgaccccggcgaccattcaagaccatcgattcaccgcaaaagggcggtcgcgccgagcccgtcgcgatcacaaggcggcccagattaggcccccgggggacaaactaaagctgccccaacttaggcacaccccccgtgggggccccgtggacccggcgaagcggcgaaacgcggccgctccggggcggaacaggtcgcggcgtgcgggtcgcgggagaccacacggggcggcagggcgtggaaccgcgaaccgcttttcctcccggatcggaaccccaaaagacactctccgggtgggctccccatatttgttccccggttgccggccgatgagttaaaacccaggcaaccattttgcaggggtgcgctttttcccaccccaagaggggtaaccgcggcacggcatgcgtaattcacgcgcccc

SEQ ID NO: 535982 - DNA, 399 bp, Homo sapiens
ttatgttctgacccaccaaagacatgtgagcaacgtgctaatgaaaagctagtaaacagccgcgttagagctatagtcagctttcaactccactctgaggtgaacattccaattacattcgagacttaagttcttgcaattattgcctaacaacagttgctgagtccagtatttacaatattacagcactagcagatcagtgtctacaactcatctttttctgctgtatcctcttcaccagttgggggagggcctgcacttccatagagtttgctgataattggttgaacaatttcttccagttccttcttcttagctttgaagtcttcaatgtcagcatcttggtggctttccagccattcaatcttttcttctacagctttttccatggtctcctta

SEQ ID NO: 535983 - DNA, 261 bp, Homo sapiens
agtgtgatatggcgtatatatctcgcgcgtgatgcagctgcgtgactagcaccttgggcgatccaccactcctctccgtaggaggctgccccgtctaaccggcttggtgcgcaagtgggccattgatcgaagaattcacaggaaacaatagcctcatcatccccatcatcatagccgagcatcaggctccttaacctctacttctacctacgcctaatctactccacctcaatcacactactccccgcgtcagtatagata

SEQ ID NO: 535984 - DNA, 1670 bp, Homo sapiens
tgacaggaaaggaacagcaactggaaaacaagcattgcattgcaccaggatgtctgtgaaatggacttcagtaattttgctaatacaactgagcttttgctttagctctgggaattgtggaaaggtgctggtgtgggcagcagaatacagccattggatgaatataaagacaatcctggatgagcttattcagagaggtcatgaggtgactgtactggcatcttcagcttccattctttttgatcccaacaactcatccgctcttaaaattgaaatttatcccacatctttaactaaaactgagttggagaatttcatcatgcaacagattaagagatggtcagaccttccaaaagatacattttggttatatttttcacaagtacaggaaatcatgtcaatatttggtgacataactagaaagttctgtaaagatgtagtttcaaataagaaatttatgaaaaaagtacaagagtcaagatttgacgtcatttttgcagatgctatttttccctgtagtgagctgctggctgagctatttaacataccctttgtgtacagtctcagcttctctcctggctacacttttgaaaagcatagtggaggatttattttccctccttcctacgtacctgttgttatgtcagaattaactgatcaaatgactttcatggagagggtaaaaaatatgatctatgtgctttactttgacttttggttcgaaatatttgacatgaagaagtgggatcagttttatagtgaagttctaggaagacccactacattatctgagacaatggggaaagctgacgtatggcttattcgaaactcctggaattttcagtttccatatccactcttaccaaatgttgattttgttggaggactccactgcaaacctgccaaacccctgcctaaggaaatggaagactttgtacagagctctggagaaaatggtgttgtggtgttttctctggggtcaatggtcagtaacatgacagaagaaagggccaacgtaattgcatcagccctggcccagatcccacaaaaggttctgtggagatttgatgggaataaaccagataccttaggtctcaatactcggctgtacaagtggataccccagaatgaccttctagtataaagagaatgttatgaaattatcaagaattcaacatgatcaaccagtgaagcccctggatcgagcagtcttctggattgaatttgtcatgcgccacaaaggagctaaacaccttcgggttgcagcccacgacctcacctggttccagtaccactctttggatgtgattgggttcctgctggtctgtgtggcaactgtgatatttatcgtcacaaaatgttgtctgttttgtttctggaagtttgctagaaaagcaaagaagggaaaaaatgattagttatatctgagatttgaagctggaaaacctgataggtgagactacttcagtttattccagcaagaaagattgtgatgcaagatttctttcttcctgagacaaaaaaaaaaaaaagaaaaaaaaatcttttcaaaatttactttgtcaaataaaaatttgtttttcagagatttaccacccagttcatggttagaaatattttgtggcaatgaagaaaacactacggaaaataaaaaataagataaagcctta

SEQ ID NO: 535985 - DNA, 1951 bp, Homo sapiens
  misc_feature (1907)..(1907): n is a, c, g, or t
  misc_feature (1910)..(1911): n is a, c, g, or t
tgacaggaaaggaacagcaactggaaaacaagcattgcattgcaccaggatgtctgtgaaatggacttcagtaattttgctaatacaactgagcttttgctttagctctgggaattgtggaaaggtgctggtgtgggcagcagaatacagccattggatgaatataaagacaatcctggatgagcttattcagagaggtcatgaggtgactgtactggcatcttcagcttccattctttttgatcccaacaactcatccgctcttaaaattgaaatttatcccacatctttaactaaaactgagttggagaatttcatcatgcaacagattaagagatggtcagaccttccaaaagatacattttggttatatttttcacaagtacaggaaatcatgtcaatatttggtgacataactagaaagttctgtaaagatgtagtttcaaataagaaatttatgaaaaaagtacaagagtcaagatttgacgtcatttttgcagatgctatttttccctgtagtgagctgctggctgagctatttaacataccctttgtgtacagtctcagcttctctcctggctacacttttgaaaagcatagtggaggatttattttccctccttcctacgtacctgttgttatgtcagaattaactgatcaaatgactttcatggagagggtaaaaaatatgatctatgtgctttactttgacttttggttcgaaatatttgacatgaagaagtgggatcagttttatagtgaagttctaggaagacccactacattatctgagacaatggggaaagctgacgtatggcttattcgaaactcctggaattttcagtttccatatccactcttaccaaatgttgattttgttggaggactccactgcaaacctgccaaacccctgcctaaggaaatggaagactttgtacagagctctggagaaaatggtgttgtggtgttttctctggggtcaatggtcagtaacatgacagaagaaagggccaacgtaattgcatcagccctggcccagatcccacaaaaggttctgtggagatttgatgggaataaaccagataccttaggtctcaatactcggctgtacaagtggataccccagaatgaccttctaggtcatccaaagaccagagcttttataactcatggtggagccaatggcatctacgaggcaatctaccatgggatccctatggtggggattccattgtttgccgatcaacctgataacattgctcacatgaaggccaggggagcagctgttagagtggacttcaacacaatgtcgagtacagacttgctgaatgcattgaagagagtaattaatgatccttcatataaagagaatgttatgaaattatcaagaattcaacatgatcaaccagtgaagcccctggatcgagcagtcttctggattgaatttgtcatgcgccacaaaggagctaaacaccttcgggttgcagcccacgacctcacctggttccagtaccactctttggatgtgattgggttcctgctggtctgtgtggcaactgtgatatttatcgtcacaaaatgttgtctgttttgtttctggaagtttgctagaaaagcaaagaagggaaaaaatgattagttatatctgagatttgaagctggaaaacctgataggtgagactacttcagtttattccagcaagaaagattgtgatgcaagatttctttcttcctgagacaaaaaaaaaaaaaagaaaaaaaaatcttttcaaaatttactttgtcaaataaaaatttgtttttcagagatttaccacccagttcatggttagaaatattttgtggcaatgaagaaaacactacggaaaataaaaaataagataaagccttaaaaaaaaaaaatgccntcnntggcctcacggtggagcttttgtcctccttccccttctac

SEQ ID NO: 535986 - DNA, 1472 bp, Homo sapiens
gaggcagcccttaggcaacttaaggcctgccttgtggagtgcccctgtgggggactccagccagcctgagtgacatgatccaaagagccctcctgggtaggaaattgccccggtggaatccctcaccagagaagcaggtagcaggccctcgcagaggattaacacagtggctgaacaccaggaaggaactggcacttggagtccagacatctaaaatttggaaatgaaagcattgtccagatctctggcaaagatggcactgtggtgttttctctggggccagttgtgcaaaaccttatagaagagaaggctgatctcattgcttcagacttggcccagattccacagaaggaagacccactacattatctgagacaatggggaaagctgacgtatggcttattcgaaactcctggaattttcagtttccatatccactcttaccaaatgttgattttgttggaggactccactgcaaacctgccaaacccctgcctaaggaaatggaagactttgtacagagctctggagaaaatggtgttgtggtgttttctctggggtcaatggtcagtaacatgacagaagaaagggccaacgtaattgcatcagccctggcccagatcccacaaaaggttctgtggagatttgatgggaataaaccagataccttaggtctcaatactcggctgtacaagtggataccccagaatgaccttctaggtcatccaaagaccagagcttttataactcatggtggagccaatggcatctacgaggcaatctaccatgggatccctatggtggggattccattgtttgccgatcaacctgataacattgctcacatgaaggccaggggagcagctgttagagtggacttcaacacaatgtcgagtacagacttgctgaatgcattgaagagagtaattaatgatccttcatataaagagaatgttatgaaattatcaagaattcaacatgatcaaccagtgaagcccctggatcgagcagtcttctggattgaatttgtcatgcgccacaaaggagctaaacaccttcgggttgcagcccacgacctcacctggttccagtaccactctttggatgtgattgggttcctgctggtctgtgtggcaactgtgatatttatcgtcacaaaatgttgtctgttttgtttctggaagtttgctagaaaagcaaagaagggaaaaaatgattagttatatctgagatttgaagctggaaaacctgataggtgagactacttcagtttattccagcaagaaagattgtgatgcaagatttctttcttcctgagacaaaaaaaaaaaaaagaaaaaaaaatcttttcaaaatttactttgtcaaataaaaatttgtttttcagagatttaccacccagttcatggttagaaatattttgtggcaatgaagaaaacactacggaaaataaaaaataagataaagcctta

SEQ ID NO: 535987 - DNA, 235 bp, Homo sapiens
cccatcgtcctagtatcctagccttagcctagctcccaaggtatatccaaggtacctagaccaaggaaggcaaggagtccataaccagaggcccaaacaaggctaagccctagaagcaagggcccccaagcctgaggcccaggagtggacagaccttgtgacacccattctctcttccttttccatctgtgccgaactctggacactgcctggaggaatcaggcctccgtagcca

SEQ ID NO: 535988 - DNA, 1344 bp, Homo sapiens
gaggcagcccttaggcaacttaaggcctgccttgtggagtgcccctgtgggggactccagccagcctgagtgacatgatccaaagagccctcctgggtaggaaattgccccggtggaatccctcaccagagaagcaggtagcaggccctcgcagaggattaacacagtggctgaacaccaggaaggaactggcacttggagtccagacatctaaaatttggaggaagacccactacattatctgagacaatggggaaagctgacgtatggcttattcgaaactcctggaattttcagtttccatatccactcttaccaaatgttgattttgttggaggactccactgcaaacctgccaaacccctgcctaaggaaatggaagactttgtacagagctctggagaaaatggtgttgtggtgttttctctggggtcaatggtcagtaacatgacagaagaaagggccaacgtaattgcatcagccctggcccagatcccacaaaaggttctgtggagatttgatgggaataaaccagataccttaggtctcaatactcggctgtacaagtggataccccagaatgaccttctaggtcatccaaagaccagagcttttataactcatggtggagccaatggcatctacgaggcaatctaccatgggatccctatggtggggattccattgtttgccgatcaacctgataacattgctcacatgaaggccaggggagcagctgttagagtggacttcaacacaatgtcgagtacagacttgctgaatgcattgaagagagtaattaatgatccttcatataaagagaatgttatgaaattatcaagaattcaacatgatcaaccagtgaagcccctggatcgagcagtcttctggattgaatttgtcatgcgccacaaaggagctaaacaccttcgggttgcagcccacgacctcacctggttccagtaccactctttggatgtgattgggttcctgctggtctgtgtggcaactgtgatatttatcgtcacaaaatgttgtctgttttgtttctggaagtttgctagaaaagcaaagaagggaaaaaatgattagttatatctgagatttgaagctggaaaacctgataggtgagactacttcagtttattccagcaagaaagattgtgatgcaagatttctttcttcctgagacaaaaaaaaaaaaaagaaaaaaaaatcttttcaaaatttactttgtcaaataaaaatttgtttttcagagatttaccacccagttcatggttagaaatattttgtggcaatgaagaaaacactacggaaaataaaaaataagataaagcctta

SEQ ID NO: 535989 - DNA, 464 bp, Homo sapiens
tattgcgtcactgcgagtccagagcgcacggctggatcatgagcacgcccgcgctggcgcctgcgcgcttgcgcatcttcctctgcccggcgcgcgccgcagccgtcgggatcacctcggggttgcgctgcttctccagcaagtgcatgcgcgccatggtctcagtcagcatgtctatgagcagttcctgctgcagcttcaggtagttgttctcctccagcaacacttggcttttggaccgctgcacctgcgccttccagccccaggcggtccgcgagagcagcggcgaccgcgtcctcgccagctggctctcagtggtccaccgcccgccgcggaacacgaaggcctggttgctgaggcgcatgcacggcgcgccgtaggcgaggcccagctcggcctggcgcgtgttgtggtccagcaggtagaaggtggacagggagggcatgcggcgcagtggcggccgc

SEQ ID NO: 535990 - DNA, 345 bp, Homo sapiens
ccaagctccccgagtgagcaattcctgtcccttttaagggctcacaactctaagggggtgcacgtgagagggtcgtgatcaattgagcaagcagggggtacgtgactgggggctgcatgcaccagtaactagatcggaacaaaacaggaaaggcattgtcacagtgcttttctatacaatgtctgtaatctatagataacataccaatcacgtcaggggttgatttttaactaccaggcccacggtgtggcacctggggtgtctgcttgtggatgtcatttctgccctttagtttttactttttctttctttggaggcagaaattgggcataagacaatatgagg

SEQ ID NO: 535991 - DNA, 388 bp, Homo sapiens
atgcccgatcagataggcggtgggatgacaccctgcccctcctggaacactatagaccccgagggacagggacaggcttgaccaggactgcttgaagatcgtagtaattctggatgctctgtccagtgcctgcctgaggccccattcccgcctggcagatctgtaacctgacctctgacactctcaccagcgattcctacaagaagtggagactctccagtatggatcgtgaactggaggcggggctccaccgcgggcggttgcaggacactcacccgaacatccttctgtcatgcaccctcgagttacctcatcccgctgcgatcgaggagcgatgaggaccaggaggagtggggagagcggtcgcaccgttctgatcgtggctcgc

SEQ ID NO: 535992 - DNA, 2143 bp, Homo sapiens
  misc_feature (1860)..(1860): n is a, c, g, or t
  misc_feature (2143)..(2143): n is a, c, g, or t
tgacaggaaaggaacagcaactggaaaacaagcattgcattgcaccaggatgtctgtgaaatggacttcagtaattttgctaatacaactgagcttttgctttagctctgggaattgtggaaaggtgctggtgtgggcagcagaatacagccattggatgaatataaagacaatcctggatgagcttattcagagaggtcatgaggtgactgtactggcatcttcagcttccattctttttgatcccaacaactcatccgctcttaaaattgaaatttatcccacatctttaactaaaactgagttggagaatttcatcatgcaacagattaagagatggtcagaccttccaaaagatacattttggttatatttttcacaagtacaggaaatcatgtcaatatttggtgacataactagaaagttctgtaaagatgtagtttcaaataagaaatttatgaaaaaagtacaagagtcaagatttgacgtcatttttgcagatgctatttttccctgtagtgagctgctggctgagctatttaacataccctttgtgtacagtctcagcttctctcctggctacacttttgaaaagcatagtggaggatttattttccctccttcctacgtacctgttgttatgtcagaattaactgatcaaatgactttcatggagagggtaaaaaatatgatctatgtgctttactttgacttttggttcgaaatatttgacatgaagaagtgggatcagttttatagtgaagttctaggaagacccactacattatctgagacaatggggaaagctgacgtatggcttattcgaaactcctggaattttcagtttccatatccactcttaccaaatgttgattttgttggaggactccactgcaaacctgccaaacccctgcctaaggaaatggaagactttgtacagagctctggagaaaatggtgttgtggtgttttctctggggtcaatggtcagtaacatgacagaagaaagggccaacgtaattgcatcagccctggcccagatcccacaaaaggttctgtggagatttgatgggaataaaccagataccttaggtctcaatactcggctgtacaagtggataccccagaatgaccttctaggtcatccaaagaccagagcttttataactcatggtggagccaatggcatctacgaggcaatctaccatgggatccctatggtggggattccattgtttgccgatcaacctgataacattgctcacatgaaggccaggggagcagctgttagagtggacttcaacacaatgtcgagtacagacttgctgaatgcattgaagagagtaattaatgatccttcatataaagagaatgttatgaaattatcaagaattcaacatgatcaaccagtgaagcccctggatcgagcagtcttctggattgaatttgtcatgcgccacaaaggagctaaacaccttcgggttgcagcccacgacctcacctggttccagtaccactctttggatgtgattgggttcctgctggtctgtgtgttttttatgatgtttatgatcacaaaatgttgcctgttttgtttccgaaagcttgccaaaacaggaaagaagaagaaaagggattagttatatcaaaagcctgaagtggaatgaccaaaagatgggactcctcctttattccagcatggagggttttaaatggaggatttcctttttcctgcgacaaaacgtcttttcacaacttaccctgttaagtcaaaatttattttccaggaatttaatatgtactttagttggaattattctatgtcaatgatttttaagctatgaaaaataataatataaanccttgaacataaagaaaaagaggcactgaaaccttggtggcgccgcttccctttagggagggggaaacgatggttcctattcaatagatcgctgagctggggcgtacgggtggggggaggcggtatgagcacactcaaaggggggaatacgcggtttcccagaaggtgggggaaaacgcgagaaaaaaactgtgagccaaagggccacaaaccggcagaacgcgcaaagagcgcgctcgtggggtgtttcactaggccccgccccgagaaatgatcaaaaatn

SEQ ID NO: 535993 - DNA, 589 bp, Homo sapiens
  misc_feature (62)..(62): n is a, c, g, or t
  misc_feature (66)..(66): n is a, c, g, or t
  misc_feature (69)..(69): n is a, c, g, or t
tattagaataaaattatagcctcactcccagacaaagcaacgacccacgcccctttagggtnaacnagnatgttatgtattatcaagaattcaacatgatcaaccagtgaagcccctggatcgagcagtcttctggattgaatttgtcatgcgccacaaaggagctaaacaccttcgggttgcagcccacgacctcacctggttccagtaccactctttggatgtgattgggttcctgctggtctgtgtggcaactgtgatatttatcgtcacaaaatgttgtctgttttgtttctggaagtttgctagaaaagcaaagaagggaaaaaatgattagttatatctgagatttgaagctggaaaacctgataggtgagactacttcagtttattccagcaagaaagattgtgatgcaagatttctttcttcctgagacaaaaaaaaaaaaaagaaaaaaaaatcttttcaaaatttactttgtcaaataaaaatttgtttttcagagatttaccacccagttcatggttagaaatattttgtggcaatgaagaaaacactacggaaaataaaaaataagataaagcctta

SEQ ID NO: 535994 - DNA, 148 bp, Homo sapiens
actctagtaggatccccatgtcattcactaatttttgaattgttactcatatatgctactagaaaatgccttgtttgatgaagcacattttggttagttgaggtcttttgttttcgcctttagctttctaagtccttcttacaactgt

SEQ ID NO: 535995 - DNA, 125 bp, Homo sapiens
agtgtcagacctaactcgaagtccatcgatgcctggtctccagatccacgaggatggtccgaggaacatattagttaccagtgggttcatagtattaaacatggattctctccagctgtacctca

SEQ ID NO: 535996 - DNA, 517 bp, Homo sapiens
caagccctagtcatgtaatatcgtccctctctgcatctcacaatagcttagtgatgctgttgtaccacattgtaagttgaggcttaaacgcagtctcctcccattctttgcagtaattctgtagtcaacatccccctaagttagtgctactgagtcaatgttccttggagtgatgtagagttttcaacagagatcgattgtggagtataatcttgaatcctagaaataactcctcctggtagatcctattttctttacgaaacagagaatgctgttgggtgtggaggctcacacctattatgacaccacttggggaggctgaggcagtcgtattccttgagctcaagagttccaagaccagcttcggcaacatggcaaaaccctgctccgcaaaaaatcctaaaattaaccaggtatggtgcctggcatctgtggtgccacctgctcgggagggtgacacaggaggatcactttagcttagcggcgaaggttgcattgagccaagatcaaaacactg

SEQ ID NO: 535997 - DNA, 443 bp, Homo sapiens
gccagtatcacatatcggaacagttgatctgataacaagatggtactgtattagtccgttttcacactgctgtaaagaacggccaagagtgggtacttgatagaagaaaagaggtttaattgactcagtgctgcgtggctggggaggcctcaggaaacttacagtcatggcggaagatgaaggggaagcaaagaccttcttcacatgatggcaggaaagagagagctagcaaaagctggaacaactgccttataaaaccatcagatgttgtgagaactcactatcaggagaacagcatggggcaaactgcccccatgatccagtcatctcccacggggtccctctcttgacacctggggattatgggtattacaattcaaggtgagatctgggtggggacatcgccaaaccatatcagctactaagtgatcgtggggttgtaa

SEQ ID NO: 535998 - DNA, 1357 bp, Homo sapiens
gccccccctctttcatgatattaatactcgccagattttattcacattcacccccttgattggggttcccaaaacaccaaacaatacccgaatttttttagggcgaccacgccatatatataaggagaacctttctctcaagggggagtctccccacacaaaacagtgttgtggtctgtaccacaacaaaaataccactcacgcgccctttgtttttatatcacacctcccctggcgcccccatacttttaacatgattgtcaccgcggtgtcccctctaaagaggtgtatactccgcaggagacacttcgtgtggtgggcggcactattttttccgggcccccccagaggggggggcgcgtaaaccccctgcggtgggagggcccccccctcccccctggtgaaaggccctctcttcgtggccacccccctttatcttgagggagtggttatcccccacagggtatattttgtgtggtctccccgtggccccctggccccccacccgccccccccccgcaaggtggccgcccctctcactcgctcggcgcactctctttttttcccgccccaactttgtcgagatattctcttgtggcgcccgctcatatatacaccacggtttctgttttcccccacacaaggtgtccccgcccctctttcttgggtgataactctctggatatattctctcacgcctctttataagagaagagagattgtagaaagagaatattttctctcttcacacgggggagagaaatttgtgtttctatcactctttggggcccaccagcgcggttttttggtagagagaagtttcccccccccccctcgcgcgcggggtgtagaaagagaatctttttcgcgggagatttctcggtctgtgcgcgctatatgtagatctctctccgcgagaggcgggccacacctcaccacacacacatgtgttcccgcgcgagatatatccgcggagacctgtagacccccgccacaggggcgccgtgttcacacccacagcgtgtcttatccgcacaacacactgtggggtgtcccgcgcacccgcccgcgcccgcagggcccacactccacattctacgagtattacatgaagagtgggagagagaattcccgcgcccgcacacagatgccgcccgcgccgcgctgtttcaagacacgatttccccgactccccagaattccagatttcccgcctggccccacccgcggttcctggcgcccgcttcagccccagaccccgcgcttctcaccccccagaggccccaccacccttttttagggcccgggcccttgtcccggtgtgccccccaattaactccagggacccccccggtta

SEQ ID NO: 535999 - DNA, 208 bp, Homo sapiens
ctttgagcgatagcggcgtctgaggaaccccaaatgcagtggcaagaggaggttggcggcggtggtagtggtgggctcctgcagggagtggtcgtctatcgctcgaacacccattcaggggcagcgccgtgaacgaacagcaaaagtagtccgagatcgatattgaagacgaagttcttcctactttcttgatcagcagtgtcaacta

SEQ ID NO: 536000 - DNA, 383 bp, Homo sapiens
acatttcagtcaaagatggattacatatacaaaagtgggcctatgagattataatacatatttttacatgcttttctatgttttaagtatgtttagatacataaactcttaccgctgtgttcttattgcctgcagtattcagtacagtaatgtagtacacaggtttgtagcctaggagagagaggctataccgtataacccagacgtggtaggctgtacaatctaggtgtttgtaatattctctctgacgtttgcaaaatgatgaaattgcctatggatgcatctgttagaacgtatccctatcattcagtgatgtgtgactgtactaaaatgctcaatctaagtttcaatgccctccataaaattgttgtaatgaaaaatac

SEQ ID NO: 536001 - DNA, 287 bp, Homo sapiens
gtccccttttctcttgtcagagcccccctccaaccgggggggcagtgggggggagaaccccaggccttgaaatttaatggcccctccttcgtggagcccaaaggagggcccccgtagggggtggtgtccccacccccccggccctagggaagaaggggggttttttaatttcccccccccctttttcccccgcccccaggagggggccctttttggggggggcagggggtcccaaatgggctccccctgagaaggtaagaactccaaccaaaatttttttttaatta

SEQ ID NO: 536002 - DNA, 431 bp, Homo sapiens
tcccgtgactgattcagagagtcaacttgctgttggcggaacgccgagatgccagcccaatgacacaaccacaagatatcgcggcagcaggtgccgttgtccagggtggcttgtacgaacggtttcggtccaaccggcgttgtcggtggttgcagcagaattaaccggggttgatttaagctggttcaaagggttgccaaagcacaaggtcgacatcggttttgaattctaatcggccaatttttaactaacagaacaggcgggtaacagcagtctaataacaggcggaatcgataaagcttcgggcgttgatgccaccgcatggtactggccgccgtgaagccccttgcaagtcttgccgggtcgcgggctgatccgcgtttacttgggtacacctattaggattgagatctttggaattcattccgggg

SEQ ID NO: 536003 - DNA, 296 bp, Homo sapiens
  misc_feature (247)..(247): n is a, c, g, or t
tgatttttaagtggacatttctagaacaaaatattgtaactaaagtatcatcccccctatttgttttttcttagatatcacctgagtcgggtaattagaaaaatatattgtggacgtgctgacaaatgcatattacctgagttgcttgtactgtacccggagtcgaatccctttatcaaagaaagttatgcagtttataaaaattcaaggacttaacaaatcagtgactagcattaaactctaaggncactttccataaagcaaagatatttagtcagctaccttcctggggaatt

SEQ ID NO: 536004 - DNA, 1507 bp, Homo sapiens
cccacgcgtccgcaaattcattacttggtccaccaagtggtgactgaagcctacgaggtacagcgactacggcggactaattctacgacgaacgtcgtacttcctcgctactcactacgacacgcagacttatcaccctttcagtgatccacggccgctcatgaactcatgtattgccgttgatctgccttcctagctcctggtagtggcgccttgtgtacctaaacacgtcacgaacaaaactatacatgacagttacataaccaatcttcaggatcgccttgcagggataaataagacaaacctggcgtagagacctagtcctgggccccgtccagtcgattccctaggtctctctattcgtcccatccacattccactagcggcattccctcttacataaccagaacgaagagttcctagcgagtgcgcctgcgcctttaagcagtgcaatcatcaagtttgggtcacatccacagtgggctacttgtaaacggtacccgaggtagcagccgggactaacgggacgggatcatagatccttcaagcatcccgtgacacatgcctttccccccaagttgagttcccctcagggatcccagggcggacacgagagctgacacttcccattgtaagcgctatggacaaatgttctggaagctaagggtaagcctccgcgtaaattgccacaaggccctccacactgccgagataattatgtacgaatctaagccgattcaaacgatacgcatcgggatccactcgctcggggtcacaagtggacgccctgtgggtctgcccccgacggatttcaggggccgttataccaatagagcccaagaatggcaaattctccacgcggcggagggggtcagtaaaaggcacaaaacccacagatattatcatgccggcggttaaccatacggaatcccgggtggggtcttagtaaccttaacggggggcagaaaggggtccttgaaaaatatctggtggtgagatacaaaaattcgaacacagtgttcgattggccccaattcgagatcccttaaggaaatttacatttaccccccttaaggaacagtactcgccgagacagttaagggggccccggtacttttaagccccgtaaataggcagccccccgtcgtaaaacccccttcttgagaaagcccagagaaagaaacacacaggactaaaaccacaacaaaccaaaacaaacaaacaggagagcagcacaaacaaaaaaagaccccaaaggaaaaggaacacagagaaaaaaagaaaacaccagaaaacagagagacaaaaaggaaccaacaaaagagaaaacaaacacagcagcagcgaacgacaacaaaagaacgcaacgagagcgacaaaagccaaacaaaaagcaagagaagacacataccaaacagcgagcacaacaccacaccacgacgacggacaagagaagaaagagcaaccacaaacgggccgggagacaacacaaaacggaagacacaaa

SEQ ID NO: 536005 - DNA, 102 bp, Homo sapiens
ggatttgctggtgcagtacaactaggcttaatagggacatgttatgtttcttctgtggtggcagtatagtcacaggaaatccattcttaggagctccaaaaa

SEQ ID NO: 536006 - DNA, 210 bp, Homo sapiens
  misc_feature (123)..(123): n is a, c, g, or t
taactgtggagacaatggaagaagacaagagccagtcggatgtagatattcagtcttgtgaatcttgtagcaacagtgatagagcagaatatgaaaatggctctagatacttttctgaagatnataatgaaacaaccatgttaattcaggatgatgaaaaccattcagaaatgtcaaaggattggcaaaaagagaagatgtgccataaga

SEQ ID NO: 536007 - DNA, 418 bp, Homo sapiens
tttttttttttacaggtatacaaaaagcaacaagagtttaagttctctttttacatggccacaggctctcttcagccaggggaacttcagctggtgcctctctcttgcagctatgaggcgacagtgtggttgacagtgcctcattacagactgtcccagttaagccaggacaagttcaccattaaaatctggcatgaacagcccgtgggcacgttgggaagtgttaagaaagagccaccggctccttagtcagcgttaaccacagctccaaacgcagttgggtcccagtgtggcaaacgcctcaaacaccaagtcatgcgtcggagctcctattcgggggtttttataaaacaccttttatatagcgatatagatagcacagtaaagtggtgcttctgatgcactctaacatagaagg

SEQ ID NO: 536008 - DNA, 213 bp, Homo sapiens
caaataggcgatagactgagtggttataaggcacaaaaggctatctcatagctatgacagctgggaagacaggactgaaggtacgacaagtctggtgaggcccaacttgctagttcatagatggcaccttcttgctgtgtcccacatggtgaaaggagcaggtagctctctagggaacttttgtaatggcactaatcacataagggtagaccc

SEQ ID NO: 536009 - DNA, 174 bp, Homo sapiens
accccgggggccccccccccggttttccttcttttttccctttttttccccgggggggaaggcccgggggccctaaccctggttttggggtttagggggaggttttcccaaattccgggggttccccttttggaattcccctttttttaactttaaaccggggtttttttttta

SEQ ID NO: 536010 - DNA, 370 bp, Homo sapiens
  misc_feature (56)..(56): n is a, c, g, or t
  misc_feature (74)..(75): n is a, c, g, or t
  misc_feature (147)..(147): n is a, c, g, or t
tccccaattcgcttgctcacaggaattgcctgaacctgggaggcagaggttgtggngaactgagatcgcaccanngccgtctagcctgggcgacagagcaagactctgtctcaaaaaaataaaataaaaaataaaaggaataaaatnaattgaaaggctcctgggtcaatcacgtaatggaaagtagaattgaaccatcagacatcgcaaagcaacctcaagggcgcttgtggtacctggcatcctactacatttctctaggccatttcttctcttctagatgatcatctcagatgttgcttttcattccacagagaaaatagatacaatcagaagagaacttctgcaagctaccaccacaatatccaca

SEQ ID NO: 536011 - DNA, 217 bp, Homo sapiens
catacagtagtatactagtgcaggaacacataaaaactggtgcaaatctgatttttagattaaattattacatagcagcttatcttctggtcacattttaagcccaatcagtttatactcctgaaactctttttaaaagtcctgtattatgtagcacatatgccagtgatgttcttaaaccaaattataaatttgctgtaccttggcacacgggctt

SEQ ID NO: 536012 - DNA, 295 bp, Homo sapiens
tgctgggattacaggtgtgagctaccacacctggcttgggtgatttcattgttgtgcgaacatcatagggtgtatgtacacaaagctagatggtaaagtctactagacacttaggctctatggtatagctgattgcttctaggctacaaacctgtatagcatgttactatactgaatactataggcgattgtgatacatggtacgtagtggtgtttctaagatgccctaaatgtagggcattctaatcttatgggacacttacgcagtcattgttgacaaaaatcatttgtagcc

SEQ ID NO: 536013 - DNA, 117 bp, Homo sapiens
acaaacaatactgtcaacgatctttgtaccaccttcacctaccattctcagatacagattctggtgtgtaaaccaaccaggaacacagacggctactaccaacctgccttcttgatg

SEQ ID NO: 536014 - DNA, 604 bp, Homo sapiens
cttcctgtactatttgtaatccagacctcatgttatcctaagccaggaataatagggccaccagttggaactgttaccccaccgtcagtctagcatttgatccgagtgttcggatatctgcatcccagcatgatatcagtcatacggtctttgctttgtccacaaacagcaggtttttgctatgaagtatgcgatcgggcaatactttgttgcttacaggttcaatctgtgcacgcctattaacaccttccgtcataggtttcatcaaaattcgccaccgtgcaacatatgttaccataaggatgtagtgttagcggtcacgtgttacagtctcctcgtgtccacattctgtttgaaacaatcaagaggcttctttctatattttccaaaggtgctatagaagccttcggtcgcatatagtaaggcatcctgttccatgcatgaggtgtgtcactctgttctcacgaatcatgatctggacacctgtcgtcactcaggtgcgcatcttagtaacacgcgccggtgtaattagccgagataaacggctctatatggagagaggaggtcacccacttctatgcgttgacgccgtgtttggactacg

SEQ ID NO: 536015 - DNA, 531 bp, Homo sapiens
ctggctcctgcacttacaggactcctcctattcagctacgtaatgaaatatcagcatccttcaaagatttggggaggctgggcatgggggctcatgcctgtaatcctagtattttgggaggctaaggcaggcggatcacctgaactcatgagttcgagaccagcctgggcaacatagtaaaaccctatctctactaaaaatacaaaaagttagccagacatggtggtgcgtgcctgtagtcacagctgctcgggaggctgaagcagaagaatcgcttcaacctgggaggccagaggttgcagtgagctgagatcacacaactgtgctccagcctgggtaacagagcaagattctgtctcaaataaaaaaaaaaagaaaaaatggaaatcgaagaacctcaagaaaggctcattctgggtcagtatggtagttatatgctcaggctttgagagtgcaacaggtgtggctttgaatcacgcttctgccatgactttgggcaagtggttaaatctcattgaaccggatagcttg

SEQ ID NO: 536016 - DNA, 370 bp, Homo sapiens
  misc_feature (295)..(295): n is a, c, g, or t
tacgctaggctttttcttttctttctcttttaaaacacatctagacaaggaaaaaacaagcctcggatctgattttacactcctcgttcttgtgcttggttcttactgtgtttgtgtattcttaaacggcgacgaacgacgacggggaacaaaaccagctggatccatccatcaccgtgggtggcttttaactttttcggttttttctcgttatttttttttaaacaaccactcttcacaatgaacaaactgtatatcggaaacctcagcgagaacgccgccccctcggacctanaaagtatcttcaaggacgccaagatcccggtgtcgggacccttcctggtgaagactggctacgcgtacgtggact

SEQ ID NO: 536017 - DNA, 399 bp, Homo sapiens
aatgctcaaattacatcgtttattaaataaatgtaaaacacattctgagaagcaggaggcttgtgctggggtgggtcaacacacggtagagggggcaagttgggtggaatgatctatcacaccaactgaactgtgggtcatgcagtgtgcatccatcctgtcaaattgaaacctcctgcatcctgagtgcctcatgtctcatgtatttagggtaccgtgaatatttagagcctccttggtctttctgtccctttggaactctgcacacacgaatacgttgtactatctacagatgactaatttagttatctgagtgtaacactgctttggagtggattgaaatcctgccttctacagcggaatgggatattcccaaacaatctgcaagtctggtgttta

SEQ ID NO: 536018 - DNA, 387 bp, Homo sapiens
ccaggttggtattgagtggcatgtgactgctgtgatatcagcccagctgtcgttatcagtgctatattatctggaatatagaggctccttttactgttttaaaggtgctttgtgctagggttgaagatacaattcctcagctcttggtagacttttgggaagctcagctagtggcatgtctcccagatgtggtacttcaggaactctttttcaaactcacatcacagtacatctggagattgtctaagaggcagcctcctgacaccacaccattgcgaacatcggaggatcttattctcctggtcattccttggtagatatttggaataaaataatcacactgactgtgattgggtagatcacactccatattctcctgtgagtctc

SEQ ID NO: 536019 - DNA, 307 bp, Homo sapiens
atttctttgccaactctgagaaagtcatataagggagcaaaagtaacatgcttgaaatcacagtgaccaaaggacttgaagtcataattaccttaaataaccatcacctttcatttaacctattcacattccactcagtggaaattatcctctcctccggatttttcacttacacctcttaaccttgaagacctaccattagcgaaaaccacgtgcagacctcctagatgtgtggttttttcctttaatgccgagcacaaagtgtacatcataaaattcaaatttggtggttggccctaatctaata

SEQ ID NO: 536020 - DNA, 868 bp, Homo sapiens
  misc_feature (4)..(4): n is a, c, g, or t
  misc_feature (106)..(106): n is a, c, g, or t
  misc_feature (125)..(125): n is a, c, g, or t
  misc_feature (129)..(129): n is a, c, g, or t
  misc_feature (132)..(133): n is a, c, g, or t
  misc_feature (189)..(189): n is a, c, g, or t
  misc_feature (221)..(221): n is a, c, g, or t
  misc_feature (241)..(241): n is a, c, g, or t
  misc_feature (271)..(272): n is a, c, g, or t
  misc_feature (294)..(294): n is a, c, g, or t
  misc_feature (304)..(304): n is a, c, g, or t
  misc_feature (510)..(510): n is a, c, g, or t
  misc_feature (649)..(649): n is a, c, g, or t
  misc_feature (755)..(755): n is a, c, g, or t
  misc_feature (766)..(766): n is a, c, g, or t
  misc_feature (810)..(810): n is a, c, g, or t
acantctgtgtgtattgtaacgtggcggggcccaagggcgtgttttggacatttggctaggacaaagatgtgtctggtacatatggccaattaagaggcacttttntgaggaaaaacatactttntgcnagnnagatctctagtgtacccgatccaccaaatgccttcgctctgactctgtatgtggcntctgctgctactttgctcgatgcgttaaatgntgtctctgatctcctggacncacgaagctgccactggggaggggctgggnncctacattgctggtgtcactgntactaatggngtgtgtaggagtcttccccaccttacgcgtctttcttacacttcttcaataagactttctataaaggcagagcaataccagagcagagcgcaagccctgcaagacaccagccagacgcaggggcccgaggagctgaggagctgaggcgccggggttggggagagtaggacaacattcggccaaggcagccacatcctgttcctggncagccacagtggcaatgtgccaggaggacgcggggatggctcgcacaccgcgctgccaagtcaaacacggggcactccaggcataatgagggactaatcttcccgactggtgtaagtaaaacctcctggtgaaggtcanagtcttcaaaagcagaccgaggcagaggcatcgctgagtcagcagtgagagatgggagcgtggaaactggtctcttcatggaggaagtgacctgtttatgagcaanaacaaggccangagaaggcccactccccgcaagctgtgagttgactcataggggncatgggactgtcccaggtgatgtgagcgatctggagcaataccggtgtactctgcttt

SEQ ID NO: 536021 - DNA, 264 bp, Homo sapiens
  misc_feature (85)..(85): n is a, c, g, or t
  misc_feature (188)..(188): n is a, c, g, or t
ggctcggctgggttgttcgaaggacggtttgagcacgccatccttgagttcggtgccatggtgcaaacgatgagaatcactaaanacagtcaacatgaaagacatccacccgtgaaagacaggtgattattttgttctggctacggtgggctttctttgcttttatgtgcgccgatgctagcgtagtngggcatttttaccccaatgggccgccatggagaaagccaaccaaggccatcaacgtgcctacggcgatgatgaatg

SEQ ID NO: 536022 - DNA, 495 bp, Homo sapiens
  misc_feature (426)..(426): n is a, c, g, or t
agggttttattatgttggccacagtgaaatggttcttttatcggcatttgagccgcccgcctttgactcccaatgtgctgtgacaacgggcctgagctactgtaactggatcaaaccccttcacatagatttctctactacggtgtgtaccatgaaaagattggtgttcctcacggacctaacataaaacgcggcggctaaaaatttaaactaccaccaccttttatttgcagctctagacatgaacatgagattgcgaaaacatatgtggctttatgaaggtaaaaatgtttaatacaagtgacctgtcaaggtaaaagtgaatactgatgaataacttataatagcactctgcatcacatggtgtatgggatccaacattatatactactgtgtggggtcagaatccatgactgaatctcttcnacaaaattggacgggaaggcaaagcgtgattgtgatacctccaatatagggttcaaatactgatggatt

SEQ ID NO: 536023 - DNA, 397 bp, Homo sapiens
ccatgcatattcccaaatcagatacccagaatcgtcgcggttccactggattgtgtcgggggctcctacatctatgatcctggccttgctgtacttggcttatcctggagcaaactagaactactacagtctactttgcttgcagatcagttgctgaagcttatgagtacttgtagaatcccaagtagaatcatgtagctgctggtctcgtggcaccgaagtctgaaatcggatacctctagtacagaaatagaggaagctatgaaaagagtacgagaagcacagtccctaatgtcagctgctatagaaccagataagataagaagaaaaaagaaggcattcaagatcaagatcacgttctaggaggaggaggagtccctcatcttctagacacagg

SEQ ID NO: 536024 - DNA, 103 bp, Homo sapiens
gctcgcagcctgaccacgccaccccaagtacaaagacggagctgtgcagcaccttccacaccatcggcatatatgccccatacggagccccgactgacacttc

SEQ ID NO: 536025 - DNA, 1922 bp, Homo sapiens
  misc_feature (470)..(470): n is a, c, g, or t
  misc_feature (516)..(516): n is a, c, g, or t
  misc_feature (1167)..(1167): n is a, c, g, or t
  misc_feature (1808)..(1808): n is a, c, g, or t
accagaaaccagaggagggtggggcacagaaccagtgagacggacccctcgtcctcccccagcggaggtagggggacccggggggctcctccccgctctgcgggcctgggggagcgacctggggctggggagccagaactccacgctttgctcttgtaaaactcgtcaggtggtaacctggtatccgcgctggagcacttctcagttctctcgtgtgtaaactagatggtagtttttttatggccagtgttgtgtctcgtcttgtatttagagggtcgaaaaacgcaccagcgaaaaaacgcactctgccaatgatcaagatgggacgttctcgagagagggaggcacactaaaagctctctgggcgtgtgtagtctcgcattagtatcatgagatactcgagaacacgcacgcggctgcactaaatctcttattcgcgcacggtgggtgaagaacatcgcgagtggccnttaggagcggtgaggaataaacgttctagacgggtgtacagacganaaaccaggcgggcgacctggcgctaacgagcgcgcaaaggagagggctgtgtgcacccatagaggggtcgtgagagcagtgtggtaaatgcactcccgagggtgctggggaagatatacgcgctcctcacacgatgtgggtgccgaccccacacgcgccagacacagcagaacaacagagtgtgggggggccactagtcggcggcgctgcgccacaacatcagagacaacatagagcgggacgagtggcggcgctctactcgagcagcgacgctccacaatgaagagacgcgtcgttgtgaataatagatctgctcgcgacgcacgcgctctcttgtgtgagagtcgctcaccgagtgggccgctaacaaaaagtgcgaagagagtgccaccaacaggagaagacatatctccctataaataaacacgcggaagacttccgtaggagaagagcgctaataaaagagcggcgtcaacttgtgccgacgaggaaaggacacctccagcagccaccccaccaggggctgcagacacaaacattggaggagggggcagctacgtaattaaaacaaaggaggggcgaaggagacacccccacacaaaagaatctatacacacaagcagagcaagcgacaaccaactaagatataangccagcccaacgtaggaggaggggcggccacccactctgctgctgcgtcggagaaaaagacaccccacatagtgagtcgacaagtgagctacacaacccccaggaggaatatgcagcacgagcaacacaccccagatggaagaaagaacaccaagggacgttaggaggttctgccaacaaatcattttcgtcacgcccgagagaaaacaaggcggggggccaccaacaagagctaacaacagtgttgtgtggcacccaccaccaacttatgtgggaggaacgccccggttgttacacacccacaagagggaggcaaacatcatcggggaggcgagcacaatgtgggggaagcaccacaaaacaccacaacaagtaatgcgagggggggcgacctcaacacccagcgggggggccatctcccaccagcacaaggatgagaagaacagttgggtggctctccctcgtaagagcaagaaagcagcaggactcggtgcggtgaattagtagtcacacaaaccaggtgaagtatgtccataggaaggacaacaacgaccgcgtggggtgatgttacaccaccaccccacgaggtggtggagagactaaacactagcagggggtggtagagagagagccaacgagcngtgacagagaacagcaagacacagcatacgaacgtcgggagcaacgaacacacgtggcgacggggaattcataccatagacgggagtcagcacagtccggcgttcatcagcacg

SEQ ID NO: 536026 - DNA, 394 bp, Homo sapiens
accaacgagtggataaagaaaatgtgatacacacacacacacacacacacacacacacacacacacacacacaccatggaatacatactcagccataaaaggaatgagataatggcattcacagtaacctggtatggggttggagaccattattctaagtgaagtaactcaggaatggaaaaccaaacattgtatgttatcatttataatgtgggaaccaagctacaaggtatggagaggcatcaagagggcagagggtgaaggaaaaaagactacactattgggtacagtgtacccaagtacactgcttagtgtaatgggtacaccaaatatcttggaactcaccactaaattacttttccatgcagtaaaccccatctgtttctctaactct

SEQ ID NO: 536027 - DNA, 512 bp, Homo sapiens
aagccagttgtgagtcagtacaataatttggtccctcaacagtctatgcagtgattcataaatagttgtcagttcacatagcaatttattcacgtagtcatgaattagataccccctatatataaatatatgttatcaatttcttcagatagcttgtttacatgataatcaattaggcaaccatgagtcatttagaaatagtgataactagaatacacagaatagtgatgaatttcaatttataacaaatcacgtaaagctccaaacctatttaatacaaatgatcccatcaacgggatgccaagtctggcgagtgtaggacctctgagtggttgtataaattgtttatttcatatgaaattcatttaaacagttgacaaactgtcattcatcaattagctccaggaaataacagttattgcatcataaaacagtcccttcaaacacacaattgttctgctgaagagttgtcatcaacaatccaatgctcacctattcagttgctctgtggt

SEQ ID NO: 536028 - DNA, 339 bp, Homo sapiens
ggatcgacatccctgtgtcggttcacctcaggaagatacaacaaggagaaacacttttagatgtgccgttgtttacaaggcttgagtgtttcttggatgtcacataatgagagcctttttttgaaacattccccagtgttgttaattgtgagggctgttctaggtcacatactctagtgtgagcccagtctactttcactgagtagtcccacaaagcagagcaggagattgacagcagtatttgtgtgttaattacgagccggctagcagcgtatggtgcgctcggtgtgaatgtgtttttttttttttcaattgtttggcagtgcattgtgggtgact

SEQ ID NO: 536029 - DNA, 171 bp, Homo sapiens
agacctgtggcccaagacgtggccctcgtgcagggtgctgtgccccagccaagaggcagtggggcaccttctgcctgcatcctggtgggcagcacccagttctttcattgcagtcaacttgttcacaggggaaaccctgtggaaccacagcagcagcttcagcgggaatgc

SEQ ID NO: 536030 - DNA, 162 bp, Homo sapiens
  misc_feature (109)..(109): n is a, c, g, or t
  misc_feature (162)..(162): n is a, c, g, or t
ctgggggtgtgggggccttaattctttccattaatttttgggggggccggggataggggaagggcattgaagttctacaattctggaatagttagtgatggacatagtnacttggcttcggtcatatggacttaccactgagaattatgcgtgcttggttgn

SEQ ID NO: 536031 - DNA, 576 bp, Homo sapiens
  misc_feature (466)..(466): n is a, c, g, or t
  misc_feature (508)..(508): n is a, c, g, or t
gacagtgaccgccaccgttgccgggggatgggtccctgagacttggcgaagtaggagccctgtgtgttcgtgcgtcagagtcggggctgagaccagccctggccagggcagttaccaggacggtctccggaggccgggattcgcggagggtccaccagcaggaagaaaccccaggaggaagaaacctcagacagatcgccggggaggcagcgcgggatcccaacctcaggcgtgcgcggacggtgtgcggagtctagctttgtaccaggctgcagtgcagtagtgccatctcagctcactgcaacctctgcctcccgggttcaagcgatggtccctgcctcagcctcccgagtagctgggattacagccacatgccaccaacccagctaatgttcgtattttcagtagatacggggtttcatcatgttgcccaggatggtcttaatttcctgacctcgtgatccgnccatctcggctcccaaaatgctgggattacaggcatgagccnacagaaccggacatgctttccttaaaagctaaatatttaggcttgtgtgccattaggctctgttacaa

SEQ ID NO: 536032 - DNA, 832 bp, Homo sapiens
cccctacggtccaaattaaacatacactccctctctatttgtccatttccaatgtgcgactctctttctgacttaaactcttcccctcttcgcggaccaaccgtcttgtactcatccctctgcatcgctcacgcttacgtctaaactcgcttattttaaatccccgcaccttcctctctgatactacgacaatagatcttctgcttcgaagaagaagttcataatctgctcctctcactcccactactatagatcagcttcactgcttggtaaaacggcgcgattcttctgttctcctacagaggcccttctctcctcgaaaagataatcgcgcgcagcgcttattgctgcccccctcccgctttctatgtgacctcttccttgtgcgtggagacttgcctcctgtccagtttccgtgtgttgtatttcacccacggcttcttctgctcttggggctcactcaaagtctctcgtgcttcttcctgcaaagtctctccgcacggagtctctctctcactgactttttgggttcctcgccgccccgcattacattcgctctcgtcaactttctatgtgttgcccccccggccaccccagagggggtatatctctcccctccacccttctcacacataaccctctctctcgcacctcagtgccaacccccctcttctttgtattaccccagtttctacccacatccttctctcccttagctcctctacgccacgccgcgcgactcatctttataccgccggctgtgttctctctctctctttattaaagcaacaaaataaaatagaaaaaaaataacaacaccccacataacaaa

SEQ ID NO: 536033 - DNA, 426 bp, Homo sapiens
ccggcgtcgaccacaaaacccagagcccccttctgcttgaaaagggcagcatctttttcatttgtgtttactgtaaagggacacaacctgtccatctttcttgaaaatggcatcttaggactagttcacttgctgggcaagcactccactaagagccacatcagagacattctctgcaatttgatactgtcactttgaaaacttatttctgacctagttttctcagtgttctctttaaattcacctgtacaccttccagtcgcattgacagaagtggaggttccagaaattgcaacaattacagtcttcacccaagaaattgaaactaaggcaacattgaaacacatttgtgagctctcattccccagtgtgctcttgagcatgaacagcaacttgggtggcttctgcaggggatcctgtcgacgc

SEQ ID NO: 536034 - DNA, 411 bp, Homo sapiens
  misc_feature (18)..(18): n is a, c, g, or t
  misc_feature (388)..(388): n is a, c, g, or t
ccccattaccccttctangttccacctttccattccacccctcacctccccccccaccccttccctatttctttcttcccatcacattcttttctttctttattttctttctccatccttcctttttttccataaccttttacatttcctttccattttccttattcattataattatatttacattttttttctttttatttctccaccctttttcttatttaataacttccctcttattttttcctacaattttttcaacttcatatcctccatccaacatacttcccttccctaaactcacacatcacacactcccttcctttttttttaattactactcctcacctttctttcctcctttccttcccctcactccatcctcctngacgctttggttccctgtctaat

SEQ ID NO: 536035 - DNA, 1065 bp, Homo sapiens
  misc_feature (1065)..(1065): n is a, c, g, or t
gaagatggcgggggcatactaagacctcggagtcatgtagtagtgtactaatgagcggtggcgcaggaccgtaaggctaggagcgcgcggtgacgagtgtgagcccggatcctcggtctccatctcttgtggtcgcatcatcgtccgacgttattccacatcgctattgttgccgagatcgtggatcgtgtgtcccggttgggcgcctgtgtcgacggggtgggcccgagtcatatcgttccgggccattcactggaccaacagcttgtcgtagctcgtcattggagcggaactcggataccgacagcggctcatcgtgctgagagctcctgaacgcggagaaccatgcatttacgagcgatgggttacgagccgaagtggggcaaagtttgtgcccgaagggaaggtggcttgctccagaggataactatccaaagggaacaaaaaaacaatgggatcgaagtaaatacaggtggcggggtcaaacagtccaacaagagttgatacatggggctttccctgtgaacaacctgtgggttcccaacgaagttccggatggccaaggggccgttgcccctgggtatccacatggcccagggacagtcagacggaaccggaactgacgggtgcatgcatttccaaggcaaggccccagattggttgtaccccttgccagttggggcccagatgaagtcacggcattccccttttggactaacacgttcacaatgacacggacacatgtctggaaccccaacgaatgtgtgggatcacaaacaccgcttgggaaaagcaaagttgggaacacgcaccggtttcaaacacgtaggattcccgggaccgacaggggaacaacggtggtggtttgaacaccaagagggcactgtggtatttgaacacggttggacagaccgcagtgtcaagagcatttgttactatttccacaaaggggtcaggcgaaccacggccaacgtgaaaggtgtgcgcacatcttgtgctgccactcacccaaaggaggcacaccctaatgtggtcacaccatgcacagaggacctatgtagagcn

SEQ ID NO: 536036 - DNA, 232 bp, Homo sapiens
ggtagatcctcaagatagaatgctcctgattcagcggtggaatggttttccgatttgaataaaatggttgcattatctgcaaggatcataaaggctaggtacttttatctcaaagacagtatggatttgtgggctgctatattcttagtgctgtgggcatggttggtgtccagtaaatatgtgataagtgaatctgactttgggcacatctccaatttctcatcctagggag

SEQ ID NO: 536037 - DNA, 162 bp, Homo sapiens
  misc_feature (35)..(35): n is a, c, g, or t
  misc_feature (61)..(61): n is a, c, g, or t
aaaatggaaacttgcaaatacctgtttttaattanttttaaattatatatatttaaaattncccaggtgcagtggcttacacctgtaatcccagcactttgggaggctgaggtgggcagatcacatgaggtcaggagtttgagaccagcctggccaacatgg

SEQ ID NO: 536038 - DNA, 1204 bp, Homo sapiens
cgcttttctctttttttcttgtagatcgcgcttttgcttctttttgtttttctttttctgtctttctcttctcttttttgatttattccggtgtttgttgttcggcttgtgttgtgctttccttctgttgttgatttctttcttcttcttctttgtttttctggttctgttgtgttccgtgtattcctgtttgctttgttgttttttttttttctgttcctgtccctcttgttttggctttcattctcgtgtctgtatagtgtgggtgctgtttgtctcgtatggtctgttgtttttgcttcatttgttttttgtctggtcctttttgtgttcttgttttttttccttgttttgtcatcctctgttttgttttcacttttagtgtgttgtattctttgtttctatggtctgtttggtgttttttctttctttttttcttggcatattttgtgttcgtttgttattgttttttttttgttgtttgttctgtccgtttcatttcgtttttgttctttattttgtttctgtgtgttttaagtatactgtgcaagtttatagtatctggttatattataatttccaatgctggacaatgtagtattttaatgttttctttttcttttacatatgtcggtaccatgttatagtattactcgtgttctaggatgtaatgtccactgtttgtatgttgaatgtcatctaatgcttattattggtttttatggaatccagtgtgattatggttttatcctatcctgtatagccagatgtatcaggtgtggtatcgtgcaacatttcatgcacattttggattttgtttgtcattcaaaattgtgcttgtaaaaatgtatacaatttctgagttttataatttctaggtacttgttttttcttgctggtaaatagcttttttttaaaaaaaaatctaatataaaagaaaccatgtttatattttgttagtgatcaatgactttgtttatatggaaatttgtatattgttggcacacattttgttgaggtttacgtgcatgaaggcctgcaataattagcacaatgaaaactgctttttcttacatgttcatttttttgaaagattgtggtgcaaaggcttactctaataagtaaccttctggactatggaatgaatataaatgaatggcactttgagtgttaataaagctaatatttatttccactgtgaaaa

SEQ ID NO: 536039 - DNA, 677 bp, Homo sapiens
ggctgcttgtcagtaggaatttggggtgggggtaaggcgcacacaaagaggggatggagtttcgtgtggttgagtcctacgcatgagggagtgaccacctagctttattatggtgccaatgtagtaagaggggagatgggtggattgaatctatacagcaattaccacaaatgcgttaggctgttatcatatacctcatgatttatggatacactttgaaatgacaaataagatggagaactgattcggttgccaggtaggaaggcagagagggtgggagatggctgtagttaccatgtgtggcatccttgtgatgggacgtctgtatcaccaatgtgtgatttcacaaaaatctatacctgtggcaaaatttatagaactaaatatacacaataatgcatgtgaatgtgaaatctgaataaggtgattgataatcatgtcagtctggtgatatgactatagtctgaattgttaccatggagaaaactgggtgaggggtcatagaatcttctcattatttcttccagctgcatgtcagtttaagaattgtctccaggctgggtgtggtggcatatgccctgtaatctccagcattttgggaggccaagtgggtggatcacttgagctcaggagttgagaccaactgggcaacatgtgaaaacccatcttctacaaag

SEQ ID NO: 536040 - DNA, 1171 bp, Homo sapiens
  misc_feature (232)..(232): n is a, c, g, or t
  misc_feature (596)..(596): n is a, c, g, or t
  misc_feature (979)..(979): n is a, c, g, or t
tttttttttttcccgggaagcaagtcttttttatggacggaataaacacaacattgtgagtggtagataggaataaagttggggtggcaagtgtctcctgtgttcacgtgcaatttagtgacaattcaaattcagaacctacataacgtggggcgtgcttttgtgatttcttttacaacttgtgacacttgtggatatatctctgtggtcacagaggggcgcttcttataanatgtagaaacacgagaatttcactgtgtgccaccacacccctatactctccacctatatttatcacggtgttccggtggaagaatatacaccacaaattttttataaacagggggtggataaggcgctataagagagacacaacaaaacaagagatattataactataccaaatatagaggctatagtggaggggcgtcccaatctcaaagagaagagtggtcttataacctatttactctcaatttttctctttctctgtgtggagacaatatctctataaatataaaaggggggtgtgttctaccacaatgagagggagtataacatattagcctctcagacggggggtctctccccccaanccgagcgtgtgtcccatcttccacaccctgtgtgtctaacaaatggcgcccttatagagccttcctacagagcctctcctttaagagaggggccatatctacacccgagagtggtgtgtattttctccaaaaagaagaaaacccctttaacaatcttcctctacaagagaatactatgtgtgttgtacccaccggaagtcaatatttctttttttatataatatctcccatgaggtggtatttccgctgtgagtccccctcgtgggcggcgcaccagaggaaatatatttctcggtggacaccgcgtgggggggtggcctatctacgagggggctcttgtgggtaaccccacaaatttaaggccagttgcaaaattaaggctnagcgtggaccatagtggcagaaacaaactctttttccgcccctccgtggtccaagataattcttctccaaccaaaaagaaaactttttttgtgtctctatctcacacacataaacttaattctccttatggggagcgggtgctgtcagaaaattcaaagacaataaaattcacattcccctataaattttgg

SEQ ID NO: 536041 - DNA, 371 bp, Homo sapiens
  misc_feature (23)..(23): n is a, c, g, or t
  misc_feature (28)..(28): n is a, c, g, or t
cacccaagaaagcgtttttgtgnagttnaatgtttccaaaacattttagttctcccacatttttatttcatgctttatgatgtcagctcccctcaactcaaagctcaagagaaggaggtttgttaaaaattgcaatcaaggtctagatataagagatttcagaagctaaaggataagcatttgttcatacaggaggggttattaatggttgcctagtaaataattacctcaatgaaattagtggacatgaaagatacatttaatgtaatcgaaataacagtttcttcattcgaaatggggataatctcttctgttcaaattgcttctagattcagagaacagacaggttaagtccttcttatcatatgttt

SEQ ID NO: 536042 - DNA, 135 bp, Homo sapiens
gtgtcacgccatacttctgcctcacgtctctagtagctgggcccgccactacgcctggctaatttattatatttttagtagagacggggtttcaccgtgatagccaggatggtctcgcattctcagacgggtcgc

SEQ ID NO: 536043 - DNA, 529 bp, Homo sapiens
gagaatggaaatagaatagaaaattgctattttctaatagaaatttagaaagcagaagtaaaacttgagcgttctatccatgcccataagaaatatggtttccaatggggtttaatttttgttatcccatgcccagggtttttcaaccaaaaagagaatttggccccttgtcttccttttgtaataagctacaattttagcagcagaggcaagagattggaagagatacagacaatttttttaaaggcttatacccaatgaaacacagtcttttaaaagcaagttgcatgaaaacaaaacattcaaatcctgtttcttcctgcaaataattttaaactaaccagctaactgctaacataccactgacctttgccttggactcgcaggttttaggaataatctaaagatagacatttttttttagtgatgaatatgattaaattacaaacgcccgttttccccttaaagaccaataaataatgtttcaattttaagcaataaaaggtcgaaaaaaactcaaaatcaacaa

SEQ ID NO: 536044 - DNA, 663 bp, Homo sapiens
cagcgctatcaccgggaaagctgttataaacagaaagctcctaatctgcgctttcaccttacattatgttacagaatggagaaagccaaaaaggggagagcatgtggctaaaccacagaaagacagatgcctaagaggaaaaattttaaagtgttcctaaataggtattagaaggggaagggggatgtaaagcttatgtgatttacatcattttgttaatctgctaatctacttccctggaaggtgagaaagagtgttgtctgccttctgcaattgaagagactagggcagaaacttaattatgttcttaccctgtgtatacctggctgtcatctggctggcaactagtccacaaactattggttcaggcatttgcctggcaataatgttagccatcatttaaattgttaaatatggatcagaagatctctaagaattactgatatgcagctattaatactggatgtaaataatattatttggggtgtgggtaaatcatttgactggaaccacatttaaaaaaaggacttggaaattttatttttgaaatgctgttggggagatggcattgatgaaaaaaaaaattgaaaatgcgaaaaaacatcatctacaaagagatgggtacaaatgactaagcaaagaagcttgttaccttcgacctga

SEQ ID NO: 536045 - DNA, 128 bp, Homo sapiens
gccccccaagccaggaaaggagttgaggaagggttgggtggaccaggaggcctgcagcttttagattgatgcccctgcccccgcccatccgctccccccaatgaaataaagtttttttttctttccca

SEQ ID NO: 536046 - DNA, 366 bp, Homo sapiens
  misc_feature (154)..(154): n is a, c, g, or t
  misc_feature (208)..(208): n is a, c, g, or t
  misc_feature (273)..(273): n is a, c, g, or t
  misc_feature (350)..(350): n is a, c, g, or t
aagatctggttgtttaaaagtgtgtggcacctccccactctctcttgctcctgctccaaggctctctctcccgactctctctcttgctcttgttccagccatgtaagacgtgcctactttcccttcgtcttttgccatgattgtttcctgaggnctccccagaagcagaagcactatgcttcttgtatagcctgcagaaccatgaggnaattaaacctcttttctttataaattacccagtctcagttatttctatatagcagtgtgagaagnaatggggtttcagattgcatctgaatggggacataataatttaaataataaatttaatttataattaataataacangtaattaatataatta

SEQ ID NO: 536047 - DNA, 696 bp, Homo sapiens
gaattcggcacgaggtacattgggtgcctaattgtagacagtgctctgaaggagatttccatggtattatggaggtgtgtgacagagggaccagtttgatccaaggggtagtcaaggaaggtttcctggaggtggggacacttgagtcgaagcctgaagaacatttggcagttaactgggcagaagagaggggatgggatagagatagaacattccaggctgaaggaagtctcctgtgcaaagctcctgagataggaagatgtttgaggcacttgaagatagctgatgtggctgtagttgggggtgcaggggagagagggattgtggaaaggagagaagtccacacagtgccgttaataccatactggattctcatcatggtctggagggcaggacccatgggtcagtaagccctgcagcttctacagatttctactatgaacccattaccctctatgatggtccttttcccggtcatccccattcttaaacccttggagtaactgatttcattgtcgtgttacatgatctttaaccattgctttattcgcttccaactaacttagtattattctgtattcccttcttcattttaccagttgttgcatgccattctttttgtatattattcttccttctttatctcctttttatattttctcatatcctcctttatttctcttctttctttcttcc

SEQ ID NO: 536048 - DNA, 943 bp, Homo sapiens
  misc_feature (12)..(12): n is a, c, g, or t
  misc_feature (37)..(37): n is a, c, g, or t
  misc_feature (374)..(374): n is a, c, g, or t
  misc_feature (448)..(449): n is a, c, g, or t
  misc_feature (451)..(451): n is a, c, g, or t
tgtactctccantcagatggcagatatgacctgaccnaagcaagtacagagcttgctctgcatgttctgccccagggttgtagcctaaagactgaatgctgccattgtcccacaagaccaagtgtgccatacacttggttgatgactggtgccccactgggtttcaggttggctttaatttccagccctccaatagtagttccccaggcaaagtgctgagcaataccacaaccatcacaggggcctgggcctttatcacaagcctgccaagcaagcacttacaaaccagaatgagagtgagggcatggagaaggggatgttttatgagggcttcaatggcctggctgctttgtaaatattttttggttttggtngagacaggtctcactgtgttgcccaggccggtctcaaactcctgacctcccagagtgttgggattataggcgtnncnaccatgcccagcctgtaaatgtttataaagaaatgctgtaataaaacatattgagaaagcaaatgtggcagggagataataagaaggacacaggatgataagggaaagtggtagctgggtcaagggaagggcctgaacatcaatcagctgtagtgacttctcaaaaaaaaaaaaaaaaatcacatgactttagggcttcttggactctaatttgcatgcagacttctgtggatcatgttgaattgtagattctgactctgtaggtctgaggtagaacctgagatctctatttctaactagctcctagttatgcctgtgttcctactgccaatcagcagactaccctttaagtaatgagctctagagcaaccctgtctgttagaacattctgtaatgatggaaatgttctagaccacactctctgatacagtagcgattactacatgtgggttgtgagatctgaatttggctagtgtgactgaatttgaatgt

SEQ ID NO: 536049 - DNA, 231 bp, Homo sapiens
gcagcacgcatggtctatggaccggtgaccaccatgcgggacgtgcgcaggcagaatgcccgttcaagtatgcccctgggactgaggccgccctgcaccttcagcggatttagcggcttaggctctttatggtaactggcagactttccaagcggaagaggccacgcggcggtagaaggagcagtctatctttggtgaccatcggaataaggaggacgagacccacatcgc

SEQ ID NO: 536050 - DNA, 537 bp, Homo sapiens
  misc_feature (88)..(88): n is a, c, g, or t
tgggtcgagttagctaatccatcaaacatgttccacatccattcccctcaccactgtgcagtgtgtatccgtttgtgcgaaaggaaanactactctcttcctggcctgtcagcaccagttttgccgcagctgctgagagcagcactgctcagttctcgtccagtacggcgtgagcgtgggagtctcttgcatggctcaggactgtccactccgtacaccagaggactttgtgtttccattgcttcccaatgaagaattgagagagaaatacaggcgctacctcttcagggactatgtggagagtcattaccagctccagctgtgccctggtgcagactggcccatggttattcgggtacaggagcctagagctcgccgagtacagtgcaatcggtgcaacgaggtcttctgtttcaagtgtcgtcagatgtatcacgcacccacagactgtgccacaatccggaaatggctcacgaagtggtgcagacgaactctgaaacagccaactacatttgtgctcacactaaagactgtccc

SEQ ID NO: 536051 - DNA, 318 bp, Homo sapiens
cctacctggcgcggcggcccaagctgcagctgagcgtgtacaacaacgaccgaggtcccacctgggtgcttgagacaacaatcgaccctggcttgaattttggaaggctttgaattgtggggtccaattttaaagggcaaggtaattgtttctgtacccaaggaaacggggaacaattgggacggtgaattgctaacatctttcctcctaacggttggggtcctccgtgaccggcggaaggaaggttaacctggtaagttcctttaccccctaattgtcccaagcagaagaagtaatcctgttacccgggggtttata

SEQ ID NO: 536052 - DNA, 364 bp, Homo sapiens
tgggtgatggagtacaatttttagaaattacatattgggtcagttttgttttgtttttggtgaggaaaaggtggaaataggaaaccatgaatgggaaggatggcaataagtgcaactatactttccaatgactaaagaaagaaaatcttcagtatattcgttctcatgaggacacggtcagaacactgaacatggtattgtatgcactgcaaacgttacactgacacggtcagaaccatggctgggtggatcgcacgctaaagctctgccacctaaaaatcacaaagcacgaggttaacacggaaacctgggggggagtgtggaaaagggaaaactcgtttttgcctgaataaaggtcgaattt

SEQ ID NO: 536053 - DNA, 405 bp, Homo sapiens
ggcacagctatgaccggtgcagccggatgtgggactcgtatctcgtctacctgagagcatgttagggtggaggaggaccgtctatgtagaacagaagttgagcagtcgggagtaccttcaataaaggagaccgcactgttccatcgcggtctagtatttaagaagtggaacttgacagtcctccttctaccaactccacctccaccccctcattccccttactcccaaagtactactgctgtagcatgacaaccccaaatatgttctgtcaacacaaacctgcctttggtgtataaacagggcattacagaatggtacaccctatatatttctgtacagtatccattcactagttcttcatttataaatatcatcttccccattctagctgctgaatgcgtccgt

SEQ ID NO: 536054 - DNA, 116 bp, Homo sapiens
ccagtcacgctaccagcaagccagctggccactactcccgcatccttcaaacgactgatccccaaccccaaccccaccgcaaactgatcagcccacacttcccaccacaacacgga

SEQ ID NO: 536055 - DNA, 633 bp, Homo sapiens
gcccctggccagactttttgtggtaaaacgtgccctggtgttgacgcaccattgtatgaaccacgggccgagaaccctgcaccaaggaagttttagtcatggggcgaccctttgcgggtggaaactacctcttgattcgtgttgatgctatagcatgttggaataactgttggcgggtcattgttattccaggcgctatctttataaccgggtcaaaaggatcagtggttcgcccacatatgtgggcggaaaagacctcttcatgataggagaacagccatcttcttgtattagaatagtagcgcgggacacaccttgtcctcttgttggcaacaacacaggggaagtccatatatcgggggtaatgcacaacgcgctgtttctgctcacggagggattccactcttgggggggtagcaggcaccccataccacgtcacggccgagaggcctatgtatgtttctccacgccaccaggcaggtgcatccccctgttgtgctaccccgcacagtgaagacgcatactggtatgtgcatgtttgggagcgctgctgggatgtcttaccaccggacactgttttcacgaagggcgtcgtttttcccatgcatttaataaaaaaccccccacaaaaca

SEQ ID NO: 536056 - DNA, 387 bp, Homo sapiens
tttcagaaaagtccccatatgattctgatgtacatccctgattaggaaatgcagtattttatttttattttttgagatggagtctcgctctgtcgcccaggctggagtacagtggtgcagtctcggctctctgcaaccacctcctcccgggctcaagcaattctcctgtctcagcctccggggtagctgggattacaggcgcatgccaccacgctgggctaatttttgtatttttagtagagacggggtttcacaatgttggccaggatggtttcgatctcctgacctcgtgatccacccgcctcagcctcccaaagtgctgggattacaggcgtgagctaccgcacccagccagggatgattttatgtgttaaaacagcaaagttg

SEQ ID NO: 536057 - DNA, 339 bp, Homo sapiens
gagctcggccctctatagggcacatcaatagcgcaagtgcgttgattgtgtagtatggaatggaaagtgatctgatcgtgaaatggtaagtcgcatacctagttgggttgttcgctcccgttgcgtgcataaatagtaggtggcttgctgctatggctgcattaatgacaggctaaattaagtgataggtaatcaatcgagtgagggtgtgactgtctactgagtaccctcctcacattcattgaactctgtctcgtccctatgtattggatggtggttagtaagttttgtactgtctgtgcgtccctctgatttgatgttctggcttatcgaggtcct

SEQ ID NO: 536058 - DNA, 208 bp, Homo sapiens
atagccttccagcccctgttccctccaagtgcacatttagccttaaaatcctgggagtcgggagaccccgtggagtccttacatccccagggtttgctggttgtggtcaaaaggcagtaaagcaaaagtccttttgtgaaaagtgtttttatgtaaagatgtttatatttaagtagtttttttataaataaaagcctttttaatggca

SEQ ID NO: 536059 - DNA, 376 bp, Homo sapiens
cgacgcgtttgcccatgaaagccgttctgggcatcttgtcactcttgcactatgcagagatctgaccatttaaacttatgcaataccgaggaaaggcttccaaaggtaaatggggattcaggaaatgtccagtgcaaaccataacagcatcaaagacagctctatttagcttgccctctgtctctgtgacaacataccactgaccagtttcggagaagtctggacgcttcgttatgctgcacacagtggtcttaaactgaatgtatttcaggaggtcaaggtgctcagcaaattcttggagatagtcccgacatttttcatggttcatgatattaggataatcttcgtggaacgggaagtcactgtaacatgacat

SEQ ID NO: 536060 - DNA, 122 bp, Homo sapiens
ttatacttactccagtcatcgcttccccttgctgatatatcggtaattgcgctggcagtccattcgccatcgttatttttttctctaattgatctcagttcatcattagagataaacttaaa

SEQ ID NO: 536061 - DNA, 215 bp, Homo sapiens
tactaaaatgatatattctctatcaagagcagagaaaaggttcacctagaaaaagagagctagcagtggatgctctattcccaaccccccttctctccccttgggtcacaaagttgtactatacattgtcctatatgctacgtaggagatgccttttaaatacagtctagctcagatcactgtaagattttctgctggtgtatagcaacttaggt

SEQ ID NO: 536062 - DNA, 201 bp, Homo sapiens
ttgggcactgctcaggctattctccaaacagaagaaatttaaggtttatgaagccaggctcactgaggaggaaactgtctggtgctggcggatagccagggagctgaaatgcaccagggtctggtaatgcttctggcgcagtcgtgtgaactgagactgtattttccgcttgtccatcatctccaaacatctctgagccat

SEQ ID NO: 536063 - DNA, 241 bp, Homo sapiens
gctccttctccagctctttctccttttccgcaagtctctctctgtcttatgccctctccttctctcgctcaggttcttgatctgtttcaagttctttctcacgctcccgttctttttctcgctcccttacccaaatttcctcggaaaatggtagtatttccaggatgacaagcttctcatccaatcgtttcagtttctccgcacaacctgccttcctttgttcatccattcttcgctcttc

SEQ ID NO: 536064 - DNA, 263 bp, Homo sapiens
ctgtagccaagacattcctttgtagtgataaccaattctcgacgagaagcagaaaatctatccaaaacctggaagtgccgcctttctggaccaaaccaatgtatgccttatgtgtatttgattcatgtctcatgtctccctaaaatatgtaaaaccaagctgctccccgcccaccttggacacatattcttagggtctcccaagggctgtgtcacgggccatggtcaactcatatttggctcagaataaatctcttcgaataa

SEQ ID NO: 536065 - DNA, 121 bp, Homo sapiens
cgactctactcgaccgcgtttggtggtcttggtgacttggtggtcacctttcggcgccggacgcctacttacgcttttacgacttctgctacaacacggttacgggggactcctctacgac

SEQ ID NO: 536066 - DNA, 378 bp, Homo sapiens
ggccttagttgtctggtttctgcttattttctcctaaagaaaacatacactggtataggccagatgcggtggctcacacctgtaatcccagcactttgggaggccaaggcgagtggatcacctgaggtcaggagtttgagaccagcctgcccaatgaggcgaaactgcatctctactaaaaatacaaaaattggcctggtgtggtggtgcgtgcctgtggtcccagctactcgggaggctgaggcaggagaatcgcttgaacctgggaggcagtggttgcagtgagctgagatcatgccattgtactccagctcaggtggcagagtgagattcagtctcaaaaaggaaaaaatatatatatgtgtgtgtgtgtgtgtg

SEQ ID NO: 536067 - DNA, 1010 bp, Homo sapiens
  misc_feature (199)..(199): n is a, c, g, or t
ttgtcgctacgatagtccgtggtgtgttaagtgttgtcctggtgttcttcgtctgtgtcgcgtggggccttcttctgtagtggttgctctcctctagagcgcggcgctcttgtcgcgtcccccggtcccgccccggctctctggttcccgcccggactgcttttctctcccgccggggccggccccacatatttcccanagcgccgctcaacaccacagtcgttgaagtggggaagaagaatacctcctccgtggtgggggaagcctgtgagccgcgtcccgtcttccggaaattattccgcagcccgtcggctcttttttaaaaagtcgccaagtgggtatttggtctgtgctctccccgccgcgccggttgttttctcgacgcccggaccctgtcgttgcgtgttttctcggggtccggccgccccaatattaatcgggggacgcctccccctctggccggtgcgttattatatttggcacattaatggggcgccccgcccctggttgatactacaggtgggtcaccgctggccacgcccgttcggctcaagaggcgccccctcttgtgctcgccgccccggcgtatttgggggcgcccttctcctagactctctcccgagtatgtctctctctcgcgcgcggtgtggtatccgcccgccgatattcttttcccggtagaggggcgcccgtgggactctctcttgggatatgtcggaaggaggcccccagacggctttactccgctgattgtgcccaacctctcacgtgtttgggatgctgttgtgccacgaagggcaaccgctgagcgctctgagagacacatgttcctttccccccacacggggtgcccagcacgcagtgttcctcccgctcgcccctctgacagcggagaacttttttgttgagtggggcccccctattttttttctactgctttttcacggcgccccctttaaaaaagggttaatccaaaaaaaagggacacggaaaaaaatcaaacaaaaaca

SEQ ID NO: 536068 - DNA, 467 bp, Homo sapiens
cgcgtatgacgagcttgcatgaactatggttactaactagactctactagaaggaacgcaacttgcattatttctctgcagccagcatcattgaaggaagcccgtggtgtaatatggctgctagaagaacacagagacaagttcccagcattgcatagtgcgttagatgaattctttgatataatgtgacagccgcgtgtactgtgttaaggaaacaagatagtggtgaagcaccgtttagttcaaccaaggtgaaaaacaaaagcacgtaaaaagaagccccaggattcaaagcctatgttagttgggtctggaacaacttcagtaacttcaaataatgagatcatcacttcaagtgaagacacatagcaatcgaaattcagattctggaggcccatttggagtgcctgaccatcttcggcaagatgtagaagaatacgaagctcgtcatatcggggtaccgagct

SEQ ID NO: 536069 - DNA, 96 bp, Homo sapiens
gtggacacagccacatattactgtgcacacatcggcctgtttgggtcaccagctggccccccctactactactacatggacgtctggggcaaaggg

SEQ ID NO: 536070 - DNA, 145 bp, Homo sapiens
aaaaagttgaggtatgctgaaaccagtgacatgattccacaacgatggaacataggcaaattatcctcattgataattgcactgtcctgtaaagcaatgagcagacgaatgagatcaataactacttcttcgagtagaaatagaa

SEQ ID NO: 536071 - DNA, 262 bp, Homo sapiens
cagcgccagtgaatagactcatctgtgtggacgtgtccagctctcgtcagaatcgatagagaagtgtaattacctgagggagtattggccagaagtttgcctccttactgctgggatcttgtggatgtgtctcggatcccaattgcgtactcctagtccttactttttacctggcgggaatgtaaaaagctgagctgattaaattttatctttttcttggagctatttcatccttgtaaaaccagtccctgacagtacctat

SEQ ID NO: 536072 - DNA, 391 bp, Homo sapiens
cctctgcatataagatttactcttaataggccggacgtggtgctcacgcctgtgatcccagtactttgggaggctgagacgggcggatcacttggggtcgggagttcgggaccagcctggccgatatggtgaggccccgtttctgctgaaaatacaggaaaaattacccaggcactcactcttgaggtaactaaccaactcccacgataatgacagtccattcatgagcgcaaaggcctcatgacctaatggcacgcgcctgtggtcccagctgcttgggaggctggggcgagaggattgcttggacctgggaggcagaggttgcggtgggccgagtaccgccactgcgctccagtctgggcagcggagtgagacttcatctcaaaaaaag

SEQ ID NO: 536073 - DNA, 160 bp, Homo sapiens
  misc_feature (34)..(34): n is a, c, g, or t
  misc_feature (137)..(137): n is a, c, g, or t
gtgaacggcaaggagtacaagtgcaaggtcttcnacaaaggccttccgttcttcatatgagaaaaccatttttaaagcgcaaaggggcagccccccagagcccacaaagtgttacacacctctccccccatttcccngggggggggggagagcccagaga

SEQ ID NO: 536074 - DNA, 176 bp, Homo sapiens
gaatctagaggatcccgaaaccctaaattacggatcatagggggatagctatacccaggttattgatagttgtgtggtgggtgtgaatgagtgtggtagtaggcctaggatgtttgttgagccgatgaatataattagagatataagtattagtgatcaggttgggcctttttggt

SEQ ID NO: 536075 - DNA, 564 bp, Homo sapiens
cccccccccagaatgcacgatatttttcgtgagaaagccctctacacgggggagagagccctgcacccctctcgaggtgtgaaaccctctcggattcgcattaggaaaatgtaaaggccacagatccccggataaggaaggaattcctccctgatcccccacgagactcgtattctttgctggccagcacactggaagatggacgctactcttgtctgactgaccatattccaaaggagtttacttcttcattctctgtgttgagacttcgtggtggtgtcttagaaaaggatagtaagatagttcttaccccccttccccagatagttattaagccccagagaaagaaggttatagctggctgtcctgaaatattataaggtggatgagaaatggccaaattagtcgccttcgtcgagagtgcccttttgatgaatgtggtgctggggtgtttttggcaagatcactttgaccagacattattgtggccaatgttctccgacttactgtttcccaccaacccgaagaccagttaactgttatgagtttattaaagacatgaac

SEQ ID NO: 536076 - DNA, 318 bp, Homo sapiens
gaaactgtagatggtagctaatctctctctctacctatttttctaatgtcatgattcctgttctgcccaattggattcaatttgtattgttcaaccacttttattgtaaccaacctttatctggcaacataatttgcagcacaataatgatttgcattgataccttgagattggggagggggcatgcaagtgggatcactttgtcttagcaattaatgggatattgattactaaagtgtaaaggctgccattatgacattaggtatccaacataaccatctggagtgtgtccagcttgttcttcataggaccaatcgt

SEQ ID NO: 536077 - DNA, 932 bp, Homo sapiens
gggttgtagctggctgggtggctctggggtcgcggtcggcgctggcgctgcgtgtggtcggccgaggtggtggcggcgtgcgagcccatcaccgtgggcctaggccatcggggccgcgttcggccatcaccggtacctgtcctacacatgacatctactgccgcttcgccgagtgctgccgcgaggagcggccgctcaagcgcttcggctctcgagagctggatttggaggagaagtctgtattggacagcgatctaggccgacggcaagtgatctttcaaggcgctcgtaactggcttcaggaacaaacaagaaatcccaatgaaaccactgacccttttccttacacggctgggctggcgacaggcaagaatttttgtcagtcaaattgtggctgtaaaatcttcacccataaggtctgaagagtaactttgtgcacctgtttgtatcgactctgcgacttccctcatgagcagaggcataatagactgtaccaggatcagtgtacagaaggtggatccgcggtaatgtgagtgcatgtgcgacagctctgtttcatatttgcacgagatggataatattgtgccccgggatcattgagcgccatcaagccgtttctagattactaccgagcaggttgacggagtgtcttaccgtcaatgccatcttcattctttactcagcaatgcctgcggagcgcttatctctcagacggctcttgacctttcggcgggtccggacacaaaggagggacgacatttcagctggaagacctggaacctgtactgctgatcggcgctttcctataacccagtggctgttgcccagtgctggtccacaaaccatgtttcttatcccttcgtgttgagtacgacttcactttttaggccaagaggcgtgttgcagaatgcttgacatggtcaggctcccaa

SEQ ID NO: 536078 - DNA, 285 bp, Homo sapiens
aatcattccacttcaccctcccaagtagctgagaccacaggcacacaacaccacaaccagttgattgttgtactgtttgtatagactggatctcaatatgttgcccagactggtcttgaattcctgagctcaagcagtcctcccacctcagcctcccaaagtactgggattacaggcgtgaggtacctcgaccagccccagttacagatttctttgttccttctctctcccgctgcttaacttgattagcctttaaaaaagaaataaataaaaatttttaaattt

SEQ ID NO: 536079 - DNA, 300 bp, Homo sapiens
gcaccttcggttaacttgcatctccagattgattactcaagcaaacaacaacatatccatgaacaatggaacaactatcaaaaggtataacttacatatactgggaatatcaaaatgaaaagaaagagacagagaaacagaataaatatttgaagcaaccgtgactgagacttcctctaaattgatgcccgacaccgaagggaagatccaggaaattcaggtaataccaagcaggataaatgccaaacaaacaaacaaacaaaaacaaacaagcccactttagcataccattcaaagtta

SEQ ID NO: 536080 - DNA, 392 bp, Homo sapiens
aagggttcctgaaatggcatttgaaaccatggggggtccagactggaaaaggagggggttttactggaggaatgggccccaggaccagggggttaacatggaacccaggattgaatgggagaagatgttgaaaggtattggggagcacccagtttattttgcaggggatgaattacccacagtccgaaggaaccttgattcccgaggggtagaagtggatccaggttggattaaggttactgggcatcaggtttatggaggacattttttaaaaccagttttaaaccattgtaacctttgtcgggatgtggcctggttttggcgtatccagggcatgctggttataaccgcaaatactttagggcaccaacttacaattactgaagttaggc

SEQ ID NO: 536081 - DNA, 492 bp, Homo sapiens
ggtggacagtgacatctgtctttaaaccctgtgtggcaatccctgacgcaccgccgtgatgcccagtgaagacagtgcgacctggaagtccaactacttccttaagatcatccaactattggatgattatccgaaatgtttcattgtgtgtgagcatgacaatgtgggctccaatgcatgagtgcagcagatcctgcatgtcctctttcgctgggaatgtgctgtgtgtgctgatgtggcaatgaacaccatgatgctgcaagtgccatccgaggtgcacctggaaaacaacccagctctggagaaacttgctgcccctcatattccgggggggcaacttttgggcttttggtgttcaccaagggaaggacctcattgagaatcagggacatgttgctggccaataagtgtgccagctgctgccgtgctggtgccattgccccatgtgaagtcactgtgccagcccagaacactggtctcgggcccgagaag

SEQ ID NO: 536082 - DNA, 1088 bp, Homo sapiens
  misc_feature (304)..(304): n is a, c, g, or t
ggccagctcgctgttcgctatggcgttggtcaccgtgaaggccttaccttctgggcaaggaggacgcggtgcgcgatgattctgcctgcttcacgcttctgtctgcagtgcccgatgccttgatggtcgggacagcgcgtaggtgcgtgctggtcggggttcccgtggagcccgtgaccgtagtcgtgcctgcttgagccctgggtgggtctgacgttgctaccccgcggcatgtggccgtgagtcgtggttccatggcagcacttaccggctgaatgaggacggcggactatgggttgccgtntgtccagatgaccgacggtaatttgcacaatggccaatgatctctacgtgcaaggggatgacatcattccgacattcgtacgatcttgagacggaggcaagagacacagaggttgcccaggcctgcggaccaacctgttcacaacgcggatagttgactccagcgaagggcagcctcgcggagaacttgttgagttgcgtacctcaccacatggttgaatcattagcgaataggtccttgcaacattgagagcgcttgtgtgctagggaaactcccgatgtactagaagtatgacagaccgggtcgttgcccctaagtacttcaccggacgtttggttcgttaggcggttcttagcggtcagtgcggcacaagcgggcctttgcgaaccttggtggtgagcgagcgaacccatagagggcataccgggcaattttccccccgcaaagggcccacgcgttttctggggggcgacctcttgatactttgcaaggtgcggtctttacgttctgcccaacctatgtccctgctcttaggagccattccgccggtggaacaggggattgaatattagcaatccgggagtaacacagctgtttacccttgggcgtttggatgcgcaccaaacgcagcaccttgtggcgaacaacaacgttggggggttccctagggccacacggtggaaaagaacccatagggtggaatggacccgcaagcagggttttccctttcgccttaccggtttggccaaagcgtggctgaatgggtgcacccctcaggcaccgg

SEQ ID NO: 536083 - DNA, 167 bp, Homo sapiens
tactggtgcagcggggaatgctggcatattgtaatgggtatggagacatatcatattagtaatgctggggtgaggtacgaagttttttcactagcgatgtgtatgagttggtcgtagcggaatcggcggtatgctgttcgaattcataagaacagggaggttataag

SEQ ID NO: 536084 - DNA, 145 bp, Homo sapiens
gcgacagggtgctgaggggagtgatggcagggaggatgcatggggcctgtgggaacagagagaagctggggtcagaggtaggagctgacgctgtcgggctagataggggggataacacgttcgcgagctgtcgggctagtcgggg

SEQ ID NO: 536085 - DNA, 186 bp, Homo sapiens
cccccgctgaccatggcagtgttttaatgacgaggtggaaatcgaggacgttcaataataacgaggactcgagaacgaatttctatccttgccaatgtggagaataacttcttcataaccagggaagattttgagaattgggaaagacggtgcaacgtgtccatagctgctctctaattataaagg

SEQ ID NO: 536086 - DNA, 118 bp, Homo sapiens
ggcacggcagacagaacctgtatcacctgttacgaccagcagcactgcgttcttgcagaagacctgtgcaccgggtgcattctaggctgcagcacttatccccttctgtcgtcttctc

SEQ ID NO: 536087 - DNA, 210 bp, Homo sapiens
catcatcccgcccaacaagaacgttagcaaagtggagatccgaccgtacgttatcgactacatcccggacctgcagatcgctctggagacgcacccggccctgtgaggcagccactaccgccgcgccgccacaccacccggccgggacctgtccagcgcgccgtccggcaccccgctcactgcgctcaacaccgacccggccggcgcggt

SEQ ID NO: 536088 - DNA, 480 bp, Homo sapiens
  misc_feature (17)..(17): n is a, c, g, or t
  misc_feature (55)..(55): n is a, c, g, or t
  misc_feature (59)..(59): n is a, c, g, or t
  misc_feature (232)..(232): n is a, c, g, or t
  misc_feature (427)..(427): n is a, c, g, or t
gtctgaccagtttcttnttcacccggcacgtatgggaaccgcgggcgctgaagcngtangttcgcgcgacggatttttgacggcggtatcggatcgatagcaaggacggcagggcagggcaggccgcgcaggaaaggtcagcacaaccatgagttcagataccatgcctgccatcgcgtttcccggtggtatcggcacgctgccgcttgccgatctggcaaagcgcaggttncttcgatgtcctgcaggcgatgctgcgcggggagtatcccgctccgcccatggccaaaaccctgtccttcgccctgcatgaggtcgagccgaaccgggttgtcttcaagggcgtcccggcgcaggagcatcttcaatccatcagagttcgccacccagccgccattgaattgccgcccggggcagggagcatttnaattccgttggggggcatttcattggcggttgggtgggatttttatggaattt

SEQ ID NO: 536089 - DNA, 155 bp, Homo sapiens
ttctggactgagcttctgactcctctgactctagttgaacaggcccagctcagctccggcaggaggtcacccctccacttcagcttgccctgacctccgctcgcaaaccccgagcttccaagccttttgctccagccctgtctggctagtcgggg

SEQ ID NO: 536090 - DNA, 361 bp, Homo sapiens
tccctttgccatattcccctaacaatgtctatcaattatcagtctgggtgggaaagcccccaacatccaatccacttcttccgtgcattcagggtcccttggttccagcttactctttcacgaacagcacaaacgagcattcaatatctcccctgggaagcgactcaggcaccagcaggcacaggcaatcctctcaatcggtcccatactcactcccaatacaacctcagggtacatccagcacgcagtacagcgccctaggttgcacctactcacatcgcccagcccagcacacatcacttggcaaagcatacattgggtccaccgtgcgtagcgcatcgtccccacactatcatcctca

SEQ ID NO: 536091 - DNA, 585 bp, Homo sapiens
  misc_feature (39)..(39): n is a, c, g, or t
  misc_feature (73)..(73): n is a, c, g, or t
  misc_feature (98)..(98): n is a, c, g, or t
  misc_feature (107)..(107): n is a, c, g, or t
  misc_feature (111)..(111): n is a, c, g, or t
  misc_feature (120)..(120): n is a, c, g, or t
  misc_feature (126)..(126): n is a, c, g, or t
  misc_feature (177)..(177): n is a, c, g, or t
  misc_feature (206)..(206): n is a, c, g, or t
  misc_feature (240)..(240): n is a, c, g, or t
  misc_feature (273)..(273): n is a, c, g, or t
  misc_feature (320)..(320): n is a, c, g, or t
  misc_feature (328)..(328): n is a, c, g, or t
  misc_feature (347)..(347): n is a, c, g, or t
  misc_feature (367)..(367): n is a, c, g, or t
  misc_feature (386)..(386): n is a, c, g, or t
  misc_feature (407)..(407): n is a, c, g, or t
  misc_feature (452)..(452): n is a, c, g, or t
  misc_feature (463)..(464): n is a, c, g, or t
  misc_feature (579)..(579): n is a, c, g, or t
cgctgtgccgcccagggcaccaaactgctccacacagtncccgtagtcccacacgcagatcacgttgcccganaacagggggctgaagggctgcagcncctgcagtnacanccggttganggcgancccctcggtctcggccaagaacacagccttcccggaggcctcgtgggcctngcggaatggcatccctttgcggaccaggnaataggcaagggcagttgccagcatgtcggggcngagagcctgtcccaagtcctcttggtgaatctncagcgtagagatgacgccagttgccacctggagcacggcacttatantgtcttanacttcaaacacagcctccntgtccccctgaaagtatatntagaaggatcagggaaganccttaagggtaaacaggagcncggcacaccgcccaaacacacgcccacgccatgcaccgtgaacancaccaaaccgnnaggggtttttcttctggggcatcaggctgcttcccgtgctgtaggcatcttagatctgcacgaagctgaattccttggtgcagtagaggatgaggtcctcggccatcctgccganatgggt

SEQ ID NO: 536092 - DNA, 760 bp, Homo sapiens
ggcccgaagtaagagagatagtcgaccacgctgctcgatacaagctggagagacgtgctgtgactcaccctagtaccattgatcaagtgatatggaatatcggggactctgtgtgacaaccccagtcaggcagcccacagccagggtccaggtggcagactcagctcctgtgcctcagttggctgtcagtagaatgggttggggagccagcctccagcggtctcacatagcaggcaggcagtgtcgcctggagcccagccaggggacgcatgtgaatcctttctgctttttaaaggacagacttttgctttaccacagacagtcgctcttgggtgacacacggaaagccaccactgagtttactataaagtgacagaggctggtgtctctaccgagaatgcgcgaatagtcacttcctgcctttgtccattatacgccgacaacgcgaccaggcttccgctctacattctttcagtggtgttgttgaaagcggcttggacgctccccatagtgtttgcacggtgtccttaggtcctatgagtgtgactgccttcttcttcttcttactttctttacggtatctacaaattcatctttgctaagctattctagcactaagtatttggcacaacaatctactgggacatgttgggagctccttttcctaaagaatctcacctttaccctacacgggggatccaggcacacgaacaacgcttccaacccgtacacgtctgacggatctaagctcaccaattat

SEQ ID NO: 536093 - DNA, 431 bp, Homo sapiens
  misc_feature (4)..(4): n is a, c, g, or t
  misc_feature (151)..(151): n is a, c, g, or t
  misc_feature (246)..(246): n is a, c, g, or t
  misc_feature (263)..(263): n is a, c, g, or t
  misc_feature (284)..(284): n is a, c, g, or t
  misc_feature (372)..(372): n is a, c, g, or t
  misc_feature (404)..(404): n is a, c, g, or t
  misc_feature (431)..(431): n is a, c, g, or t
ggtngcatttgtcgccggtgaagtgggtgccttgcgcgtgggttcgcttgcccatgacggcggcgcagtccgtgtcgggggctttgtcgatgttgaccagtggcagcagggcggccagcggggtgacgatggtggccagggcaggcggcgngcatttcagggccagcggcctttttgcgggcccacgtccggattcttgaacgtgcctttcgcgtacagggcgtgcgcagggtgatgatgcgggcncccttggtacgggggcnacgtcgaggtccagggtttcncttgccaggttgacgttgcccgtgacattcacgacggccgtgtccgtgttcgagcacgaagccggcgcacgtcggcctggccgtttcngtcacggaaaaatcgctggccaggcagttcanatggacttgcttgtcgccgaaaatttn

SEQ ID NO: 536094 - DNA, 347 bp, Homo sapiens
  misc_feature (8)..(9): n is a, c, g, or t
tctccacnnatggaacccttccttgggggttttgtgaaacttgtgaattgtgtgttaaaaaaatggcgctccacagttggaaagactaggggtgggtacatattggagacccccaaagagctgcagagtataaaggggagggaattcgtgcaggagcagagtcttctccggggttggctccccgtttctcacttttcccttttcattcccaccccctagactttgattttacggatatcttgcttctgttccccatggagctccgaattcttgcgtgtgtgtagatgaggggcgggggacgggcgccaggcattgttcagacctggtcggggcccactggaagcatc

SEQ ID NO: 536095 - DNA, 429 bp, Homo sapiens
tgggctccagttagttaggggagctggggcctcactttctcccagaattgtgggcttcactggaagtgaaggggcaggaatgactggactgtccaccccagccctgcctgcctgtggttttggccagggagcaagccatgaggtgccctggcacatgcacaaattgatcctttgcgtggcagttttgtatggaaaacagatgctgacagaattgtaggctaccatgcccccccaaaaggctaaatatctactccaatgggtttccagttcagtttgaagtcaatcaaatttttggattttcggtgtctcccgccccccttcgcccgtcattgtgttaattggacctttgcgatgggggggtttttttccttttgggcattttggaactgaagattcccctttcctttaataaaatattcaaaatcagga

SEQ ID NO: 536096 - DNA, 191 bp, Homo sapiens
aggcataggctatccaggacattccaagccaacatccccgctacatgctaacgaatcgaggcaaagtcaaaacaaaggaagatgtcactttggcacacgacacacccgatgcaggcagtcatgggggatgactgtttttaccccagaaatgcaaacaagtggcctactgtgccccatatagagactcccac

SEQ ID NO: 536097 - DNA, 677 bp, Homo sapiens
  misc_feature (651)..(651): n is a, c, g, or t
  misc_feature (675)..(675): n is a, c, g, or t
aaatgaagagatgtccgcagggttccagggacgtggagatgatggggctgttcgccccagagcaagatacagtctgatgggggctgggctttctagtgctgcgcggcagctccttgagtcttgggagtgtcagttacctaaagcaatgcaggccgtttgcctgattgcaatggaaagccaaacaaggaagcacaagggttttttagagggaaaggtttattttagtcgactaggaagtagatgggagaaatgttcaaatttgtctctcagatctgggggttggggcaggttttatagacagaggataatgaggtgcgatctgactgcatcgtgccatgaggtgatgtcagggctggatctgatcagatcacagattaagccctgaggtgtctccttcttaaatcagccctgctccttggtccaagtacttaggttccaccgtggttgcatgccaagtgtatctaggcatactcaggtaacataacttgaaaccaggtgtccatggcaacttgtaaacaacgcattattttattacacaaactttgaccacattgggcttgttcttgcagttcgtccctttttttggtttttcatttctcaatcttgagggagaatgggcgacaggcactctagcactttccgcttgatggngcacagacctttggtagagggatntt

SEQ ID NO: 536098 - DNA, 199 bp, Homo sapiens
ccggaccatcccgggacattgacacagcagccaagttattggtgctggggcagccacagttggtgtggctggttcagagcgctggcattggaaccgtgttggcagcttgatcattggctatgccaggaacccgtctctcaagcagcaactcttctcctatgccattcttggctttgccccgtctggccacctggagtgg

SEQ ID NO: 536099 - DNA, 576 bp, Homo sapiens
cctgctacgatgtatcccatcttacagcctctcgattactatgcagttaccaagcgggctaccaccttactaagactctggccatattctcattctagtcaaaaaagtaagtcatcggtttagtgggagagggcagctaaagcccaagttggtattggagaaagatgtacaacaggtcctttaaaaaaataaattacataaaatttgctggacacagaactcctatccagaccactagtcaatggagaagaccagaagccacaaaatacaatcctcagggagaaccagcctattcgctgtgtgcactcgtgcaacgggtaagccttccctgggggtctcaactctcagaactctggcttgttggacgtaactggtaattccttgcaatttcaccagaatatcctcctagatgggtaagcgagcagacattggacccctggagtgacactatctcaagggttgctcaactattggcatgtggcagccgattccaggccacgactccaggccactgttgccatcacccctcgcctggcttgcttgaaccaggccagcttaaaacaatgatgaacctcc

SEQ ID NO: 536100 - DNA, 1895 bp, Homo sapiens
atccatggaaatatgttctcttctctctcctttctatttgagcgggggtggggggacacacccagatacatacacactctttacatccaagaagtagacgaaaagcaccagaacttctgagtcacgggaaacagaaaactcagacctttcacatatacagtgaacatacgaccgtcactgatggggcaccgggcattgacatccaaaaaacctagaaacttcttcaacatggtcactcacacaggtatcctttggccaaggcactaggtagctcacgccgtgtaaatctacacgccccttttgggcaggccgaagatggggcaggactcaaccttgaaggcccacgcacgttccgagaccaagcctggggctcaaaccatggtgtggaaagacccgtggtctctaccttaacaaccacaccaccccgacaaacaacagacaccacaacaaccacactgtgcgcaccgcgcgcagcgccccacaagaaacaagctcttcaacaaccacaaaccgtgtgagggcgccggcacccagacaaagcagcgatgaccatcgggtcacacacacaggtctccttaagaaggacaaccccgtgcacaaacaacaaacagtgctggagactatacaccaccaaaaaaaaaaaaagccgccggcggcacacgcgcgcttcttgaacaaacccacgacatagagtcccgaaggacatcaaggggactaaccacaagaggccacggcgagccgacataataccccccgacgctaggtagacagacaaccaccagccacaacgacgacgacaaaaggaagacacgacgacgagacagacaagacgcagacagcagggacgagcggcagcagagaggcgcaagcaagcgagaagaagagaagcgggaggaaaaaggaagcaaaaggagacaaagggcggcaaagcgaggcaagacgacagcagagaaagagacaagacaagacgagaaagaagcgaggaccacgcacaggaaaggcagcgcaccgcgacacaagcacgagccgagacggagcgagcgcgagggagagggaggcacagggaccacaagagaagcgaaaaggggaaccgccggaggctgaaacaagcgaggacggcacgaacacagcacgcggcgaagagacgccggcaggagccaggagcgagagtgcgagaggagcagaccagcgacagaagacagcgacgagcaagctgagccagagcagcaacagcaacgaagcagacacaatataggcaggagacggcgagcaacgggagagacgcaacgaccacagccggcgacacgaccagcacgaccataggagccccgacgccacaagacgccagaccgccacagcaagcgaccaagcccacggccccacgcaaagggagaagacacgcgaaagtaaacgaagcaagagaacagcaacgcgacgagaggagccgaacagagaagagcaaaggcaacaagtcacaaacgtgacaaagaacagagacggaacaaaagaagcaaggcacaagaccatagacacagcacacagcagcagagaaggagagaaagagaagaagcgaagaagcaacgacgagaaggaaggacgagcgcacatgtagaagacaggcgaagcggagacgagagagcagacagggagcgcaggacagaaagacagatacaacacgcgagacgagcggcacagagcaaacaaagacgagcaccaacgcaacacacccgcaacgaccaccaccgaccaaacacaagacccaacaccgagcaaacagaacagacacgaccgcacaagagacaacaggacaacgacgacacaagcacacaaaagcaacgaaaagagacacaagcgaagcgccacgaaccaaaggcccagaagccagcaaaccaagg

SEQ ID NO: 536101 - DNA, 453 bp, Homo sapiens
  misc_feature (403)..(403): n is a, c, g, or t
  misc_feature (434)..(434): n is a, c, g, or t
  misc_feature (448)..(448): n is a, c, g, or t
tttcctgggggagactgtgtcagaacagatgatagtgttactgttggtgattatctcaataaagttttcttatatgttatatcattaccagcaattaaaacctcaaaatattgtctcatttctctgttaatatttctctcctctaagaaaatgctacagcaagtttagatcctcttggcctccagcaaaacaagagaattaaaacctgcatgcaacataatggcaatgtgaaatggagttgaacatactgtttgcagtgacacgagagtctacaaaatacctatgttgtaggttgttcttttcattctaccactgatagttacacactgctgtgcgggacatgccagtgtgaagaggctgaggaagagttggaattaaccaaagagctcgtgccgaattcgcngggttcaaaacattttatcctactaaagtantgggaggaaagaantcgtt

SEQ ID NO: 536102 - DNA, 245 bp, Homo sapiens
ccagaacacttacaacatgaagcatttccttatccttcttcatattttctgctcttacttctgatacgagcatagcttctcatttgcgtcctctcaaatcttgagttcatcgtattgattatctgttcttgcattatgagttgtggtagtgagtttctgatttctctcactgtaagatgattttatttgtcggactatatccttcaacattatcttgcagcatttcattaggtcgtcacacggac

SEQ ID NO: 536103 - DNA, 207 bp, Homo sapiens
cgttcctcacgctacgccctcaccgctacgccctcaccgctacgccctcaccgctacgccctcaccggtacgccctcaccggtacgccctcaacggtaggacctcagaggtagtacctcagcggtagtacctctcaggtagtacctctccggtagtaacattatggtgataactaagaggcctcagctctcaggtatggtaacggga

SEQ ID NO: 536104 - DNA, 280 bp, Homo sapiens
  misc_feature (11)..(11): n is a, c, g, or t
gaaagagaggncttcagtgacatgggggttgagcccgctgccaaacaaaagcaaaaaaaacggaaagctcagccccaggccacccgtgggggcagcaaaaaatataaggagttcaagttttaggtccccccccccaagccctttttttggccctacgtttggaagcgtggggttcacccaaaaaccccctctcccgcagttcccaaggacttgtcatttcatgtttttattttagacctgttttgtaaaaaaagctgtttcccaaggaaaaagatgaata

SEQ ID NO: 536105 - DNA, 174 bp, Homo sapiens
ccgggaagggcggctgcgggcagacgggcgctgcgctctggccaggccgcaccatgcggccctgctctgcgcgctgaccggactggccctgctccgcgccgggctctttggccgctgccgaacccttcagccctccgcgagagactcagctcagagcacagcgtcgtgacagac

SEQ ID NO: 536106 - DNA, 258 bp, Homo sapiens
cttaaggagattatgattcagtgcgtgattgtgatgttatggttgaggagactggagtgcatttgaggtagcccggtatgaggaggagagaggattgtggtggagactggatatgcgaccaggctggggctcggaggtgttatgacaactatggaggaggaaattatggaagtgaaaattacaatgattttggaaattatgaccagaagaacttctaactacgagtcaatgaagagtgaacactttggtggtagcagg

SEQ ID NO: 536107 - DNA, 359 bp, Homo sapiens
cctgcagaacctggtgagcaacgccgtgtgagacgccgcgcgccagacggtgctgggcaaggccaacggcctggtgaaccagttcaacaacaccgacaaattccgtgcgcgacatggacagcggcgtcaatcagcagatcagcgatacggcgcagcagatcaacagctacagccaacagattgccaagctgaacgacgagatcacccgtttgcgcggcagcgccggcagggagccgaatgcgttggtggatcagcgcgatcagcgggtaacggagctgaatcagctggtgggcgtacaggtcacgcagcaggacggagacgcctataccgtctccttcgccaacggtttgaccctggta

SEQ ID NO: 536108 - DNA, 242 bp, Homo sapiens
agaccagtggtaatgttcattcgagggcggatcctctccggtgtggtgactatgatgaagatgccgaggaccattgttatccgtcgagattatctgcattacatccgttagtacaatccgcttcgagaagcgccacaagtaacatgtctgtacagcctttccgccttgctgcatgggacgtccacgactcgtgtgacaatcgtctagcagatgtggcgagttgccgcgtgctctgtacgcaa

SEQ ID NO: 536109 - DNA, 181 bp, Homo sapiens
gctattttctccttgaagatagaccgtgcccggtcgtgaccggcatctatgtccatcgtatgttcctcccaggccagtgggtagtagcttgctgccacctatgatgtgagttcatgaagctctatgtgaatggtgcccaggtggccacctctggtgaacaagtgggtggcatattcagccc

SEQ ID NO: 536110 - DNA, 452 bp, Homo sapiens
agatagagtcctttggggtttctctcttatgtggttgggattctagaaggtgtaaggattaaaggagatgggatcttaggcagggagggactggtcctatgcgtgagttggcttgggatgtgtacccaaggagtagatgaaccctggggagtcctctttgctgaggggtgactgtgggaaggcagagcgcagtgctaaccttgcgtgtggatgtcctgggtccctctccctggcccaggaggggaagctgcagcaaaatcccctcacagggcttcgtgggtgaagttggggactaagggtgagggatgcacgctgagccaagtcagagtgtcatctgggctagctgggttctggtgggctcagggaccctgagcctctgggacgggcacgtcagcaggtcacatgctggaaacttgcacaggtgaggcaacaggggctgtaagaagttgtcc

SEQ ID NO: 536111 - DNA, 135 bp, Homo sapiens
ttgttgggtcgcctatgagtgtctggtgagaatagtgttaatgtcattaatggagagaagtgaagagaatgtaatgcctgagtggctgtcttctgcattgttgtagtaagtggtggaatggtgatatttatctgg

SEQ ID NO: 536112 - DNA, 309 bp, Homo sapiens
aggacattctctagccagtatggtgcgcacatgatgctctccatatcctgaggtactcagagctgtggagtaggggtgatgagctccagtatttccagcccagcagccacatccataaagagcagcctgcccaactctccccggatgtgtcaaggccaagcctccagtggagacagcagcagcaacattcccttcgtggtccacaagcacagcgcgtaccgtgtccgaagtgcctgagtcattttccttctcactggattgtcttcttttcttgagttgcataagatctgtgtcctcattacatgccat

SEQ ID NO: 536113 - DNA, 302 bp, Homo sapiens
tctgcatcgctaatctttttgagaatgaacaagacacagcagtttgactaacactcagtaggaaacgtagctgttttacttctgaacctcagctgtgttactctaatattgtttgggattggcatggtgaaccgcacacacctataggctgatattggtggactaaccatgcaatctgaactgaagagtatccatggcagtcctactctttaggaaaaaatgaaagatgttttacactcagaagatgactgagacttgtgctactgctcatattgctggggttaatattgtgctgcttgaac

SEQ ID NO: 536114 - DNA, 335 bp, Homo sapiens
gtaaaattttaaatatttttaacaggtacattattaatattagataatatttataattgtgaaaatattccatgctaaaataagatgcaatgtctaaacatcagtattaaaactagtataaatatttgcttgtttatacaaggaacattcaagctcaacctaaaattatataggaaataaaataaaaatttgcagggagctctttaataacataaacatatatatatacacacacacacacatataacatgtatatatgttatatgggatagatatagatttaacatgttatatctatattttgtatctataactacagctgtatgtatctacat

SEQ ID NO: 536115 - DNA, 800 bp, Homo sapiens
ccccggaggggggacccacccggaggcggcgtgccccctcggcgccacacccctgtcttgggaggggctctccccgcggagcagagtattagccacacagggagagccaacacgcctctggggtagtgagagagaggaggcacgcacacatgatgtgtcgctctcggtgggcccggcccccgctctgttgttggcccgcaccacagagcagagagactctgcgggggagaaagagggaaagggggagagaactcatatattagggtgtgagagctctcttttctaaaactaaagagagcggattctactgcggggactattgcagagggaatccatttagaggctgtgagagtctccgttttctcgctgtggggaggttaggacgcgcctcgccttcctcgggttcttgcccggggatcgggttttgcctcttggagaataccctctcttacgagagaggctccctcccctcttgccctgggcctcgcccgcttctggggccgcccgccccccagctttgttttcctcccctcgatacgaatttcttttcctccccgcgtaggaatttttcctttgcctatagattgagatatcccctctgtcctcctcttttctcatcacccaagaacaatggaatagattgtgaatcctttccttttgtttgctcctgatattatgggttttttgaaagaaaaaccaaaatattttttttagcccttttaaaaaaagaaaattaaaagaccacttttaataaaaagggccctcccccctttgaaaaaaaattccgcaattgctttcca

SEQ ID NO: 536116 - DNA, 203 bp, Homo sapiens
  misc_feature (111)..(111): n is a, c, g, or t
  misc_feature (146)..(146): n is a, c, g, or t
gaattctggaacgagaagaagctgaagaagaagggcaaggagaaggcggaagacagcaggtggtggaccctgagacggggcgcaccaggcttattaagggagatggcgagntcctagaggaaatcgtaaccaaagaacgacacagngagatcaacaagatgccgagctgggttgcttccctgagggcccccgctggtcaaggc

SEQ ID NO: 536117 - DNA, 139 bp, Homo sapiens
tgtgaaaaggaggaatggggaggacaagaaagaaaaaacaagaaggcaggtgaaagaaaaaaaaacataattaactacaagtatcaataatattatcatttattgcacaattaactctcggatcctgcttatcgtacaa

SEQ ID NO: 536118 - DNA, 168 bp, Homo sapiens
  misc_feature (69)..(69): n is a, c, g, or t
  misc_feature (112)..(112): n is a, c, g, or t
tcccgtctaccaggtgttttcattcgattcctgtcttctgaggatgatgatgacttcctttctcgctgnggtcctggtatatttctgaaaagaaaacacagtcccttcgtgngcctgtttttgaggccgggggggttgctgaccttcctgtggttgatcctccatcac

SEQ ID NO: 536119 - DNA, 137 bp, Homo sapiens
ttggcccggggtttttcctaattgctaatgctgccgtcaaaggtggtaattttttttggttaaagccctattgccctttttttagaaggggttgcccccccgtccccttgtttttttcactgggtttttaggggcca

SEQ ID NO: 536120 - DNA, 528 bp, Homo sapiens
atagtgtaatcagtctcactctaagaagtgaagaaaaccatcaggttttgggaaggaatcacatcctagcaattgagccatttgcaacatagcttggtgactttgaaaaatatggtattttattctcagcattaaaaatcagggtattttggccctgaagtagtaggttcacgctatttaaaattctagatatatctctgctatactccacttaagcaggcctctagaaaacatagaattactttttggtattgtcagcattatgaagaattttttttttttttaaaatctcatccctcatttcagaaacttgtcagcaccttttttccttgacagccagcaaacttgcgtgggaagaataatcttgcaaacgctgccatttccttctgcaacatctgagagcgcatactctgaatagtcaatatttgatgatgtttaatttccattatttccttcaacactcagttataatcaggaggcatattgttgactcctgtttcatataaagaatcttttagtaacataaaa

SEQ ID NO: 536121 - DNA, 941 bp, Homo sapiens
  misc_feature (4)..(4): n is a, c, g, or t
  misc_feature (42)..(42): n is a, c, g, or t
  misc_feature (111)..(111): n is a, c, g, or t
  misc_feature (340)..(340): n is a, c, g, or t
  misc_feature (534)..(534): n is a, c, g, or t
  misc_feature (537)..(538): n is a, c, g, or t
gttntgatttcggtaactagtttaactacaggtaaccttcanagggaccattgtacattatgaacaatagatagagatgacatcttgatgactcttgaaatatggaaattntgtctgaagatcagtggccatattactgtaggccctggttcatgttttcatcaatctaaggtgcaatttctaaatttgtaagagtaggtttaaaaaaaaaagtgcttcttatctttgttaacattgtacttttccttgatgttcttaaaaggtatttccctcagattactcatgtttatgttgtgagcatgtagaaacagtaatgctaatgcatggctagttgcctttntaagattgtgacaccaggcttaccttttaaagtttagtatatagagacaattgtaatggaaataactactgtagactattgaagaatgatctctttgtgatttaagaagtggctggattggaactttgaatatgctaatgtggaaaatgaattacctctatgaaggtggtttattacaaataagcacactaacnccnntcgaagtgtttacctactttaaaagtttaatgatatgacctctgtaacctatgctaaaatgtgatgatatatttgaaaggcttccaattatatataacttgcttgaagcttccatctatgtggttaccctgagggttataaatgtgtcaaagccctataaatgattgtttgaagttatgagataattggctttaattaagaagccattaacgaatgtcattctatcattataaaagacctgttcaagatttaccaaaccatcctttattgaccaaattgggtgtttacttaactttcctcataatctaggtcagatgctgaaaggcttaaatgagtactgcagaacattttaagataactagaaattggccattaacacttgaacctttaagtactcctctat

SEQ ID NO: 536122 - DNA, 328 bp, Homo sapiens
tgtttcaggcaccggagacattattcttattgatgttcatattgtgtcatcttagttcagtgggaacccatttaatttggctcctttgtccttttgatgtgaccccagtagtctttgatagcttttctgttttatagcacaagaaaaccgaggctcatctatttgtttcctttcaatagcaggccaccatgtcctgctatttttatgtttatttttatagagacaggttctccctatgttgcccaggctggtggtgttgaactcctggactcaagtgatcttcctgcctcaagtgattttactgcctcagattacatgcgtgagcaac

SEQ ID NO: 536123 - DNA, 364 bp, Homo sapiens
  misc_feature (5)..(5): n is a, c, g, or t
  misc_feature (42)..(42): n is a, c, g, or t
  misc_feature (44)..(44): n is a, c, g, or t
  misc_feature (103)..(103): n is a, c, g, or t
  misc_feature (135)..(135): n is a, c, g, or t
  misc_feature (202)..(202): n is a, c, g, or t
ggccnaaaatgtacaaaaccacaccagatgtcatctttgtantnggattcagaacccacttcggtggtggcaagaccactggctttggcatgatctatgattntttagattatgcaaagaagaatgagcctaaanacagactggcaagacatggcctttatgagaagaaaaagacctcccgaaaacagcgaaaggaacgcangaacagaatgaagaaggtcaggggcacgcgaaggccaatgttggtgctggcaaaaagaagtgagtggagattggatacagccaaaggagtagatctgcggtgacttgatgttttgctgtgatgtgcagatttctgagaggacaaataaactaaaaagctcca

SEQ ID NO: 536124 - DNA, 576 bp, Homo sapiens
tataatttccccagcaatatttagcacaatgagcgtgtatgtgcttgggggttaaaaattatctgctagggatgataggccggggtttctcgtgtgacatctagatgggcctgattagagcagtcatctccgggtaggcacaaaataatcaccaacagtaatgtcggtatctggtaatggtttggtttggctttttaaagttttattctttgatttctggtaaacatccattggcactgaggccgtatcattcctatagagacacagagccctatacaatctgtgtgacccctgtgttgggggggttaaaaactcctccgccgttgttaaggacaattaaaagtgggtggggcaaaacactctcacaacacccggtgtttgagagcctctccagagtgcatatctgtaagagaccctattttgcccaatacccgtgttgaggtgtattattcgtcctttcccttggaaagcacgctggacactggaaaatgtaatatcatataaattatgcgctgggcacccaagtgggggggaaacggggtattgttcggcggacggtttaattttgtgtgaggg

SEQ ID NO: 536125 - DNA, 650 bp, Homo sapiens
ggagactgttcgtgagctgatgtgcgtcccgggttgcttgccggtgcatgaaggctgtcgccgggagagcccggggtcagagcagaggtgctcatcagcactgtaggcccggaagattgtgtggtcccgtatcctgacccggactaatggtccctgtcttgcagactgagatagcggcaactacactcttctccactagtgcaatctgccgatatttcggttgtagtgaatctggctgggagcaagatgacctcgactaaccagtgtgctggtaatgggaagcagacagagctgcgagccagctttgtctgctgccctgtactatatagtggtccaaggcaagaagggggaagcatgtccttggtctcacgtgcggatgagcccgtgacctcagcatttgagccactagcgttgtaagtctgtcagaatctgtccgtttcctggctggggacgacagaattctctacgccgacatcgtatcgtggggagccctataaccattactgcaagatcccgcctacctccctgaggacgctgatgtgccctggcacaggctcgttccagacactgagtagcccaggaaacatgtcagcgagctgcagagacgtgtactgaaagagaaggtgtcctgggtctccggccttaccctt

SEQ ID NO: 536126 - DNA, 269 bp, Homo sapiens
gacatcctaattaccggaatacgtcacgtgtggttcctgtgagtgaggcgacatgggtttattacttttatttggagtggcaccaatttttgggttcctaagagcaccggatcgctgttatcctttaacaagttgcaaaaggccaccattttcaagtgtggcaagcatgcagttagcagttctgtgcaaactttttcggtcgcatcgcaatcattcaattttctattcactacattcacaatctagggttttcattaacactcagggtc

SEQ ID NO: 536127 - DNA, 436 bp, Homo sapiens
  misc_feature (166)..(166): n is a, c, g, or t
  misc_feature (183)..(183): n is a, c, g, or t
  misc_feature (187)..(187): n is a, c, g, or t
  misc_feature (194)..(194): n is a, c, g, or t
  misc_feature (204)..(204): n is a, c, g, or t
  misc_feature (215)..(215): n is a, c, g, or t
ctggttcggagaatggctaaagcccgagcctcatctgtaaatgcagctcccccttcatttctttaatgaaatattagttggaagacttcccaaagactgctgataactatctgtgattgataggaaattttttttcttgatttctctgtgagaaatgtaatgctgncttttataaagcctggncttntcctttntttaataaancaatgtttgcnatggtaaatgaaacctttccctggacagttttttgaaagtctttaaatcccaaagttttggaaattcaggaaagttaccaattatgtccggatattatccaaaggaaagtagttatatttttaaatgctattattgcagaggatcctcaaaaaaaaggtaatttacgttatttcctattttaatgtcttttcctaataaaaaacttcacctttttaagtta

SEQ ID NO: 536128 - DNA, 320 bp, Homo sapiens
  misc_feature (34)..(34): n is a, c, g, or t
  misc_feature (93)..(93): n is a, c, g, or t
  misc_feature (132)..(132): n is a, c, g, or t
  misc_feature (135)..(135): n is a, c, g, or t
  misc_feature (137)..(137): n is a, c, g, or t
  misc_feature (241)..(241): n is a, c, g, or t
  misc_feature (303)..(303): n is a, c, g, or t
acctctcctctcccagccagtcgtgggcgcgttntcaaagtgtgcagttgtctcctccctgtccagccccatcgtcgcccaggaccagctggncgcggtctgacctgaggctgctgctcagcgccgggctgncgntntctccattcgagcaccttccagcataccgctcggctccgggagccttctgcaaagttgggcagctcagagcgcaattttgcctctcgacttctccctccttggntccccggcgcccccgcttcccacgatccctttcactagggagcagccagttccagcgggtgnaaaactttgcacccctt

SEQ ID NO: 536129 - DNA, 112 bp, Homo sapiens
tcaccaagaagacatagctatcctaaatctttatgcaataacaatagagcttcagaacacatgaagcaaaactgacagaaataaaataggaatagttcccacatataaacag

SEQ ID NO: 536130 - DNA, 209 bp, Homo sapiens
atcttgtactgtggtgtacccgtgatgttgaaatgaatcaaaccaaggtgtttggtttggggagagggagtcggttctattgagtcatcacaactagccaagcagtagaggtctaccctacctcaaactgaatcagagctagaactggaatatgtgcatacatacatttatgcatgtaaaacctaatagtttcagaaagccaaaagagg

SEQ ID NO: 536131 - DNA, 539 bp, Homo sapiens
catggtggtgggtgcctgtaatcctggctactcaggaggctaaggaaggagaatcacttgtaccttgggaggcggaggttgcaggagccaagaatcgcacccactggcaactcctagccctgggcgggcagagtcagagactctgtcaaaacaaagaaaaagaaaaaaaaaaaaaaaaacatgggtgtgtggtggggcgcgcgcgggcgccccagaaaaagaaattttaaaaaaaacacttgtgtggtgtgtgggcgggcggcccccaattaagtaagacaaaaaggtggggccaaaaaaggggcccaaaaagagagaacaccggggaccaagaacagaagggcgaggggaggttgcaccaacacaaataaaaaaaaacgcccgcgcgggaaaacaaggagggtttctggagaaacaaacaacaacgaagggagcataaaggaagcaaaaacagaggaggacctacaaaaacaagagaggcacaaaggagaaacgagaagacaacaataaagccccctcgtggcgatgaaaaaaaagaa

SEQ ID NO: 536132 - DNA, 479 bp, Homo sapiens
aaggatcccctgggctgggaagagggctgtcgtggggaagacgggaaccagaggctggttactggcaagcaatcatctggaggacgagtatgaccgagctgcatagcaaaagatcgggtcgtgtaccattgactcccgagttatttaataattgatagcagcacattgcaatgttcctgggctcgcaccaatggcaaagcccatttcaacaacagctgatgcaaatacggagaatcgccctccactggaattcgcagcgctccagtcagcgcgagtggtgtagcgaggcgagtgagttcccgccagtatccccatggccgctgctagtgggcgccctcaaaaccgggttgcctggacatccacggctagggatcacgatccttccttggggacagtcggtaagcaaggtcatgccagtctcactggaggtggggggcgccggccaggtcatcaaaacaagccctccccctcttccccag

SEQ ID NO: 536133 - DNA, 530 bp, Homo sapiens
ttctgttactggcgagaagttgctaggtttaatggggcaacaagtactctttgtggcggtgccactacttcattaccccgactgcagatgcttctgtcacacagtattgaaacctgcttcatcaggtgctattagactgaccaaatgttacatgacttgtggaagtcggtgtacgggatatttgaatacaccaagggcactgtcactatgattaacaattcaaacatcttcatcaagtacaagaccacgactagggaacgctaattgatagcaactatatgcatgacctgcgaattcaaagtgccggggctctgacgtctatctatacatacactaaggggaagcagcgtactttagttccatataaagtcgcccgtcctttgcttaaaaccttaagattcattatctcgcagattatttcaaagattacagcctaccttccttggattgagggaaagtcgttcttatgcgaccagtggcgtaacgtctgtctatccatggaaaactccgaactagggaatgcgaccgct

SEQ ID NO: 536134 - DNA, 179 bp, Homo sapiens
ggggaatagctcgccagcaggttttgatgccagtgtgagctcaagcagtagtaatcagccaaggccagaacatcctgacacgcctgtacaggtcagacagagttacagatgctcagggaggaggaagttcatcacaacagcagaacagcagccataaagcaacaatggtaacaccaaaa

SEQ ID NO: 536135 - DNA, 745 bp, Homo sapiens
cttctcctgggacctcgcgggtaccccccgggttccccagttagaaggacttttatggactctatggtgcggccgaaggtcccgttgagttcccccggggtgcaatacgggccccttagctcttgaggggacccttggcacagagggcgtctttggccacattggggggtcaaatctcgtgggccagagacgtggcgcacaacacagaaaagtttcggcgcagccgcgtcccaggggcgcccgtgtctatcaccaaggcgcgcaactcccccatacatggcgcccaaaacactctcagtgccccctctaagagcctctgcgatagaaatcttgtgagacattttcttatgaagccctgtctgcaaaattggggctgcctgagggagatcatctgtcgcacagccgccaaccacagtcctggaaagaggatgggggccccctggaagggcgcctccccataaagtctgctgctgttctgtcacaaccccctgctggaccaggccttaggggtgtaaagtgggggcacagggccacaccccgcccgggacccgcgggagcatgaagacgcccctgggctccagcgctctcagagaagcaagtcggtgagggtggccatgggaccatgggcaaccactggccatgccggacctggctgcctttggggtcgaggttttgggtggaaggaccccgggtttcgccaggttttgtgtcagcccccaataacacgaaccccgaagccccttta

SEQ ID NO: 536136 - DNA, 179 bp, Homo sapiens
tcacaccacctcctactagggtgggtattcatctgtctctactactatgattaatgactgtcattctttaagagtagcatatagttcagctctgtgtaagtactgcatattttactgaataaatggatatccgagtattaggagttgggtttcgtagctggtgtgcgtgtgtgtgtgtg

SEQ ID NO: 536137 - DNA, 437 bp, Homo sapiens
ctccacactctctgaccagtgagagacgagacacggagcatcccttgttattcagtatacagagatttttaacttgactttaatattggtagcatgtcagtcctttggagtccattctcctacctttcctaggagtatataacttctgatattttcttagctgtgtgatataaccagttacctgaccacttttaccctgttctttctccatcccccaaatcctgctaagtttcgatggctgttgcttgggtacccctgaaatcattgattaaattgttggcgagaatgtacccaactaatactttatactgtagtctgtaaatgcacttaagctagaaatagacttttaaaaaaaatcaaagatttctgttttaaatgggaatacctgctatcctaagtctgttgactttctgtgagaaataaaagtccttgaacac

SEQ ID NO: 536138 - DNA, 761 bp, Homo sapiens
tcctgtcaacagcggcagcctcccaactacgaggatgctcaaggaggagcaggaagtggctatgctgtgggcagccccataaccctgctcccccgatgtccaccgtgatccacatccggagcgagacctctcgttgtctgaccatgtcgtctggtccctgttcaagaccctcttcatgaacacctgctgcctgggcttcatacgccattcgcctactccgtgaagttctagcggacagggaagagtggttggtgacagtgaccggggtcaggactatgcctccataggcaagtgcctgaatcaatctgggcccatgatagtgggacatcttcatgaccaattctgcatcatcatcatcccagtgttggtcggacaggcccagcgaatagatcagagaggcatcagttgatggccagagcgctctgcacagtgaccatgtatacccaggtactctatcgttccatatcctcgaacctgaccccagagggcagtgagctactgcccttgaacaggcatgccacttagctccaacgttccattcctcgccctgtcccccatagccgagtcttgcattagacctgatcctcgaatcgcttgtaatacgactggattttcaaataaaggtatattgtgtccggtgcttgctgtgcaaacacaagacatcaacacgagaaattggagcaggccagacacaaaagactctgaacaaccaagcctggagggaccacaaaactcgggataggccaaaggagaccaagcaa

SEQ ID NO: 536139 - DNA, 197 bp, Homo sapiens
tctacaggatcccatgaaggttctgcagggtaatggtgatccggttctcctcgccctctagctagcttcctgtaggtggcgagtctctgagtgtccatgggccagcttgacattgagcatggtcctgtgtactccgtgcaagttggacgggccatctcgttccttgagtgctctgcccgctcttcctccagtccgcg

SEQ ID NO: 536140 - DNA, 1334 bp, Homo sapiens
gacgcgatgaccctgaacggcggcggcagcggagctgggcggtgagcctgctgtgtgggtgtgccatgtgagcgcgagctgccgtctgtgtggcatgcacaccctgtgtgggcccctgcccctgcctgcgtgcacctgcctgcatgcatgcctggtgtgactgatgctgctgaccatgcatgtgctgtgctgcttgagcccctgtgtgttgcgccttgactggctggcctgctgtgtctgtgttgactgtgtgtgacccatggtggtcccatgtggcttggactcggtgccctgatgtgacctcctgatgggactctgcatcagtctcatgtggtgtgcatgctgagctcatgactgaagatgctgttttacaacgtgtgcttggctgcttggtgtgtgctgccctgtgctgttggtgccaaggatgctgccactggactgctgcaatctttctggccgtgtgttgtgagtgactggtgccttgaatgcacgacggcatgcatgtggcaacacgctattgatctggctccatttggtaggtgggactgggatgaaagaggcaatcactccatggtctaccgacgatttgggaggcagtgacgtggggcccgcttggttgcccgtgcacttgccatggccattgggggattgcctatgtcattgtgtacctcagtgacggacaagggcagcttcggagaaagggctcagaaactgcggtgtccagctgcgggcgttgcactggcgaaaccagattgatgtgcccattcatcctcgtggggcaacaagaggcgacttgttgcgctctcgtgaagtctcggtgcatgagggccggggcctgcggcgggtgggtcatttggagtggcaggttccatttgatgaccatcatgcggctatttccactacaatgttcaggtgcctgttatgaaggctttcgtgcggccagaatacggctgcgccgtgcactgaaggtagcaacgccggatgtagcaaggcccgggggcaagagcactttcaaacagcaaggagtttttgggccgagttcaccttagacaggccgagtagggtcctcttcggcggaaaccagagtctcgtgcaaagcactctgagccattgggccaccgcgcctaattttggtgcagctggcgagggtgtgggttcggccgccacaacgcaggagtttaaagacgtaacagatagatcagcgagaggtgccacactagtgatggacatgcagatcgaagtcacaggaggacgacgtatgcagatctatgcagacggaggaagggtcagctgtggtgcgtcatacagctgtctcagtcaacaagcagtgaatg

SEQ ID NO: 536141 - DNA, 416 bp, Homo sapiens
ttgagatatcctaggagtctgcatctaggattcatccatgcctctgtgtggcttgatggctcacttctcttttaatcactgaatattattccatcgtacggatgtaccatatctgttcacccactgaaagacatttggttttcggcgattaggaataaagctgctataaacatttgtgtgcatgtttttgtggggacatacatttttaaatcagttgggtaaatatctaggagtatgactgctggattgtatataagactatgtttagctttgtaagaaactgccaaactttcttccagagtgtctgtagcattttgcattcccagctgcaatgaacaagagctccttctgctttgcatcctttccaggactgggtgttatcagtgttttggattttaaccattctaatagttata

SEQ ID NO: 536142 - DNA, 130 bp, Homo sapiens
gtagccacttcacgttgtcaaaatgtgaggtgatggcagaagagcatctgtcttcgcctactgaaggaaagctcccctaccttatgatgacccatctccctcatgaccgatcccaagctcatcatttgga

SEQ ID NO: 536143 - DNA, 623 bp, Homo sapiens
gatcgagcaaccctctaaaagcagtttagagtggtaaaaaaaaaaaaaacacaccaaaggctcgcagccacaaaaggggatgaaatttcttctgggacatcctcctgggttctcccgttactggatcgtctggctccctagagtccttcgtggaagctttttattcctaagaggagaaaatcagtcaccgggcgaaatcgtggctggattacagggacgctggggcattgggaattggggagactggactggcctatgaatttggctaaacttaaaagcaagctgggttctctggggatataaataagcatgggactgggaggaaacagctggccaaatggcaaggggattggggtgccaagggttcataccttgggggtagactggcagaaccggaggaagatatttacacgctctgcaaagaaggtgaaggcagaaatgtggagatggtcagtatttgagtaaataaggctggggtagtctatacatcagatgtgttggctacacaagatcctcagatgtgaaagactttcgaagttaatgtactggccattttgtggagtacaaaggcattcttctgcaatgacgaagataccatggccattgtgtcctggtggttcggc

SEQ ID NO: 536144 - DNA, 258 bp, Homo sapiens
caccactaccccgtgcctcataggttttttgtttttttgacagtcttgctgtgttacctaggctggagtgcagtggggccatctcagctcactacaacctctgcctcccgggttcaagtgattctcctgcctcagcctcctgagtaactgggattacaggcatgcaccaccatgcccagcgaattgttgtatttttggtagaacagggttttgccattttgctcatgctggtctcgaagtgcggcctcaaacaatccg

SEQ ID NO: 536145 - DNA, 184 bp, Homo sapiens
tatggaaaggaccactcttacataactagaatagcattaagaatcagatttacagataatgatgtcattattatatatatatatatatattgtcactccgttcaagtttcgttcaagtcgacaaccaataaaaaatttaaaaaaaaccaggcaattaatagaaaaaatatgatatgaatgaatg

SEQ ID NO: 536146 - DNA, 682 bp, Homo sapiens
aatataatatcatttggcatgaaacctactcagactaacgaggcacagcttatgcactatcgagtattctatgatttaattatcacagccccacaagttagatattgtcagtcccgttgtacagataatgaaataggtttagagaggttactttgcctgaaatcacacagtgacccaaccccagttacatgtgcctctaaaacttttttctactcttctaagtggattcctctcagtttgtccatcagcaaaatagaagtaatcgttatacaaaacatataattgaatgaaagcatctcctccttcttaaggctcctctaaatgtcaaggactataacatattagggtacttatgtattgtggcatttgagaactaaattctgttttcacagaagcatagattattcaagatagaaaaacgggaactctgtagagcttttccttgcaatgtagaaagacatttaatcttagatttaggaggccaagaaagactaatttggactgggcatgatggctcacacctgtaatcccagcactttgggaggccaaggcgggcgggtcacctgagatcaggagttcgagaaccgcctggcctacatggcagaacccgtctctactaaacatcaaaattggctggcatgtggccatgctgtagtccactatctgaagctgagggagaatc

SEQ ID NO: 536147 - DNA, 119 bp, Homo sapiens
gtcatcgagagtgccacgaaagagcgttctaagctgcaaagttatacaaatagcagtggtggccaggtgctgtggctcatgcctgtaatcccagcactttgggaggtcaaggcaggagg

SEQ ID NO: 536148 - DNA, 395 bp, Homo sapiens
tgatctagaggatcccgtcatacctggtacgtggctgcagtactgtgagagactacaaggacagcagcgactttggggcgtcacctcaggacatggatgaagctggaaaccatcattctcagcaaactaacacagaagcagaaaaccaaacaccacatgttctcactcataagtgggagttgaacagtgagaacacatggacacaaggaggggaacatcacacaccgaggcctgtcagggagtgggggacaagagggagagagagcattgggacaaataccaaatgcatgcacggcttaaaacctagatgacaggttgatgggtgcagcaaaccaccatggcacatgtatacctgtgtaacaaacctgcacgttctgcacatgcatgcacccagg

SEQ ID NO: 536149 - DNA, 149 bp, Homo sapiens
gacgcacgagagacaacggtatagagtgtggaagaaggagcggagagttctgctgacagggtcaaagtcagactaggactgataagttaagcgatgggtttaatgacatggaaatcattgatgtgacattagagccactatgctggagc

SEQ ID NO: 536150 - DNA, 1437 bp, Homo sapiens
gatccgccacgacgtccgtttttgtcaaagttatattatatgcgctaaatcctatagtatcttatatggcacagtgcagcgcagcgctaggatctacaagcacgctaggttcccgctatcataaacagagcttatcaccatttcatgatcacgcccttcataaatcatgtttcctgtatctggcttacctaaggtccttgtaattgccctatttatcctaaacaattacaccgaagagacaattgaactaaatgactaaacattcttccagaactgctccaggagacataagcaaacccggtctggacactaattcgctgcaccgccaatacaatcctaaggtccatcaattcgacccttccccattcccttatagcaattccgttttaacattaagtcagaacgaagggtcacagaagtccccctccgcctttaaccattccaaaatcaacattgggacccacccaaattgaggtacactggaaacacatcacggaagatacactgcggaacgtaacagacaggaggacattatatttcttaaaaacttaccctaacatttacatttccacgcccagttaagttccctaaggaaacccaagtgctggaagcttgccgtgcaacctcctcttagggtaccggcttgtgcaccaaaatttctgcacagcataagtataaccatacacacgagaagctgggcacagtgacccctgccaatattcggtcaacttacacgtaacagttgcaacgattacaaccacagggaacggcactcgatggcacacgcttcaagtggaaagccgctgggtcccccacgaacaacgttcaagggccctccaaacacccacagcacaggacactgccaaaacgttgcccccggggaaccggcacctataaaaacccagaaagatacaccaaccttgtattccacccgcgacttacaacacacctgaaagacggggacggattaaaataactaaaccgggagcaccaacggtgcgtcgcggacaaagacaccatcaaaacaatccacaaacaaaagacggacagcaggcccacacaactcttcaccaagcaggtacaaaccccccctaactgaacacgaggccagcccccaaaggacctgaacaaccgacgcagaagcacaccaaaacacgtcaagcgtgctagacccacacacaaggaggtgtgctccccacaaaaaaaggacgacgccccgcaaaaataacaaacgaacgaaaaagaccacagatggacgacacgtagcatgatgggtaacaccaccacctgactacgaatcacatggcgaaaaccaccagtgtcatctaccacgaaggaccacattgtacgtgaagcaggggcagacctcaagaagcggacagcaggagacggtacaagcacaacgtctgggagcacgcaaacaatcccgccactcag

SEQ ID NO: 536151 - DNA, 586 bp, Homo sapiens
ttcccatgaccctctgtaggatgtcttggatgctgctttcctgcctgatgttcctttcttgggtggaaggtgaagaatctcaaaagaaactgccttcttcacgtataacctgtcctcaaggctctgtagcctatgggtcctattgctattcactgattttgataccacagacctggtctaatgcagaactatcctgccagatgcatttctcaggacacctggcatttcttctcagtactggtgaaattaccttcgtgtcctcccttgtgaagaacagtttgacggcctaccagtacatctggattggactccatgatccctcacatggtacactacccaacggaagtggatggaagtggagcagttccaatgtgctgaccttctataactgggagaggaacccctctattgctgctgaccgtggttattgtgcagttttgtctcagaaatcaggttttcagaagtggagagattttaattgtgaaaatgagcttccctatatctgcaaattcaaggtctagggcagttctaatttcaacagcttgaaaatattatgaagctcacatggacaaggaagcaagtatga

SEQ ID NO: 536152 - DNA, 297 bp, Homo sapiens
  misc_feature (8)..(8): n is a, c, g, or t
  misc_feature (21)..(21): n is a, c, g, or t
  misc_feature (51)..(51): n is a, c, g, or t
  misc_feature (72)..(72): n is a, c, g, or t
ttttgggncccccaaaatttncctttttaaggggccccttaaaaaaaaggnaaaaatttgggctttttaganctttctggggtccagccactgattaaaatgtgaatagtaagtgcatcctactggttcccccccatataatttagtaatcaatcttcagtggattcactgattcagaatcgataaatttaattcattttgatctggcttattttttgctcacgcatgatgtagataatgtgtccttctaaagtttgtctctacttttagaaataaatttcagaaaaattgtttcaa

SEQ ID NO: 536153 - DNA, 838 bp, Homo sapiens
cactgacaaaggcaggctggcacatctggaaacttatctaaacacacgcctggccagcggactcttctcacagcacagctgcaactctcacttccaaagaactggctcctcacaccaacttggcccactaagccccgggcacctccacacgcggctacaaccacacttgcgacacttctccagcgaactggcttagcatcttcagcacaccaacccgctaaagcccaccgcaaactcacgctggacacgcactatctacgccggccgaaaccgcccaatcggctttgggaaagcattcggagacaacacagctccgaccacaccgtcgccgcaatccggccaacagtgcgacagcccacactgtgcacacaccaccaaccacggccggggcctttagcacactacccaacacggatccatccaacaaacactatcccccccccctttggcgcgctctggctaaagcgtctttcccgcaacccaagcctctccacactccgcgccttagtcggggcatggttctggcagcaacaaccagcttcttacacacacacatgagtgcctatacatacgcaacaatcgacgcgagcacccacccactgaacaccccacccagacgagggcgcccccacccacacccagccttcttcaacaaccaagtagcgccagccggcgctcaccacccccacaccaccccaccgcacacccccatagcacaaccgccactacgtgggacgcatagtccatgtcaggaaccaacatcacgtgctagcactacacccacacacgccccacctcacacccagcgagcctcacacactcggcgcgcacccttatg

SEQ ID NO: 536154 - DNA, 1111 bp, Homo sapiens
cgcagacattatgctgtaggcggatttgatggcatgcctgggctgttactcttgggctgtgcgtggcggcggtgtgtggttgcttcgtgtttcgtttgcgatattcgctgttggcgatgtcgttctctacgtccgccgtgtgggcgcttttcatgatactcctctgtcctgcacgagtgtccggggccatcgcgtttgctcgtttcctccccggtgctaggtgcgggatgaactttttttcttttggaccgcaaccctgcccggtcgccgttgggccaccttgtgccgccaagttgtgtcacccctgggtccagtgacacatcccttgattgtaatccccggagtgacgtccctgtccggacttggccacaggattctacattgcgcggccattgacgctcctggttctgctggcccggttacacaccctgaccagcgtcattcctgtggcgtctgccattgacacagccggctacagggagtccgcggcgttcggccaggcagcctctgaccatatcggccccgaagatgccaagagaccagccctaggtaccagatagacccaggcggacttgaggaggaaggggaccagttgccgtgctcaccctgggaccggcccccgccacggggtccggcccctacccgcccctgggatttaagccccatagcactgcgtcagctaacttcacgcctgtgcttgctgggcccgcacccccctgtcccctgtccctgtggcactcctgcacccatcctcacccctccgttgagcccctcgtgccatgccatgagatggagccctcctgtcactctgctggaccgagatttattttctgagtccaatataaagttaatgaataatttttgtccaagagagtatttaagctgtgctgttggtgtgagaaatgtcacttcttgatcttccgccttcgtttgccagaagagttcccgttgacgtggtgtttggttccctggcggggtaccctagggattcatctgttttcttcacttccccttgcatctgacgatcctgctgggaaccccccgccacctgtatcccctattaggaggttaaaatccataaaatggccccttcatttgtgttgtagctcca

SEQ ID NO: 536155 - DNA, 224 bp, Homo sapiens
gaggatccatggagaccaggctgaggcaccctggggccagcagtacagaagcaataagctaactcttaggcaaacctaaagtctcgtatgctgtggtgattttaataaataccaaaggacaccattagctaatgaatgctagactaactagataccaaagcttgctctgtgaaaatccccgcataaccattgaagtttgcaacaccctaaactcagccttccat

SEQ ID NO: 536156 - DNA, 383 bp, Homo sapiens
cagccaccagcagctaggaagaggcaggaaaggatcagccttcagagccttcagagaaaacatggcattgtttgtgtgttgattccagatgtccagcctccagtgagagaatacatttctgtcaccttaagccacaagtttgtggggctttatccaagcagcctcagtaagttaagcatcatgtcatccctcagaaagtttaatttaaagcagggtggtattcatgtaaaaaaatcagggtcttataggaaaaaggaagacgctgaaatcaatttatctgcaaagcttttttataagaaaagagtggatatatgaaaacaaaccagaagcaatgtccattttaaaacctgtatggctagttctgtttagcaattgaccaaaaa

SEQ ID NO: 536157 - DNA, 368 bp, Homo sapiens
ccatgggcatcactggcctccccctttttttttggagagggggtctggctatgttgcccaggcgggtcttaaacgccggggctcaagcaaccctcccgcgctcccggctgagattacaggtgtaagccaccataccgcaacctcaatgacacctttctgatggtctttacacagtcggtgatgtcggggggccccccggcccgggcctcaataatggcatagcattttcctagcagtacagtatgagcagctccagccattccattaaaagtcttagttctggttggagctgaaaccagtggagcctatgggaagcaggtatgtctttcttcttcatccaagcaccctcaggacggtttagttacatc

SEQ ID NO: 536158 - DNA, 381 bp, Homo sapiens
atacccagcattttataagtaaagagagagcaggagccttgatgatgcctctggtggatcagctggaaaacaggcttgggggagaagagaaattccaggaacgggtgacaaagcacctgataccatgcattgcacagttttcagtggccatggcggatgactctctttggaaaccactggacttccagattctggttaagaccagagacattcttgcctaagggtcgaattgctgcgttgagtactgtgttagcactgggtgaaaaactctaggggaattttattgtgttgcgaccagaatccattcctttcttatcacagattgtgggggaaatataagtgagaaaatttacaatcttggcccaaaaatatttttcactc

SEQ ID NO: 536159 - DNA, 512 bp, Homo sapiens
cttaaagcacgttgctatactatgtagatgattccatttcattctacaacaacctgttacgtaagtactattattatttcgaatttgcagatgaagatacagaagcacaaaagttaagtcatttgtccaaggtctagtaatttgccgaaggtcttgcagcttgcaaatggcagggtcaggattcaagcccaggcaatccggtgccagagtccacactttatctgccccatgagttttcctctctagaaggaaaaaggcagtggggctagaatggcagtgtgagaagcctggcaaatcctctcaaaaacaatgataaaactgtcaaaaacaaccatttcaagactctggacaaaacatacaacaaactgaggagcactaattcatttaaaaacttctggatagatcagtgggaatctggtacttgcccccgcctcctactcccatgtaggtgggcagaacagtggcaggcaaagcaatatggatggcaaataaacaaggaaatccccctcagc

SEQ ID NO: 536160 - DNA, 109 bp, Homo sapiens
ccaatatatcgaaaaatgctatacccctccctcacagcaccgttggatatatcgcagagaataatgaagagatcgctagtctagcataggggaatcttcaaagtgacag

SEQ ID NO: 536161 - DNA, 328 bp, Homo sapiens
atagctttgtagggtccctgaaaagcatattggattaatctgttctcacaccgctaataagacatacctcagactgggtaatttataaaggaagaggtttaatggactcacagttccacatggctggggaggctcaaaatcatggcggaaggcggaggaggagcaaaggcacatcttacatggtggcaggcaagagagtgtgtcaggggagccaccctttataaaccatcagatctcagagacttattcactatcatgagaaagcatggaaacccacctcatgatcactacctccactggtcctccatgacatgtggattatacatca

SEQ ID NO: 536162 - DNA, 466 bp, Homo sapiens
aaagtgcgtttttatcgtcaaggtgcggtaatggaagaaaaagtgaaggatgcgttggttatctataccaaagggggcaatgataccttagcggatgggggaatacccggatgatcaggaacaaaaagagttgtttgatgaaggaattttagcacctaaggcagctgataaaattatcgacttgaacccccaaatcaagcgcttgcagcagttagcaggagatgatttttcacagatgccgcgttctgaaaaagaacaagtcgagtttgccgtgacagcgacaaagttaactttacatgtccaccaattagtgcacaaggtatgtcttggggactctgttgtggaccagaggactctcaactaggcattgagagtccacgagctcagttcactgcaagcacgtttaacgatttgaattaaggttttccccccccaaaggaagttgatttacgatttcagctgtgtg

SEQ ID NO: 536163 - DNA, 267 bp, Homo sapiens
  misc_feature (126)..(126): n is a, c, g, or t
atgatgtgatagttactagacactgtatagggttttatggttcggggaaaacatttttaaaaaatggacttatctctattatacagagttataatataaaaatgatttaaaggctatatttttcanggatgtagcgtagctacactagtaatcctgtttgaagaacactttcctcatttaagacttatagagatgaaaactatatacattaaacgtcttcgtgaatcatagacttgagtaccactcaaggcgaatgtttacgtttcc

SEQ ID NO: 536164 - DNA, 81 bp, Homo sapiens
  misc_feature (62)..(62): n is a, c, g, or t
  misc_feature (71)..(71): n is a, c, g, or t
gctccatccaaacctccagcgaagacatccagccatggccatgcagaaaatctttgcccggngaaatcttnggactccagt

SEQ ID NO: 536165 - DNA, 170 bp, Homo sapiens
attttttgtctcagaagtgacaggtatctccatgttggctaggctggtctcgaagttcctgacctcaggtgatccacttgcctcatgtgctgggattacaggtgtgagccactgcgcccggccttctttttatttctgtataatatttcgttgtataaatctaccgtgtg

SEQ ID NO: 536166 - DNA, 450 bp, Homo sapiens
  misc_feature (40)..(40): n is a, c, g, or t
  misc_feature (66)..(66): n is a, c, g, or t
  misc_feature (83)..(84): n is a, c, g, or t
  misc_feature (228)..(228): n is a, c, g, or t
  misc_feature (256)..(256): n is a, c, g, or t
  misc_feature (298)..(298): n is a, c, g, or t
gatttctctatatatgataggtgttataaaggaaaatatnggtgcttgcatgaatatttcctagancacaaagatctatctcnngggaggtatctttttaaagaatactgttaacccttgtgtgtgaattttccataaaagaatgtcatttactcaaaatataagaacataaatctcaacagctattgactcctgccaatttttatcgttttaatcccttgtaaatcngacagaacaatacaatataggttagttngtaccacatcaaccagaactgggatagtcagtggagtagatnatgatcatctgaaactttctgttgaaatactgggagaggtgaacatgcaacattattataatctgcactcagatttttccatcctagaaacaaaacttattatcagaaaactctttgagtcacaatgtaatatagattcttttaatttgaga

SEQ ID NO: 536167 - DNA, 311 bp, Homo sapiens
cccgcttgggcttcgagttgcatggtcgctggtactatgaatgatgggggcagtatgtaggagtagactattactccgccaatattcggtgtactcgttgttgcagatagcataggtggacgaatagatttgatgtgtaagggagggatcgtagacctcgttctgttatgtaaaggatgcgtatggatggaagggcgatgaggactaggatgatggcggtcaggatagttcagacggtttctataacctggagcgtctgagatgttagtaatagttagttttgtagtgaggcaactcgaaagccccaagcg

SEQ ID NO: 536168 - DNA, 207 bp, Homo sapiens
tctcgcgcgctgctccgactgccggcggcggcgttggctcgggggggggccgcccagtcacgagccgcccccggctcgcctcgtaccccgtcgtgcatcgtctcggaaccacgacggttctcgggcctcccccggcgccaaccgcacgatgttcaactttgacgccttctaccaggcccactatgggggggggtcctggctcggggg

SEQ ID NO: 536169 - DNA, 876 bp, Homo sapiens
agcctgcctgtctacttcaatggatgcatgtttctaggacggagacgggtggacttcccgctgtgatccgaatccaaacacaagtcagattacaggcaaattctgttctacagtatcctggcaagttctacgtgtgacgaggagaaagcataaacggttttgcagacaagccagcgatgcacgctttatatgctctgtcggccagtttctgagccttatcagcaacaaatggccagacgctggtggtgcagtatcacggtgaaacatgagcagaacatcgactgtgggaggcggctatgtgaagctgtatcctaatagttaaggaccagacagacatgcacggagactcagaatacaacatcatgtcaggtcccgacatctgtggccctggaaccaagaaggtacatgtcatcttcaactacaacagggcaagaacgtgctgatcaacaaggacatccgttagcacggatgatgagtacaccaacacctgtacacactgattgtgcggccagacaaaactatgagctgaacactggacaacagacaggtggagtacggatacttgcgaacaacgaatgggactaactgccacccaagcaagataaaggatcctgaatgcttacaaaaccggaagaaatggactgagcggccaagatacgaagaacccatcagaaattcccaatgcagtcaggaactgggacacaaggccggagaacataatcctggaacccgtgagtgctatcaagcaccgatgacgggtactaacacgatgtgacgtgcaaaatgagaaccaccagaggaatacacaacctgcagtcagcggactataaaataccagaaagaagaagacaccgagttaaggcacccagaaccacg

SEQ ID NO: 536170 - DNA, 189 bp, Homo sapiens
  misc_feature (8)..(8): n is a, c, g, or t
  misc_feature (47)..(47): n is a, c, g, or t
  misc_feature (52)..(52): n is a, c, g, or t
  misc_feature (65)..(65): n is a, c, g, or t
cttactanatgaagtcagcttccaggaatcactctgagtgatgacgncacgncccccagcagtancccaagatccccagtggccctggcaggaggcaaatgttcttacccctaccacacgctgtctcagtcttcagatgagttcctggatgaacccctcccccctgtccaccactagaccagccagcag

SEQ ID NO: 536171 - DNA, 659 bp, Homo sapiens
agcctcggcctcccaaagtgctgggatcacaggagtgagccacggtgcccagccttaatttttgtattttcagtggagacggggtttcaccatgttgatcaggctggagtgcaatggtgcaatcttggctcactgcaacattcgcctcctggatttgaatgattctcctgcctcagcctcccaagtaactgggattacaggaatgcgtcaccacgcccggctaattttgtatttttttagtagagacggggtttcaccatgttggtcaggctggtctcgaactcctgacgtcagttgatcctcccacctcagcctcccaaaatgctggaattaaagctgtaagccagcgggcctggtggacatcttttaataatcagtctttccattcaggtatatggtatatgtctccatttacttaggtcttatttcatatccttcaggttggagctatcatttcttttcatacaggttttgcacatttcttgtgaggtttataccttcatggtccatggattccgtagtgaattgggaatcctttttccaccaagtatattttctacatttgttactttagtatacaggaaagataactaatttttatctgcagtttataatctatgaacaggattcaaagtagaactactcagtaacaggttcca

SEQ ID NO: 536172 - DNA, 196 bp, Homo sapiens
cgatctacggtgtgaggatagcaatttaataaaaacccaatgccacccaatttacatcatgataatcaacctaaagaaaccagcaacaacacatttttctctgcgttctcttttacagctaaattctcaccttttcagtcgtagtcggttttaatattatcaacgtgttgtttttgaatcctgcagactgagacca

SEQ ID NO: 536173 - DNA, 145 bp, Homo sapiens
cacgccccaggagatttgggacccctcagggcatcagggggggtggtctggtccccattgcggccccgggaggggaatggtttttatggccaaagtttggttttctccacactgtctaaatttggattaaaactttgaactttta

SEQ ID NO: 536174 - DNA, 711 bp, Homo sapiens
  misc_feature (402)..(402): n is a, c, g, or t
tctttactttgtaaattacccagcctcaggtattcctttatagcaatgcaaaatggatgaatagtcttgatgccaaagccctacaaagatgctataagaaatctatggactaatagttctttcttttttttttttgagacaaaaagagtctcactctatcactgaggctggagtgcagtggtgcaatcttggctcactgcagcctgggcctccgtgggttcaagtgaatctcgtgccaaagcctcccaagtggctgggattacaggcgtgtgccaccatgcccagctaatttttaaatttttagtggagacggggctttgccgtgttggccaggctggtctcaaactcctggccttaagtgatccacccacctgtggcctcccagaggtgctggcttgtggncccaaggggcgtttggaagcccacaacgtggcgccctgtggcctatagactaacttcttaaactggatgtaaatctccaatacaaaccaattaacagcattaaaaggatttttattacaccagtgaccaataagcactgtgaaaagatactcaatggtggctaattaaggacaatgcaagtcaaaactccaagatgctacctcacacccattaggatggctgctatcaagaacagcagaaaataatggtgggcgaaaaaggggggggggcccaaaacccccattttttttgtggcggacaaaaaaaatt

SEQ ID NO: 536175 - DNA, 297 bp, Homo sapiens
agcagtggactcagctgaggccctgggcatggtgcgctggtgccatgggcctggaatgtttttgaaacatcctgtgaaatgagatgtgaaaacttctgaagcccctttccactgccttgccaatgcagttccaccatgctgtacctgtggagaatggtgtgatgtgttttcctgtgtgccctggcatgacgatgcttggatgcatgatctgtgctgcacaaccggagaagacagaattacctctgctcttttaatatataattgatggctttaaataaacattaggagaaaatgtcg

SEQ ID NO: 536176 - DNA, 273 bp, Homo sapiens
agcagcaggtaccagaatcctcttatatttagaagaggttctgtagagtgtgtgtcattgttttgaactgtgtcctggtaatttgccagtgaaaccatatggacatgctcaattatctgtattcttcgaacgcttatatatgacaaatgctgtatctctggttgtgagagaaccgttcatattagttcaccgcgagtcttggctgtgtggtgtttagtggcattggcttatttgagctaacttgtggagtgtgtgtgttgcagtgtgcttccg

SEQ ID NO: 536177 - DNA, 394 bp, Homo sapiens
gaacaaaaaaaaaggtggaagtctcactggtgtcacatatcaagagaaacaggatcaattcataattaacaatctttggttcctggcttatagcaaacaggttaaattggaagttggtaccggaattagtatattaactcctaacaaaactaaccaatgaaagttttattatcatctcctttttgtttgtgatgttggatacggagtctcgctctgtctctcaggctagagtgcaggggcgtgatctcggactaactataacctctgccttctgggttcaacatgattctcctgttgtagtcaccgagtgggtcggattataggtgcgtgcgcaccaccacctggctaatttttatatttttaggggggaccggggtttcaccatgtggggcat

SEQ ID NO: 536178 - DNA, 201 bp, Homo sapiens
tttggggctttggtttttttttcactcagcataattattttgagattcatccatgttgtttttctgtgtatcatagttcctttttaaaattgctgagtagtattcaattgtatggatatactaaagtatatttgttcctcaattaaaggacatttgggtttccattttggcaattatgaataaagctgctataacccttta

SEQ ID NO: 536179 - DNA, 761 bp, Homo sapiens
  misc_feature (738)..(738): n is a, c, g, or t
ggacccgctacacattcgcaacagccctcccagacacagtgcacattaggcgggtggaggaacggctactcagcctagggcaaaagtcaccacctgcaagtgactacgtggccttggtccacccagaactggacagggagacagaagaaatgtctggcagaagctgctcaagcatggaagtcgtcagacagacagtggccgagccaggtgctagtaggaagcatacctgatgtcagtcacgcaatacagggaggagcatggtcgcatcccaagacattcaattgaagaccaggatgagctgtcctctcgtcttcaagtcccccttgtggctggggacatgtgaaccgaggcagtgagtgtgattgcatgctgggatggtggctgaatgactggtgtgccattctgtggcctggacacaaccagcacagagatgtcagtggtggagagtagtcttcaagctgaatgaagcccagcctagcacgcatgtgccaccagcatgcgggagttccgctcattagacagcctcacctgagtgcaccttccaagttgttccatgggctcactggctctggactgtggccaaccttctccacattccgcccaatctgtaccggatgctggcagggaggtggcagagagctcactgggactgaggggcatgggcacccaacccttttcgcacctgtgctatcgcctggatctatcattactgcaaaaacctgctctgttgtgctagantacacgcgggtgctgctggactt

SEQ ID NO: 536180 - DNA, 715 bp, Homo sapiens
  misc_feature (239)..(239): n is a, c, g, or t
  misc_feature (362)..(362): n is a, c, g, or t
  misc_feature (443)..(443): n is a, c, g, or t
  misc_feature (651)..(651): n is a, c, g, or t
taaccagataacaactattccacaccaaatgagagaggagaccacaatagaacactggatcgatcgggggatctaggcgacatggagccattgaagggaacaacacccttgatgcagaagatttagcaccactatctccgttccatctgggcttatatgtacttttattttttggtggtgaaattgactgatgattttcctttttcttcgctggactattgtgccaactgccaggctgnctcctgcccttacagacctaagtgggtggcttctttccatcaactcccaacttcttcctgtgaagtttaattgtctcaacggctccccctcccccattccctccatttttctcccaaggaaanctgactcaattatttggatatttgagaaactgctgcagattagttctttttgggcagttttcccctgggaactcctggctntggtggagggggagggatggagagaataggaatcttcactaggagccgcgggaggattgggaggtaaaatgctgtttttgaatgtcaggaggcttgataactgaggatcttcatcaagtttttttcccgatgggaggggattttttacttttgggggaggtgactctccccttcatggtattgggggaagaggcagaaatggaaatcnccggaagggcccggtagtgagggtccaatggttaaaacggtcccactcaggagggcaaagacca

SEQ ID NO: 536181 - DNA, 141 bp, Homo sapiens
tctccgcgaccaggtcaccagtaccacccgttgacactcagctaccccggacggcacccaggaggcaggaggcagccgccccatctgccccacagtctccggcctctccagcctcagccccctacttcagtcccttcccca

SEQ ID NO: 536182 - DNA, 460 bp, Homo sapiens
ggttgctttgtgacactctgagaggaccctgcctcattttagtattgtatacagctgtaccaatccaaaagcaaaggtgtcactatctcagccactcatgtggaacagtctgtggttagtatgacatacactatcatacccgtctctgaattaatatagctacgtataaccaatcatttcttacacatacacatggcatagtattgcccttggtgggcatgcttgcgtaaggtatactctggctagtgtagaggacaaagatatataggccagctgaaggagggctaggccaagggtcttttattctcttggagacaacttgttgtacaccttgcattctagactattgattcataccacattaaagtctgggtagtaagacattaatgctactttgtagccatccatggtgggagctccacaaacagtttgggaatttcgccagcaatttggggatttc

SEQ ID NO: 536183 - DNA, 844 bp, Homo sapiens
  misc_feature (359)..(359): n is a, c, g, or t
  misc_feature (483)..(483): n is a, c, g, or t
tttttcccacctcgtgcttccccctttttatttcaagaaggtgccagccccaaacaaagttacaaggttaagtgcaactccaagtccctgacacagtctatccccgtgtctcggtccttcaaaaaattagaggtctctgtaattcctcctttttgtgaaccatgtgccttctcgaagtgtggaggctcttgggccatgtgagcctcttctctcgacctctcatctctagtgtgcccacgtggtgtgactccgctcagcctctccaaagtctctcccactctcgtgctctttgaaaggcttctgcgtctgtggtgtctctgtgcggggcatgtgcgcccatgtgaggctgtgcctccccngtctcatctccgtgctctcaccgtgcatctcatctctccggtgatgtgtggctcacggcgcgacatttatctctgtgtggccccccaaaatctcagcacagagttaaatgtgcctccgaaaccncccaaatctaccatttgtgcagagaagagttcacccgcgtgacatgtcccagaaacactctcaccccgaggagatgtgcccatctctctacctgtgtgtgcgagtataacgctctccgcaactctccccgtgtgactgtgtctaaacccatatcagccctttataaacaaacgccgcgcgagtgggtctccacgtgtggcgcacacgtgtggcggcgaacccccttgttgtggcctgtggtctgtatccaacacaccctccgtgcgaaacacatgtgtctcccatctgtttgtggaatcttccaatctccccaaccccaaatttacacgacacatctccatatagcgggaagggcaccatt

SEQ ID NO: 536184 - DNA, 434 bp, Homo sapiens
  misc_feature (50)..(50): n is a, c, g, or t
  misc_feature (120)..(120): n is a, c, g, or t
  misc_feature (286)..(286): n is a, c, g, or t
  misc_feature (333)..(333): n is a, c, g, or t
  misc_feature (382)..(382): n is a, c, g, or t
  misc_feature (399)..(399): n is a, c, g, or t
  misc_feature (428)..(428): n is a, c, g, or t
agaaattgtcaccaatatcagcaactctatggagtgcaggcctcccccanctgtgaagaggatcagcagaaaaaagatgagttgtagacactgatctgctaggcgtgtaatattgtaaanactggactcaggaacttttggtaggaaaaaattgaaagaacttaagtctcgaatgtaattggaatcttcccctcaaagtggagttgaaactgctatagcctaagcggctgtttactgcttttcattagcagttgctcacatgtctttgggtgggggggagaaaaanaattggccttcttaaaaagcgggtaaaaaacctgggttagggggggngttccccttcaaaatgttttatttaacaactgggtcatgggcatttggngtaggaagttttttttnccataagtgaccccaataaatgtttgttntttcca

SEQ ID NO: 536185 - DNA, 267 bp, Homo sapiens
gctgtggtttggtctacactggaaacactgtgttgcctggcgatagataagctgaccttcaattctccacgttcatgtttgtaatgtgggttagtgaataacacttccgtcccaagactgttatcaggattacgtgaggaaatgtatggaaagctcctgacacggtgacaagcaggaaccattattagatttaacgccactattcttaagatcagcccagggtgatactggactggagagggtcgcatcaggccaagccccatgtgt

SEQ ID NO: 536186 - DNA, 997 bp, Homo sapiens
  misc_feature (354)..(354): n is a, c, g, or t
tggaaaaagtcatggaggccatggggttggcttgaaaccagcttgggggggtctcgatccctccctttttggtctaaatttatatgtaatacgggttctctcgaagtgtggtggtaggggtggggggcactccatatagtcacctccaggtttatggagggttctctctactattaggactttctcgcttcgaagcgaaggcttctcaaatctttgaacattttttaattatttacgtgcgtgcttagaagaaaattgaagtgagcctacagattgattaggcagtgtttccagtggtgggtgttagtgccactcggggatagtctccgagttaacgctcggggcatcccggantaggccgagaaaagtctgtttggtggggcaagcaaacgcttaagatttacgcccgttaaatttgcatagctgcacaagtggcatttgggccgtaggattgggcctagggggttacccgtgagaaataggggcacacactcagctgaaatgaagcctcctatgagtggccaaattacagcctccctatttgtacatgggaccattaggtggcaacgtgtgggcatacaagcgttatcacacgtgtgctcggcgttaagtcccgagtgttcataggtgactgacgcttggtgcctaaattcacaagttgcccagtctcaaggcccccaccatagcgggctgaaacacgcaaaggcattgaactccctagggggctccagaaagcacttgcacgacaagattccatttccatatttggctcacgccgtgggaagtgtttggcacgaagatacacgcttaaatttgccgagaagaaaactagtttctccgaaagggaccactcctattgtccgggggtggcgggaccacacacagggttactctgcaaatggtcgccccattggctcactagggtgtttttcccgggaaccccgagattttctttggtcacacaatggtggctcaagcatcctgccgggttccccct

SEQ ID NO: 536187 - DNA, 204 bp, Homo sapiens
cgatggctcacacctgtaatcccaaagtgctgggattacaggcgtgagccactgcgcccccgcccaggagctcttttcttatgacatataaattatgacatttatattctttatatgactttatgttctcttcttatgacattaaaattctttaagtagtttgttggtccaataaacaaaacagttgtatatctaaaaaaaaaa

SEQ ID NO: 536188 - DNA, 896 bp, Homo sapiens
tggtaggaggtgggggtataaaaggaaagtggcatacctcttagtcataagtactggggatagatatgcaattgagatctgattttaagtcatttttaagaatttgctgttttgaggccagcatctttcctgctaatctgtgatgcccttggccaatacagatgttggtgcatgtagacaatgaagcatcaatcaaccaaacaaccctggagctgagcacaaagagtcatgtgacggaagaggaggaggaggaagaggaagaagaatcagattcctaaaggagggggaaagccaggctggtcagttatacaaattgcatttctaaggctcaggctacttctcctcaaggaaatcatcttgccctgggccctgtgatctgcttgaaaggaaagcaagaactataaggaggatgtgtagttgcaaaaatggctccatcggtaactcaagcttcagaatgttatgacatacagaaaatcaaagatgctgtgtcttagcattgagtaatatgggtggtgctgtctgtaatctggtcagattcagttaactgttcagaacaaaatttcctctgaaatactgttgagaaagtctgtcatttgcaaaaagagcagagtttaaatacaagccagtctttccagtcaacaatgcctctttgaagaaaaccaattaaagactgtttgcatgccgctgaacccttgtgagcagttaggacacagtctaggacagaaagatgacaaggggaaggactgagggccatctgagagcacaagctgtttctacctctcagaggcattgaaatattgcatgctataaactgctttgtgtatctgttaccacctctcacttgagacatcactcactggtaaaatgttttataaataaattataagtagccatca

SEQ ID NO: 536189 - DNA, 694 bp, Homo sapiens
  misc_feature (363)..(363): n is a, c, g, or t
  misc_feature (365)..(365): n is a, c, g, or t
  misc_feature (489)..(489): n is a, c, g, or t
  misc_feature (491)..(491): n is a, c, g, or t
  misc_feature (512)..(512): n is a, c, g, or t
  misc_feature (527)..(527): n is a, c, g, or t
  misc_feature (586)..(586): n is a, c, g, or t
  misc_feature (612)..(612): n is a, c, g, or t
gcacgaggtagtgttcgcctatgtggaaacaacagcaaactaacaccaagtgccagagtcctggatgtgcaattggtttaagtgttcatgttctagtgaacacagcttgttcaggaacaaacactaaaacgatttgagtagaggctgctggtcaccttttgtgacctgaggaatcccaggcctgtgagaaaagcagaaattcacattgcagtacatgatgccagaaatagcactgaatcaagtagccattgcggagctgacctcttgagtctttctgtccatgccattctattctgtactgtgactctagttcaggaagttttggtatgagttttaaatccagttctaaggccttatcacctncncttggcataggccaacaaccatagttcctcacatttagtgatagcagactctttgtggacgagtgaattcacatacagcacaatttcagaagaaatcagggcacatgctcctacttttcttctntngacgcatcatcctgtgatgtngaaatgtcaattgangatgctgatgttgtgacgtcatcactggcacttgatactctatgaacagttgacttcgntactgcctcttacttgccttgttgtngccactagatttcttgggcactgcatagacttgatgttgcacacgtgtcgagtatcttctcactctcgcgtgttcgtcgtcg

SEQ ID NO: 536190 - DNA, 1419 bp, Homo sapiens
agaggatcccctatttattgtttggaccgagtgccgggccgacagcagcccggaggttggctatgtgaccaggcaacatgctgagccggcttcaggaactgcgcaaggaggaggagacgctgctgcggttgaaggcagccctgcacgaccagctgaaccgcctcaaggttgaagaattagccctccaatcaatgatcagttctagaagaggggatgagatgctgtcttctcacactgtacctgaacagtcacatgatgtaagcttaatcaagtgcaggcctaggagagaatgcaaagtctgctctgctcccatgctgcttgggtggtgaagaactgttgtaaatcacattacctagcccaaagggctctgagaagtgctgataacagttttctggtttaataaggtggcaactctccattaaccaccttcctaccagctagttatacactaattaattaagtagttactaatgttttacctccatcctcctcgtcatccattctgtctagttactcagatgaacccgggggagagtggagatttttgtaggacgatgtcaaaactcttgattttttgtgaataagtaaccttgagattcaagagtgtggcttcaagtacaaggcacagtgctaaaagatgagctccagttctcatcatactcatctcttaccaaatgccctcaaatgttggtgcatgtagacaatgaagcatcaatcaaccaaacaaccctggagctgagcacaaagagtcatgtgacggaagaggaggaggaggaagaggaagaagaatcagattcctaaaggagggggaaagccaggctggtcagttatacaaattgcatttctaaggctcaggctacttctcctcaaggaaatcatcttgccctgggccctgtgatctgcttgaaaggaaagcaagaactataaggaggatgtgtagttgcaaaaatggctccatcggtaactcaagcttcagaatgttatgacatacagaaaatcaaagatgctgtgtcttagcattgagtaatatgggtggtgctgtctgtaatctggtcagattcagttaactgttcagaacaaaatttcctctgaaatactgttgagaaagtctgtcatttgcaaaaagagcagagtttaaatacaagccagtctttccagtcaacaatgcctctttgaagaaaaccaattaaagactgtttgcatgccgctgaacccttgtgagcagttaggacacagtctaggacagaaagatgacaaggggaaggactgagggccatctgagagcacaagctgtttctacctctcagaggcattgaaatattgcatgctataaactgctttgtgtatctgttaccacctctcacttgagacatcactcactggtaaaatgttttataaataaattataagtagccatca

SEQ ID NO: 536191 - DNA, 201 bp, Homo sapiens
gaccaaataggagtgcctccaggtatccctttcctttttcccgtctatactagggaatgtcttccttcctatctatctgcgaaatggaaatctagcactccttcttcatccataagtggactgtggcagtacaatacatggctcagaccccaagactagaaggagctctagtctccttcctgtgtggaatctttcccactc

SEQ ID NO: 536192 - DNA, 333 bp, Homo sapiens
tggattttcctcgttctttcattggaactgccttgtcgcttccaattgctccccgtcggcattctgtcatgctgcttcgtggggataatttatcatccacgtctgtgctattctacagcagccatgtccttagaacatagaaaatctgattggccaaaaaaaaaaaaaatagtgccacaagtgtgtcaatttcaatacactcaggcaaaaaactgttctccattttggcatttgtactgattgccccctaaaaattgtttttctttctttggcctttagcaaggcccagccagaggcagagaacggggttgacactttgcttccagaggggtc

SEQ ID NO: 536193 - DNA, 126 bp, Homo sapiens
gagtatgagagaagttagttggttccctacaggtgcactgaaacactccagcaggaccttctgggatctggggagcactgctgctaattattaacagcagtcagggccagtaaagacctatcctgc

SEQ ID NO: 536194 - DNA, 733 bp, Homo sapiens
agaggatcccctatttattgtttggaccgagtgccgggccgacagcagcccggaggttggctatgtgaccaggcaacatgctgagccggcttcaggaactgcgcaaggaggaggagacgctgctgcggttgaaggcagccctgcacgaccagctgaaccgcctcaaggttgaagaattagccctccaatcaatgatcagttctagaagaggggatgagatgctgtcttctcacactgtacctgaacagtcacatgatatgttggtgcatgtagacaatgaagcatcaatcaaccaaacaaccctggagctgagcacaaagagtcatgtgacggaagaggaggaggaggaagaggaagaagaatcagattcctaaaggagggggaaagccaggctggtcagttatacaaattgcatttctaaggctcaggctacttctcctcaaggaaatcatcttgccctgggccctgtgatctgcttgaaaggaaagcaagaactataaggaggatgtgtagttgcaaaaatggctccatcggtaactcaagcttcagaatgttatgacatacagaaaatcaaagatgctgtgtcttagcattgagtaatatgggtggtgctgtctgtaatctggtcagattcagttaactgttcagaacaaaatttcctctgaaatactgttgagaaagtctgtcatttgcaaaaagagcagagtttaaatacaagccagtctttccagtc

SEQ ID NO: 536195 - DNA, 242 bp, Homo sapiens
gtgtgtgtgtgtgtgtgtgtatctatataaatctcaaaaataaaagatcatttttgagattatcattttaaaagacaagataatgttcaacttaatgactaatttaattattactattggactttttgtagactaaacagggcattcaaacaaatgaaggggataaaaaatatgtattacatgttgtaatataaatgtgatgtggttaactcttatattcaaagttatagcacatatatatg

SEQ ID NO: 536196 - DNA, 659 bp, Homo sapiens
agaggatcccctatttattgtttggaccgagtgccgggccgacagcagcccggaggttggctatgtgaccaggcaacatgctgagccggcttcaggaactgcgcaaggaggaggagacgctgctgcggttgaaggcagccctgcacgaccagctgaaccgcctcaagatgttggtgcatgtagacaatgaagcatcaatcaaccaaacaaccctggagctgagcacaaagagtcatgtgacggaagaggaggaggaggaagaggaagaagaatcagattcctaaaggagggggaaagccaggctggtcagttatacaaattgcatttctaaggctcaggctacttctcctcaaggaaatcatcttgccctgggccctgtgatctgcttgaaaggaaagcaagaactataaggaggatgtgtagttgcaaaaatggctccatcggtaactcaagcttcagaatgttatgacatacagaaaatcaaagatgctgtgtcttagcattgagtaatatgggtggtgctgtctggacagattaaggcaacagggcagaacaaaatttccattggaaacttgatgggaaaggttaaatttgtgaagaaaccatttctggccttctatccatcttgtgaaccctcgcagaagttgtaaacagacaag

SEQ ID NO: 536197 - DNA, 121 bp, Homo sapiens
tgcggggactacaggcgtgagccaccagtacagccctggtttaatttcctaaggctctggctcggtcacccaggctagagtgcaggggcacagtcatagctcacggcagccttgaactccg

SEQ ID NO: 536198 - DNA, 670 bp, Homo sapiens
  misc_feature (436)..(436): n is a, c, g, or t
  misc_feature (470)..(470): n is a, c, g, or t
  misc_feature (504)..(504): n is a, c, g, or t
  misc_feature (552)..(552): n is a, c, g, or t
  misc_feature (640)..(640): n is a, c, g, or t
  misc_feature (648)..(648): n is a, c, g, or t
agaggatcccctatttattgtttggaccgagtgccgggccgacagcagcccggaggttggctatgtgaccaggcaacatgctgagccggcttcaggaactgcgcaaggaggaggagacgctgctgcggttgaaggcagccctgcacgaccagctgaaccgcctcaaggttgaagaattagccctccaatcaatgatcagttctagaagaggggatgagatgctgtcttctcacactgtacctgaacagtcacatgatatgttggtgcatgtagacaatgaagcatcaatcaaccaaacaaccctggagctgagcacaaagagtcatgtgacggaagaggaggaggaggcagagtaagatgaatcacattcctaaagtagggggaatagcaggcttttcagttatacgaattgcctttctaagtctcacgctacttntaaagccaatcatcttgctctgtgcccctgcganctcgttgaacgtaatgcacgaactctaaggtggnagatgggccccaaaaatgactccatccttaactcaagcttcacactgnaaatcccatacattatttcaaagcctgctgttctttaccatcgggctatatgaatgagtccccgcccctcaggcccacggccaccggntggattanactcacctcctaaacacagcct

SEQ ID NO: 536199 - DNA, 137 bp, Homo sapiens
aaatcatgaggaggtgtgatgggaacgtggtgggtgaaagcagaggatgctggagccctcgaggagaagagacacaggctggggcagcaggggctgggggcaggacacaatcactgctcagacttctccaacagacg

SEQ ID NO: 536200 - DNA, 765 bp, Homo sapiens
  misc_feature (304)..(304): n is a, c, g, or t
  misc_feature (609)..(609): n is a, c, g, or t
aaccccacacccttgggggaccccccaccccgaaatagagagcacaagagccacaccacaacgggggggaacacatagagggtgacaccggcgaaaaaggggggctcaccccccaccacttaggccgcccgcagttgttgctcccagcacagagaagaggggtgctacaacacatcgcggagatcgtagagagagaggacatatagacagagaaagtgtattgttgcaccaccccggcccatccgtggtctccccacgagaagagtgtccccctcgtggtgagatactctctaaagaaaaaagnagtctcgcagtctctccgccacccacagtgtgggtctcacacacaccgcctgtgtcaccttaacaaggttgtgagaagggaggagataatctgtgtctctctcaacacacacacacgcgggagtttctttctccacttggtgacacacacacactctccccccaacctggtaggagcacgacacaggcgccccgcagagagatctctcgggctggacccacgctgtgggccgcccggtctgtaggacccacgaggaagacacacgcacaggagcgcccgctcgagagagacacccctccccgcgnccccaaagagaaagagaatactcttccagcagattttatccacacaagaagggaaagagagaccccggaaattaaacccccccccttttttttataaaatggcccctttggttaaaaaggcgcccccccttaaattaccaccccctttttttccca

SEQ ID NO: 536201 - DNA, 645 bp, Homo sapiens
agaggatcccctatttattgtttggaccgagtgccgggccgacagcagcccggaggttggctatgtgaccaggcaacatgctgagccggcttcaggaactgcgcaaggaggaggagacgctgctgcggttgaaggcagccctgcacgaccagctgaaccgcctcaaggttgaagaattagccctccaatcaatgatcagttctagaagaggggatgagatgctgtcttctcacactgtacctgaacagtcacatgatatgttggtgcatgtagacaatgaagcatcaatcaaccaaacaaccctggagctgagcacaaagagtcatgtgacggaagaggaggaggggtgactggattcttaagaacgttctgaaagactctacatcataggcctggcagatttttcaactggatttccaagactctgttcttgttctgagattctctgaagaatcaaacaaactgttgcttgagctttatgtgggcaacagctatgagatcagaacgctgctgagagaattgccaccaagccttcccagttatcataaccttgaatggccactagatgtacagtttgcaagtatgagcattcaggcaccagattaaacccggagtgactatatagatccaccttactcattgggt

SEQ ID NO: 536202 - DNA, 415 bp, Homo sapiens
  misc_feature (16)..(16): n is a, c, g, or t
  misc_feature (36)..(36): n is a, c, g, or t
  misc_feature (38)..(38): n is a, c, g, or t
  misc_feature (47)..(47): n is a, c, g, or t
  misc_feature (233)..(233): n is a, c, g, or t
  misc_feature (325)..(325): n is a, c, g, or t
  misc_feature (343)..(343): n is a, c, g, or t
  misc_feature (351)..(351): n is a, c, g, or t
  misc_feature (402)..(402): n is a, c, g, or t
  misc_feature (414)..(414): n is a, c, g, or t
taactctttttttttntgagaccgagtctcaataanantaataatanaataaaacaaataataatttccaaaaaagaggctagcaaggtgctagcaaggtgctccatgtctggggcagcctgctcaccaaggcctctcctgagcttcgttctccatccaacagctcaacaactttgggatttgctgacctgggccctcctggtccaccctggtcctacagaacttctcacacntcattcccttccccatgatggaccaagaaaggccccgtcctacccgcagccctccccgctgcgtggctcctctctttagagggtaggcagancaacgggcctagaagagntcaagtcncaatccctggagccccataaataagtgaactttaatcttcataggatgtcntgaagtttaacna

SEQ ID NO: 536203 - DNA, 401 bp, Homo sapiens
agaggatcccctatttattgtttggaccgagtgccgggccgacagcagcccggaggttggctatgtgaccaggcaacatgctgagccggcttcaggaactgcgcaaggaggaggagacgctgctgcggttgaaggcagccctgcacgaccagctgaaccgcctcaaggtgaccccgcggccctctcctgcccctcctccattcctcccgagcgaccatttccccccaacctgggcctctgtggtgaccacctgctgcggccagcttctccgctactcactagctgtggtggcgccaatttagaggtttacaaacaaacaggtatctgaatcacctggggagtttgctgtgcgcttcttaggccctatctttcagaatcgtgacctcgcaagtctagggtga

SEQ ID NO: 536204 - DNA, 237 bp, Homo sapiens
ggagtcgagggagcgggagatggagctgcgggtgaggccctggaggaggagcggcggaggtgtgagcaggtagaacggagggtgcagagtgagacgtgcccggaggcagcagctggtcgagaaggaggtcaagatgcgggagaaacaattttcccaggcacgacccctgacccgttacctgccaatctggaaggaggactttgacctgaagacacatattgagtcatcgggccatgg

SEQ ID NO: 536205 - DNA, 969 bp, Homo sapiens
acagaatgatctcttctccttggctcgagctggaatcattagccactgtagaggttctaaaagtcatggaggctttgtgaatgagcccaattatactgtatggagcgacctgagtctgtaacctggggattctctcaaatctctgtgtcccatacagacttctatgaggaaatccaggagttgtgaaagatgtcttttcaccttatagggggagagtaatggcgctgcgcgtacccccaatacctggaaacaatggtccatcttctgcatgctaccttccatgtagagggcttgtgttctgggatacatacttagggaacaagccagggaccattacaggcaaccgtttatcaagaatcccagtccgtccggttttaagagcaccaactgtcggaaggcaacccactagattctctcctgctgtatctggtgcgagtcctgtctaatcttgatctgttattctgatacgccatgtgtgtaatgggtgacttgaactttagattatttaatagtttaaaagcctctcgataaaacctacaggcagactacttgtcacctgaaaggagcacacagaaccgcgagattcggaaagagctccttgtgactgactcaactccttcttgtcctggaacctgtattgcaacaacaggctcctcacgttttgtcacttatcacgaagaggtacgtccacaaggacactgtattggtaattggtgggagtagcgtggaggcaagcaagcatggtaggaaagcgtgtttggaagattcatagatggacaactgggaagaactttattatccggagtacagggaggattctttaatatccagactaataaatgctatcaagtagagggatttgccgttgataaaattggtggagagttaagggttgttcgaaagtacccattctttagtgagcttagcatcacgtgttgggaattttgggaagggtggtaagaaagtgag

SEQ ID NO: 536206 - DNA, 460 bp, Homo sapiens
agaaagggcattgcctctataagtattatacgtgattatatgatttggctatgaatgagtcctcttaacacaacaaataagatgtactgtgtaatccaccccattggcttcaaatgggcaaaaccatctggtccactcaattaattctaaggctcttggtatcactgagccagtgtctttgaatacatttctattcaatgggcatttacactggatacttactctcaaggttcccccttttaccctttcctctgcacaagcttcctacatgttaccatccctcgccccagatacccacaggtgaaggggactggaagcccattaagctagtagcatctcatttggcatttcacttgtttcattttattccagaaggttggtctgaaagcgtaatgacaacaaaagcagcagatttgagagattctcccaggagaaggaaaagggatgtctttcagaggta

SEQ ID NO: 536207 - DNA, 658 bp, Homo sapiens
  misc_feature (241)..(241): n is a, c, g, or t
  misc_feature (246)..(247): n is a, c, g, or t
agaggctagtggtggtggtggtggttgtggggagaaggaggagctggatgtgagtggcagtgtgctgagtggagtgagtgaatgctggacgcgcgagggaggggagggaatgtgtgaatggtgaatgtgtgaatgtgtgtgtgtgtgtcactgctgtgtggtgctgctgctgctgctgcacctgtgtgatgctgctgctctgtgatgtgctgatgttgtgaacttgtgactctgtgtgttnttgcnnttgccatgctgtgctgtttgatggctttctgtgccctgccagtatattaacaaggcaatgcgttcccaatctcttgcttgcccttgtgaacaactattgtgggattgccattgcttgattgccaagctttgcttgttttttccccccttgctagagccccccttgatttaagcccaggttcctgttgaagcgagtggtggaagttttttcccttccgccttggccccttttctaagtggccgaccccgaggaggctggtgttggttggaagatcggcaattttccttttccctttttaggctggccaaccacagtaatccaagatttttggtcggccccttttaaagcccaattgggcaaacgaaagccgtaagttttgtggtttttccaaagcaattttggggtgcggaa

SEQ ID NO: 536208 - DNA, 171 bp, Homo sapiens
cagcagttgcaagtgtgtttttaaagggaaaaacaagagacacttttttgttgtttttgagacagaatctcagtccgtcacccaagctggagtgcagtggcacgatctcggctcactgcaacctgcgcctcttgagttcaagtgatattcatacgtcagcttcccgagtag

SEQ ID NO: 536209 - DNA, 404 bp, Homo sapiens
aagaggttgttctctcaggaagttgcctcctagcctccaacgaggcctttcctatcactgctcattctcttctgtgtgtggattggatactgcggtcacccagagaagctggtgcacaccaggcacatgaaggggcgatccttgtctccttccgactcatgcgcgtgtcttgatgtttaaactcagaaggatgtttaaactcggttgtctatgagacaaaatggctagtttttggagggtctggggcattacattctgcagattaagatttttgcccgatattggccaagtcaaggaaatagatgctaaggccaaatgctttgaaaaaccacaaactcctgtttctgtgggaaatgtttggcctgttgaatcaaactcaataaagaccagtaaaatctgtaaaa

SEQ ID NO: 536210 - DNA, 729 bp, Homo sapiens
ggaagaaatttacaaaagaggcagggagggcgtttactgagaaggtgactgatgaatggaagtgaacggaaggggcatatgcagtgccagtgtgctcatcagtgtggaaagggcctggaggtggaagtggatcatgcacatgtgcgtgagatgtggagtttgcagcagcaggctgaatgggtcacgagagtcaatatcgtaaagccagcacagccgcgggctcatagctcgatgaattttcatttaatttatttaatttctgacgacacgaagtctcccgtcatgtatgccgcagggctggagatgcacgtgcgtgtgaccgtcagcatcacgcgcagatgacccccatggagttcacagcgcattcttgatgcctcaggactcccgacgtacgctggcgattgcagggccatgcagccacgcacagctcaagctaattcaaagatgtattactacgtagagatggggtctacgcatgctgcttggcgtagactggtttatgaacatcctgctcatcaagctgatccgcgctgcctataatttcaatataagtgactggggtcctgttctctcacaccaggccttgaagtaccagtggcactgaactacttggctcactaggcatccttgacactccatggtgtatcacagctatcactccatgcacttgagcccaaggagttagctacgccattgagccaacaacggccccagatgatatacagaata

SEQ ID NO: 536211 - DNA, 269 bp, Homo sapiens
acaagtgtttcacctgttggctggtcacacaaggagtttgcattttgacgggcctgggcttcaatggttttgaacaaaagggcaaggcaaagggggatgcctgtgccaacatcaaggtgtgggtttttaaaataaaccggggctgtactggcaccattgcttaatttgacatcaacaccaacgcctgggtgggccgatacatcttgaaacgactcatgttccttggaaataaagaactctctcatgcgctctggtggttattcctggcc

SEQ ID NO: 536212 - DNA, 761 bp, Homo sapiens
  misc_feature (251)..(251): n is a, c, g, or t
  misc_feature (253)..(253): n is a, c, g, or t
  misc_feature (302)..(303): n is a, c, g, or t
  misc_feature (329)..(329): n is a, c, g, or t
  misc_feature (331)..(331): n is a, c, g, or t
  misc_feature (336)..(337): n is a, c, g, or t
  misc_feature (436)..(436): n is a, c, g, or t
  misc_feature (451)..(451): n is a, c, g, or t
  misc_feature (469)..(469): n is a, c, g, or t
  misc_feature (480)..(480): n is a, c, g, or t
  misc_feature (491)..(491): n is a, c, g, or t
  misc_feature (515)..(515): n is a, c, g, or t
  misc_feature (647)..(647): n is a, c, g, or t
  misc_feature (761)..(761): n is a, c, g, or t
tcatatactggctaggtacgaggctgggtggcggctgaggggatgcgggggcgggcgcgatggcggaggcgggccacaggcgccgcgcccccgggcactccaagccggcacgaaaagagcctgggactgctcaccaccaagttcgtgtcccttctgcaggaggccaaggacggcgtgcttgacctcaagctggcagctgacaccctagctgtacgccagaagcggcggatttacgacattaccaatgtttngnaaggtatcgggctaatcgagaaaaagtccaagaacagcatccagtggannggtgtggggcctggctgcaatacccngngaganntgctgacaaactgattgagctcaaggcagagatcgaggagctgcagcagcgggagcaagaactagaccagcacaaggtgtgggtgcagcagagcatccnggaacgtcacagagngacgtgcagaacagctgntttggcctacngtcactcatgnaggacatctgcagatgctttgctnggagataccctcttggccatccgggccccatcaggcaccagcctggaggtgcccatcccagagggtctcaatgggcagaagaagtaccagattcacctgaagagtgtgagtggtcccatttgaggtcctgcntggtgaaccacggagcgcttggctgctcaccccctgtggtgttgctgtgccaccactgaagatttgctcacgaaaccatctgctgttctacacctccactctggccagctggcn

SEQ ID NO: 536213 - DNA, 1209 bp, Homo sapiens
  misc_feature (251)..(251): n is a, c, g, or t
  misc_feature (253)..(253): n is a, c, g, or t
  misc_feature (302)..(303): n is a, c, g, or t
  misc_feature (329)..(329): n is a, c, g, or t
  misc_feature (331)..(331): n is a, c, g, or t
  misc_feature (336)..(337): n is a, c, g, or t
  misc_feature (436)..(436): n is a, c, g, or t
  misc_feature (451)..(451): n is a, c, g, or t
  misc_feature (469)..(469): n is a, c, g, or t
  misc_feature (480)..(480): n is a, c, g, or t
  misc_feature (491)..(491): n is a, c, g, or t
  misc_feature (515)..(515): n is a, c, g, or t
  misc_feature (647)..(647): n is a, c, g, or t
tcatatactggctaggtacgaggctgggtggcggctgaggggatgcgggggcgggcgcgatggcggaggcgggccacaggcgccgcgcccccgggcactccaagccggcacgaaaagagcctgggactgctcaccaccaagttcgtgtcccttctgcaggaggccaaggacggcgtgcttgacctcaagctggcagctgacaccctagctgtacgccagaagcggcggatttacgacattaccaatgtttngnaaggtatcgggctaatcgagaaaaagtccaagaacagcatccagtggannggtgtggggcctggctgcaatacccngngaganntgctgacaaactgattgagctcaaggcagagatcgaggagctgcagcagcgggagcaagaactagaccagcacaaggtgtgggtgcagcagagcatccnggaacgtcacagagngacgtgcagaacagctgntttggcctacngtcactcatgnaggacatctgcagatgctttgctnggagataccctcttggccatccgggccccatcaggcaccagcctggaggtgcccatcccagagggtctcaatgggcagaagaagtaccagattcacctgaagagtgtgagtggtcccatttgaggtcctgcntggtgaaccacggagcgcttggctgctcaccccctgtggtgctcgtgcgctcgtgtgcccacacatctgaaacatgcgctccagagcccatctggctgtttactacacctacacaccttcgtgccccagagctctgccctctaggcccagttcccagtgcaagctctacacgttccaaattaggtcctcaagctcaactcccatcttgctgtcccctgggcagtgcagaagtccacggcaatggctggcccagcagctgagatcacagttgagtggcggccctgggcactgatagcaaggacacgtggtgagctcagttcactcccactgggacccaacaacactggacacccggccactgcagtcttctgcccttgctggacagcagcacgcagccagcaggcagcagcaggcagcagcagcagcaaccagtaaacagcaagcagttcgtccggacccaacccttctacctcctttgagcccatcaaggcagaccctacaggtgtattcggaactccccatagagctgtcagaaatctttgatcccacacgagagtgcatg

SEQ ID NO: 536214 - DNA, 159 bp, Homo sapiens
tcattttcttttcaatgcatcaaacaactgtggccagtgcaacaggcaaccaaaactggcagtttgtccatttgaatatcagcacctcagtttcttacttaatttcccacactatttctcccgatattccgttaaacttctatggccatccttcatgcg

SEQ ID NO: 536215 - DNA, 217 bp, Homo sapiens
atccggatcaggtgcaccgctcgggagggaaagaaatcaacacaactgaaattaaggaagagaaatgcaaaagcagactgcaggaatcctgccccttccaccccaaggggcacagcccggagataaagcttattttagggatcacaagtgcacgctctgagtagacgagaggatgactttgtcagtcttctggctagaagggcctatgtccaaaagt

SEQ ID NO: 536216 - DNA, 329 bp, Homo sapiens
caaccatatttaacaaatggctggtagagctcagcccaatcctatatgatcaaagactggtagagcctaacccaagcatgtcatctaagactggtagagctaacctcaagcatatcaacaaagactggtagagctaaccccaagcatataaagcgaagactggtagagcttatcccaagcatatcaacaaagagtgggaagagctaatcaacaacgactggtagagctatgcccaagcatatcaacaacgagtggtagagctaagccgaaccatatcgacaaagagtgataaagttaatccaaaccatgtcgacgatgactggtaaagc

SEQ ID NO: 536217 - DNA, 273 bp, Homo sapiens
cgacccgttctactcgccagtgggctgcggtgatacgcaaccgagacagagctctactgcctctacagcagatagcttctggagagcgagctgccgcgcacggggctggagtactgaagctcatcccttgagttcttcgaagcccggaatgaaggaaccccctctgcatgctgctgctcatcgaacacctggccttgcgggcccggaactacgagtatctgatccgcctctttcaggagtgggaggctcatcggaacctgtccccagctccct

SEQ ID NO: 536218 - DNA, 160 bp, Homo sapiens
tgtctctgaggatccctcgaaagagcgagggtggtctactctgcaggatgctgcagtccggtccatgcagcccgctctgggggaatgcttctctgtggactctcaagggcgttaccgtgggctcggcccataccagctggtgtcctgtcgtgtcggagga

SEQ ID NO: 536219 - DNA, 957 bp, Homo sapiens
tgctaaatatatcactagcattgtcttagagaggaacacttggtcatcatttggtggattacctacgatcttatacgaactggacgacagtcatattaagcctactcgtatggtagcaaagtgtgacatcgtaatatgactgtgcattacgtcttctagggacggccgtgtccgtatataacggcacagctatgctctttacatgacattatcccaagcaagtccaacacgctggagcaaatgaccattcacatgtactcaacctgctagtatacctaccactgctttgtatccttgatcggatctagccgcgatatccatatatcaggcaatatgatggcggaagagcaaaacaggattgccgcatacattggattctgatcacagtcctggcagatttcacacgggaaccgcgtgatctttggacaagcgtcgctaagccacgaagtgcatatgaattctagagcccgacgtgcctactattttgcacactacgcactgttggctttaaagatcgcgccaggttagcaatcggagatagctggagatccatacaggagtttccttatacttgtacatgtgaccgttacagattgcagacggcattgggcaacatcgtgtgcaatcgcgtgtcaaactgtctacacagggtagtggctaccagtgtatggtctcgccttgaatcaaaccgggagtacttgagccggtctacgaccccaggtaatgcccctggaacacagtttgtcaggatctactctaccgggaatggccacatccgtttccgtgatcaggaactatcagtagcccacggttgtctccgaggatataccctgggttaacccgttctagccccccaccgttcccatttcggcttcccgctatccgtacgaagagctatctaagccgagtgtactaaggacgctgcacgattttgggccttcacactctgtctcgggc

SEQ ID NO: 536220 - DNA, 729 bp, Homo sapiens
agaaaggacggaccgtcatctggcgccccagatataacttccagcgacatccgatcgacaacaagggtgttccgcaaaccaactgagcaccgaagatggggacacctggtggaggatggaaaggctcgctccatccagaaaattctcgagactattgataaataagcaccgtagtgtagaaactgagtaaatcccagcacccaaaccctttgggaaatctgccgtgggccctcccagatagctccatttccattaagtgttttcccccccaggtagaatttgccagagtgaccacatggattgccatttcttttgggggagctttcttttggtggttttgtttattataaccctcttaagtgtttccaacccagggttgcttttgttttgagttactggggttatttttgttttaaataaaaataagtgtaccataagtgtttttgtattgaaagctctttgttatccagattttcatacttttaccctccctggctctttttaagattgatacttttaagaggtggctgatattctgccaccctgtacacataaaaaatacggtaaggatactttccctggttaaggtaaagtaagtctcccgttggccccccttagctataatggcactttgtttgtgttgttggagaaaagtcaccttgcccttaactttccttgtctgtttagttaatattgtgaagaaaaattaagtaccgtgtgagatactga

SEQ ID NO: 536221 - DNA, 478 bp, Homo sapiens
  misc_feature (463)..(463): n is a, c, g, or t
tctcactgagcctggagctgggcagcaggagcatttcttgtgtctgtccccccagtgctgagtatagagacactctagaagttggctctggttcttcctcccagcatcatgttcccagaaataagactcagactcaaaatatatttacaaatgccttagccatattgctaagctcttttctggctagatcataactaaagataacccatttattttaacctccattctgccatgtgggtgcttacctgtgctgaggtaccaagcacctgtctagttacatcttcctgggcaaatctcctacctctggctctattccagaatcctttctgcctcctggatgtccctccttgcatttcctgcctaagtcacggccatgagccttttgattgaatcggtacaatacagaaggtatcttctccatagataactcagtcattcccagcttcttattaatagggaatgnaacttgagtcctatg

SEQ ID NO: 536222 - DNA, 503 bp, Homo sapiens
  misc_feature (210)..(210): n is a, c, g, or t
tagagtcgatagtcattgtgggtgagcatcactgaatcaggacgatgctgtcgtgcggcagaggatagagggggagcaagttgaatgggacgtacatggagggaattgaaggtttcaaacatgatctgggtcatcttctccctgttggccttgggatttaggggaggctctgtgagcagggtggggtgctcttcaggtgctacacgcagntcattgtagaaggagtggtggcagatgttctccatgtcatcccagttggtgatgatgccgtgttcaatggggtatttgagagttaggatccctcgcttggtctgagcctcatcccccaaatagctgtctttctgggccattcccaccatcacaccctggtggcgagggctggccacaatggaggggaagacagcccggggggcatcatctcctgcgaagcttgccttgaacaggccagagccattgtcacacacgagcgcggtggtctcctcttcacacaatggcacgtggat

SEQ ID NO: 536223 - DNA, 481 bp, Homo sapiens
ccattatggccgggggggcattcctgaagctgacatcattcggtccgagatgtctcgctccgaggccttaggtgagctggggctactctttatttctggcctggaggctatccagcgtactccaaagattcaagtttactcacgtcatccagcagaaaatggaaagtcaaatttcctgaattgctatgtgtctgggtttcatccatccgacattgaagttgacttactgaagaatggagagagaattgaaaaagtggagcattcagacttgtctttcaacaaggaccggcctttttatctcttgtactacactggattcacccccactgaagttaagtgggatcgagacatgtaagcagcatcatggaggtttgaagacgccccatcttgattggaagaattccaaattctgcttgcctgctttttaataattgatatggctatacacttacaatttatgcacacaatgtagggtataaag

SEQ ID NO: 536224 - DNA, 150 bp, Homo sapiens
attagtgatgtcatcgacacatgcctgtctgatccataacatctacgatcgcgaccaatttggcggggcatgaggtccaaaggagacataggcaaccggacaacctccatgaagcgcctgaacaccatgttggcgcgtaagggccagcag

SEQ ID NO: 536225 - DNA, 449 bp, Homo sapiens
atgaacaagagcatgatggaatcgcactcttccaaaataagcatcaagtaaagcaaaaaccatgacaacgataacaatctctatgtaacatagctaaataatggattaaactcaggatcaggcagtagttctacaaaataaaaaatccagctaaagacgagatgaggaaaatagggggtcatatacagaggggcttcatgacagatggggtgtgctgcagtgatcctctttctctcttgccagctctcgaatggaggtggatagtctatagtcagtatgaggaagacaagtacagatgattcctcctcttctgagggcgatgacgaggaggatgactataatgatgacttagaaaacaatatcattcctcttcctccagctaagcgcttgaggttaatagtaggaaaagactctatagatattgacatttcttcaaggagaagagaaga

SEQ ID NO: 536226 - DNA, 153 bp, Homo sapiens
acatcacaaccattatcaatataaaaccccctgccataaccaatacaaagcccctcttcgtctgctccgtcctaatcacagcagtcctacttctcctatctctcccagtcctagctgctggcatcactctacttctaacaacgaacctcataa

SEQ ID NO: 536227 - DNA, 345 bp, Homo sapiens
tcacatctagacggatccccgatgctctcttgtatgggcagatcgtttgccagtgaagcactaatctgatcttaaggactggctccaggaccctgggctgcctgtgactatgcagtccacttggtctaccttaatttatcctgtggccaaactctgagatggtaccagccaggggctagcatgagcagagccaggtaccctgtggctctgatcccccatttatccaccccaaagatgatgagcgtctgatgctctctcgggggggggtgacttgggtcagggcaggactacactttccggatggttgatgatggtggtgatgttggttggtggtggtgggtggac

SEQ ID NO: 536228 - DNA, 423 bp, Homo sapiens
  misc_feature (11)..(11): n is a, c, g, or t
  misc_feature (311)..(311): n is a, c, g, or t
  misc_feature (413)..(413): n is a, c, g, or t
caattttaatncgaacgggtttcttactttaaaaaaccgaaaaacaaggctaggagtggtggctcacacctataatcccagcactttgagaagctgaggcaggaggatcatctgagcccaggaattcaagaccagcctgggcaacgtagtgagaccccgtcttttaaaaaaaaaaattagctgggcatggtgccatgtgggaggctgaggtgggaggatcctttgagcctaggagatcaaggctgcagtgagctatgattgtgccactgcactccagccagggtgacagagctagaccctgtccccccccnaaaaaaaagtatctgcacatgtaccctaaaacttaaagtataataataataaaatttaaaaaaaaagaataattaaacataactccaaaaataaaataaaanttgattatag

SEQ ID NO: 536229 - DNA, 220 bp, Homo sapiens
  misc_feature (30)..(30): n is a, c, g, or t
  misc_feature (38)..(38): n is a, c, g, or t
  misc_feature (44)..(44): n is a, c, g, or t
  misc_feature (61)..(61): n is a, c, g, or t
  misc_feature (69)..(69): n is a, c, g, or t
  misc_feature (81)..(82): n is a, c, g, or t
  misc_feature (112)..(112): n is a, c, g, or t
  misc_feature (134)..(134): n is a, c, g, or t
  misc_feature (140)..(140): n is a, c, g, or t
  misc_feature (149)..(149): n is a, c, g, or t
  misc_feature (189)..(189): n is a, c, g, or t
  misc_feature (207)..(207): n is a, c, g, or t
cctttgggtatttaatgtacagtttcagcnaaagacanccaganttatacctctggttggntcaaaatncttaaatggtgnnacatatggtctcatgtccatttgttagcanacaaccagctgttctcagcctnccaaantccaagtanacatccactgtgtggaagagtgaatctgaaatggttcagnaaaaacatgaaagctggntttgctgaagaag

SEQ ID NO: 536230 - DNA, 124 bp, Homo sapiens
gcaagtagctgtgattagagtatgcaccaacatgctcagctaattattgcgtattttagtagagacggggtttttccatgtggtcaggctggtctcgtccttctgatctcaggtgatctgcccg

SEQ ID NO: 536231 - DNA, 505 bp, Homo sapiens
tacttcacagcggttggggggaaagggggcagagttgtagttgaagagatgcatgtgcactttgctggtcgtgctgacatgtctgctgaatttacactagataacagggacccacatgttgttatatgattaacgtcagtttcaactgagaaatattgtgaaaatcttgtggccagaggaagcctctcatattcagagtaaaaaaaatctaatttagtaaaatgtgtgatgtcttatgggctgtcttatatccttaagttcttttcaataggagagcaaaagagaaatctgttggcagtacagtgcttgccacattcctgttgctaagcaaagggaagctagggagaagaggaaaagcgaaggtctgtgaatcaggggcagtaaaattctaatcaactcttggtgttatgcttggctgactttctagagaaggaaaggcagcagtctgcattggtatatccaaaggctcaggaatgtagtcccagtattcacaaaggaaaacgct

SEQ ID NO: 536232 - DNA, 902 bp, Homo sapiens
gcgtgtcaactggagaacttgttccacgatgtgtgtgtcgctgcttgtcgtgttgctgatgatgttcgatgctgtgctgtgtgtgcatgcagtactggcagaaatgcccatcatcaaatggtagcgcccatggattgacgtagcaggaagagactacttgcatgcttatctcttgctggtcacattggtcggttgatagctgcattgttctgtccatttccgccttcctgtgaatgtgctggagattgcccggcaatgcacgcctacaggagaaatccatttctgcttctccatgaccggaggagcaatcggtgtgtttcctttcatagtgctattgggcgatggtcagttgcgtccttcctgaatcatgcgattgattccctcaagcttcactacgttagtcgtggtcccaatggaacgaccacaataggttggtggctcccgagagaaaactgaccacgggtcagctcgatcgaaagaaagctagctagctttcgcgtgcttgtatagcatcctatgttcgattagtagatccattggggatccagcacgggaggtgaactgagtgtgtggtgtttatcaaaaaagattgtgtcagtatataccactcagtggggtagggtggctacagatttgtttaggtatacacaattgattatactctcattggagtggataattcatatacatatatgggtgtgtgaactatctaagtgagtgagactgaatggtaaggaactggatatctggtctgtgaattgattgtaacttaggtattatggtgtacaaaaaacatatggtcagcatgtgggtatgtatgttggatatataaattgggtacttattggatggatgagtataagattattctatccttaggtagccattaatacaataaacaa

SEQ ID NO: 536233 - DNA, 406 bp, Homo sapiens
  misc_feature (14)..(14): n is a, c, g, or t
  misc_feature (42)..(42): n is a, c, g, or t
  misc_feature (99)..(100): n is a, c, g, or t
  misc_feature (115)..(115): n is a, c, g, or t
  misc_feature (137)..(137): n is a, c, g, or t
  misc_feature (203)..(203): n is a, c, g, or t
  misc_feature (250)..(250): n is a, c, g, or t
cccacaaaccgggntggaatagagacactgcaacacgatgcntctcccctattcacctggttgcactgtggtgtatgctaaggtagcccagggagggtnntggaaaggagggagntgtccccaggggagagcctggnacaaggggcaagtcagggcctgagtcttgagggttcaagtgtgatccagctccgagaagagagggncaggggacagtcccagcacaggtcatgggaaagagctgaggagcatnccgctgggcttggcacatgagctgagatattcctactgtgaacctaataggtatcaagatcctgagttatttaaaagaaagtcgaagccccctcactttactacagtgcgacatatcagtgtagcaaaattacacttgtatgttgtgaatatacac

SEQ ID NO: 536234 - DNA, 584 bp, Homo sapiens
actgcgctgcaaggctgtggcaaggtcatccctgagctgactggaagctcactagcatgcctcccgtgtccccactgccaacgtgtcagtgtggacctgactgccgtctagaaaaacctgccaaatatgatgacatcaagaaggtggtgaagcaggcgtcggagggccctctcaagtgcatcctgtgtctacactgagcaccaggtgtgtctcctctgacttcaacagcgacacccactcctccacctttgacgctggggctggcattgccctcaacgactcactttgtcaagctcatttcctggtatgacaacgaatttggtacagcaatctagggtggtggacctcatgcccacatggcctccaaggagtaagaccccttgatccaccagccccagcaagagtacaagaggaagagagagaccctcactgttggggatttcctgccacactcatgtcccccaccacacttgaattcttcccctccgcacagttttcatgtagaccccttgaagaggggagggtcctagtgaccctcaccttgttatgtaccatcaataaagtaccctgtgctcaaccaaaaa

SEQ ID NO: 536235 - DNA, 530 bp, Homo sapiens
  misc_feature (7)..(7): n is a, c, g, or t
  misc_feature (9)..(9): n is a, c, g, or t
  misc_feature (14)..(14): n is a, c, g, or t
  misc_feature (32)..(32): n is a, c, g, or t
  misc_feature (128)..(128): n is a, c, g, or t
  misc_feature (156)..(156): n is a, c, g, or t
  misc_feature (377)..(377): n is a, c, g, or t
  misc_feature (407)..(407): n is a, c, g, or t
  misc_feature (447)..(447): n is a, c, g, or t
  misc_feature (466)..(466): n is a, c, g, or t
ctcagcntntgcangatgtgaggaacatgtanaagctgtgaatgccaaatgtgcttcccttgagaagacgaagcagaggctccagaatgaagttgaggacctcatgattgatgttgagaggacaaatnctgcctgtgccgccctggacaaaaagcnaaggaactttgataagatcctggcagaatggaaacagaagtgtgaagaaactcatgctgaacttgaagcttctcaaaaggaatcccgctcactcagcacagaactatttaagattaagaatgcttatgaggaatctttagaccaacttgaaaccttgaaacgggaaaataagaatttgcaacaggagatttctgatctcactgaacagattgcagaaggangaaagcgcatccatgaactggaaaaaatanagaagcaagttgagcaagaaaagtctgaacttcaggctgncttagaggaggcagaggcntctcttgaacatgagagggaaagatctgcgcatccagcttgagttgaaccaagtcaagtctggg

SEQ ID NO: 536236 - DNA, 183 bp, Homo sapiens
gtttactggtcaggcactgaatgcctgtgagctctataccagcttacaacagctgaggtgagtgtgaccaccattgtgatcacatggacagcctgctccacgaattggtcatacgctgggtgtactgagcacgccagtgcaggagaggtagcactgagaagtgacttcagacctcatgatgga

SEQ ID NO: 536237 - DNA, 108 bp, Homo sapiens
gatccccccccgcagagctctccgttgccctcggccgatcgaaagggagacgggttcagatccctttcgatcggccgagggcaacgggggccttcgcccgtcccttcg

SEQ ID NO: 536238 - DNA, 563 bp, Homo sapiens
tgatcgtagcacgaacctgatgggataggcaggaagttataactaataccatagaagcaagtaaggaacctgaggtgcagacagcatagatatcttgcttcacaccacacagactataaagtggcagagtaagaattagaaccaagtttggtttcgttcagtgtctagtgacaaactcatcatattcaatttagacagcactgggaaagtcataaaaaaaaagtacaaatcatccataatcctaccaaccaacaacaacacactgtaacatagtctgggcaaatcatatcatacatattgaacctaaagtgctatttttcaacatctaagctgcatcattattttatgtcaccatcaagaaagcaacccactgccaattcaaattctgacatgttacctgtaggtgggcatgcatctcgattacagagcatattaaagtgtgggggcaaaggtgtatcttaacacatcactgcaaatgtatatcgtcatctcattgctttctatataaccattataacatgagcagattgtggtaattaggcaacaatgactctccttataat

SEQ ID NO: 536239 - DNA, 330 bp, Homo sapiens
  misc_feature (39)..(39): n is a, c, g, or t
aaggtaaaggcagacagatgaatcctccccatatgttgntatgttggctgcccaggatgtggcccaaaggtgcaaggagttgggtatcccccccctacacatcaaactccgggccacaggaggaaataggaccaagacccctggacctggggcccagtcggccctcaaagcccttgcccgctcgggtattaaaatcgggcggattgaggatgtcccccccatcccctttgacagcactcgcaggaaggggggtccccgtggtccccgtttgtgaacaaaattccccaaaatattttttgttaataaattgccttcatgtaaactgtttca

SEQ ID NO: 536240 - DNA, 185 bp, Homo sapiens
gtgactctagagatccccgttgtcatgtgtctgtggggtaggaaataaactgggcgagaggctaggctgaaggggttacaaaccaccctagttaaacaaaaccccaataactctataaaacatgtctatagatgtgaaaagtatgaacaattctagatatcctatatatagacaaaagctcttcc

SEQ ID NO: 536241 - DNA, 391 bp, Homo sapiens
  misc_feature (11)..(11): n is a, c, g, or t
  misc_feature (62)..(62): n is a, c, g, or t
  misc_feature (281)..(281): n is a, c, g, or t
  misc_feature (381)..(381): n is a, c, g, or t
aaggccatttncgccggccaaaaacggggccaccggaaccaaaggcagcacacagctcttcncaaaattgaaggtgtcaacgccccagatgaaacagaattccatttgggcaacagaggcgctaacgcaaagaaagcaaagaacaacacaggcactccgggcggcaaaccaaacaaaaccagagacatctggggaaaagaaacacgggcccatggaaacagtggcatggttcgggccaaacccccaaccaatcttccggctaaggccattggacacagaanccgagggacgctgaacccctcaaggatttaaacgaacgaaaaatcaataaataaatggggatttgggctcttgattttcaagtggattaaaaaacttacnaccttaaaaa

SEQ ID NO: 536242 - DNA, 1111 bp, Homo sapiens
aggcattatcccgtggtgtcagcatttccggatagacggcggcgggaaatcggctgtgggagagaggctaggaccatctgagagaggcgaatccggcgggtatcagagccatcagaaccgcacaacatgacggtgggcaagagcagcaagatgctgcagcatactgacttaccaggactgacggtgcatcctgcaggaccggaccggactcttccttggacacccttcaacggctttatgaacaacgcacactgaactttgatcctctgatgacctgtgactgacgttcagaacagactcacagaaccacaacgacacctaccacaaagccacggcacgacacaggggacacgacgacacgcgaacgatcctccgagatccatggatgactgaatgaacgaacgaggcgacgaacactcttggatacatcaacgtgacccgatacgaaaggggaccactcaactcgccaaacgactaacgtgggataataggccatcggagattcgcatctttgacgtggaagcatgacccagagtgtggaaccacagagggaaatcgagaaagagggacatgactgagacaagcacggacaatcacacaagccattgagagaggtttcacagcaatgacacaccaagagacatccctgtgacaagggcagcatttgagtggggagacccacagtcacaggatggagagcgctcatgagccagggcccaaatccacacaaaaaacaaaggcatggaagtagaacacaccacacacaaagggcacaaggacgcggttcaccaatgataacggacacaaaccagacatgcccaggcagtgtcaattgacccaacacaagagccaaagatagtttaggaaacagagaggtgacatttccaaaaagcacgaaaggacttagaccaccgagacccatgagagcaccggatgtgacgagggtatacccatcaacacgacgcaaaagcttaaattgagaacacagctagggatgtcagagccgcaacagttcgaagaggcacaatgaaatggagagaccgccaacacgtcactatgagttatttgaagaaaccgtaccttacttgagagtccaccgacaaatatggag

SEQ ID NO: 536243 - DNA, 120 bp, Homo sapiens
accgcgtgaacgtgacggtacggccgggcctggccatggctgctgagcgggtccaccgagccctgctgcgcagctgtccatctcctccatctggcgtagtgggcacctgccgaggacaac

SEQ ID NO: 536244 - DNA, 264 bp, Homo sapiens
ggacctgtgcatacgagccctcaatgtcaccaaggcccgtgtgaccccctggtcccctggccctcctggactccaggtgtaagcggtggtggttatgattttgggttacgcatggagacttctacagtggctgaccaagcctcgcatcagcaccgttctctacagaccccagaggactatgcaagttgactgctacctctaaatgtctctcaagcaaccagtattgagacccattcttgctcaatggagggctcacagatgctg

SEQ ID NO: 536245 - DNA, 912 bp, Homo sapiens
gactgagccggcggctgcggtcggcacccggcagctcttgcagcggtgtgttctacgtcagtggcttcaaagactccagttggattcattggactgggcaacatggggaatccaatggcacataacatctcatgcacaaactctggcttatccacttagttatttatgatgtgtccctgatgcctgcaaagagttgcaagatgcaggtgatcaggtagtactctttccccagcagatgttgctgaaaaagctgaccacgaatgattacaatgctgcccagccaggtatcaatgcgatagagagcttattccggagcaaatgggattctaaacaacagtgatgaagggctcaattattgagtagattccgaagcatctattgtatcctgcagttctcaaaagaattgggcaaagaagttgagaaagtgtgagcagttttcatgggatgcccctgttgtctggtggtgtaggagctgcgacgatctgagaacctcacgtttactggtgggaggagttggcactatgaatatgctgttgcccaagagttgctgcggtgcatgggctccaccgtggtgtctgtggaagctgttgatgactgggcagcgctgggaacatctgcgacaacatgctgttagctatgagtatgaagtggagtgctgagctatgaatcttggggatcagttaggcttggccaggactatggttaaaatctaatattgagctccgaggggcggcacgtgacctattaagcctgtcccgacgaggagggtccccggaaaaaacggcggtttcggcaccctgggccgttggtcttgcacactctcccaagccccctggggtggccccaccaaagtaaggccacaaaccgagcaaaaacatcttcccgaacacccccacaaatcggggctcaccc

SEQ ID NO: 536246 - DNA, 273 bp, Homo sapiens
ggctgtcgggttattttctcctaatctgtttgacctttccttgactgctgatctagatgcttggatccaacttactttcttacaccctcttgtgcgtatacctatcatgtatatataagctccacacttggaatcactgcatatagttatgtgtactactacctacagaggcctgaaggctactatagaaaatcacatagctgtgtagtttgccaacgccaggagtttaaccctcagtctcactgaattattccttttcttggtcttatcgag

SEQ ID NO: 536247 - DNA, 399 bp, Homo sapiens
acttgtactcatcgcgcagatcttcacattgtcctttttgcttttagctaattgcaatgcagattattttatttattttatttatttatttttgagacggagtcttgctctgtcacccaggctggagtgcagtggcgcaatttcggctcactgcaacctccgcctcccgggttggagcgattctcctgcctcagccttccgagtagctgggattacaggcatgtgccaccacgcccagctaattttcgtatttttaatagagacggggtttcaccatattagccaggatggtctcgatctcctgacctcatgattcgcccaccttggcctcccaaagtgtagggattataggcttgagccaccgcacccagccgcaatgagtacagattaggggatcct

SEQ ID NO: 536248 - DNA, 333 bp, Homo sapiens
tttggctgatcatcagagtcagcttatgagctcttaaaaacaaaaataggctgggtgcagtggctcatgcttgtaatcccagcattctgggaggctgaggtgggcggattgcttgagctgagaagttcaagaccaggctgggcaacatggcaaaaccctgtcccaacaggaaatacaaaaattagttagtcatggtggtgtgccacctgtagtcccagctacttgggaggctgaggtgggaggattgcttgagctcagggacgtagaggctgcggtgagctttgattgagccactgcactccagcctgggtgacacagcgagaccctgtctca

SEQ ID NO: 536249 - DNA, 227 bp, Homo sapiens
gtccgggccacacagacacagaacgcaagagagagactgacccacccacgcaccggtccccatagacgcagagaccgaggcagaaatgacgggattgccgcagaccggccaggagcagggacagacagcggctccgcagactctggtgggactgggctgaggccactctcgtgttctcaccacaccctctctcaactataactacctaataaaacttaattgttcta

SEQ ID NO: 536250 - DNA, 350 bp, Homo sapiens
gcacgagaaaaaaaaaaaaaaaaaaaaaaaaaaaaaaaaaaaaaaaaaaaaaaaaaaaaaaaaaaaaaaaaaaaaaaaaaaaaaaaaaaaaaacctcggggggggccccggaccccaattccccttatagggagtcttataacaattcactgcccgtcttttaacaacgtcgtaactgaaaaaaccctggcttaccccaatttaatccctttgaaaaacatccccttttccccagttggctaaataccaaaaagccccccaccaatcccctttccaaacatttgcccaccctaaatggcaaatggaaaattgaaaccttaaatattttgtaaaaatccccgtaaaatttt

SEQ ID NO: 536251 - DNA, 178 bp, Homo sapiens
ccggtccacagttgctattagaactgttattggtgtatgtggcaaggccactggctctgttactggtgctggtgatgagagtgttgtggcttgggcaggtggaggcggtggaggcggagatgagggcggtgagtctacagttgttgattctgctatcactgctggtaatggtgctgca

SEQ ID NO: 536252 - DNA, 117 bp, Homo sapiens
cacgagggggaaaggaaaagactcacatcaacattgtcgtcattggacaggtacattcgggcaagtccaccactacatggccatctgcatctatatatgcggtggcatccactcaag

SEQ ID NO: 536253 - DNA, 992 bp, Homo sapiens
agcaagccagaagtgccagttagaggtacagcagccttttaccatcatctcccagactgccagtggtgtgcaatgcagacctctactcacaacgcaaagtagaggaaatggacagtggatgcacttctatgcatgcgactcaaacggctctatacatgaagcataatagtctctagaacaatgtgcgcgtatctagtagtgtggccactgcatttatccaagcaccacagagaggaccatgctttcccctttgtcccaccctttgctagccctgtgttctagtcatgtaagtttcacactaacgtagctcacctttcgagtagtaaactcacaggtcagacgtacttttgcggaatcgcagcaaccatgccacaatatccaggcaacaggcgtgtcgcaacggaccatactacctttcacacatggtctgacattagcgagctgcagctcacgtaaagacaacacaaacagtcacacacaccctcttcatatacttatggtagtcgggcataattacggtatcgtctccaaggcggatactacatactgctactacgtctcacctgttactatcaggcacactcaatctacacgacagtcatacgtcaaatcatgcaactatacttccccaacacaagccgaactaccacgatcacacattgctctgtgagaaacatctccgtttaccaaccacgacactctctgtgcatctctgatcaatcccctcttgctctgcaccgtcgatgatcgctcatttaacatgtagcctcgtaggaacatgatataatcattagtactaactccagattatctctctattggtcccccgcgtgtaacacacaacagttcgagacgcattccaaacattcttcccgtgaggacaacagccaagacgtccttagtgtgtcgccgccataacaggcagtttacaggataaattaaaaaataaatcacggagtagtgtatatgaggcttgaggtccattattgacc

SEQ ID NO: 536254 - DNA, 219 bp, Homo sapiens
ctctttctgaacttcctagagccatcatttactgtattctctttctctttcctctttagtatcattaccagtgcttttcttcaccagtctttggtcattgctgtagttgtattattgttgctaactacaggattaaagaatctcttcatgtccatttgatctagtcgattctgaacatttaagaattgatagtaatctaattggtctggaaacattgcg

SEQ ID NO: 536255 - DNA, 136 bp, Homo sapiens
atcagtctgtggctgttatgaatctgctgcagtgaatattggtgtacaagtcgtatgtgtagacatccaccctcatttacttatgaggttaagatgtcaactacttttttcacaaaaaaaacctgatattacattt

SEQ ID NO: 536256 - DNA, 311 bp, Homo sapiens
  misc_feature (2)..(2): n is a, c, g, or t
  misc_feature (22)..(22): n is a, c, g, or t
  misc_feature (253)..(253): n is a, c, g, or t
tnacctttacctcctctttggnatttcttctcaattctaggcttgaagttacaactccctgctggataacatcacatgacccaacagacccaacacactttttcctcctgttgtgtctccaggtgacagcagcatcactctaccggctacatggacaaaaaaaccaccatgtcatcttcagagtttgcctttaagctgcacacagtggtacatgcctgtagttccagctacttgggaggccaaagcaggaggntcccttgagtccaggagtttgagtccagcctgggcaacatagcaagagcctatgtcgt

SEQ ID NO: 536257 - DNA, 1223 bp, Homo sapiens
tgacgcgcggctatgcaaaactggcgagaccggaaccgtggaaagagtcattgatggggaggcgcatgccacaaaggcggggacataactgcacaagcgtgggacgtaggggccgcatgagcggtggaaacgcggcggctgatgggccgccctggtccgccgagagtggggtatagggtgatggtgttaatagcggggggaaggggggggttctcaccctcctggtgcacaaagtttgttcttttggagcaccaatgtggctttagcccctggggggtagtggacaccgctgtgtgcgagacctcgggtagtgcccgtgcacgtggtcaaaaaggctcgggaagaaaggctgaacacattgtgggttagggtacagtgccccgcgtgggcccccgcaccagggaacagtcccccggaagaaacccgggtcaaggtggttgccctttcctgcccctggattcccttaaggttttttgaaattaagggtttcttcgtgaacaatcctgttttccgataagcctcgtgttaaaaatagtgttaaaaaggtttcttggaggcttccaaaaaatagcggtttcttcccacaccttggataatgttaagtaaaacctgaggagacacttgaacatcacctgaacacgggcacggcattaaagaaggttgcttaacacatgtgggtaagcacgctctgggtttgagtttcaaaagttgggtaaccactggtggacactctggaacacgccaccaatattagcccactataccacggcgtgttttgggttgaaaattgcacacttttctaacctctgtgataatgaagaatgttaccaagaactctttcctcttctgggtttgttatattcactgagaccacgaggggggtatctaataagggttggtttaataactgcacaataataagaaggagtcaagaaagccactttgaatttggtataggtgttgtcacagaaagggagaaatgaatggcacagacgaaactgctggaaagaaggtcacgaagatagccactggctataaaagcacattatatcctcactgtttatccccaaactaattcttggacttttccacactcacttagctttgttttggcccttgtttccctctgaaggtttaagttcaaccatattctgtcaactgttcagtttcagtggaattttgtatttttggttcattataaccaattgttcgcttaaatccca

SEQ ID NO: 536258 - DNA, 283 bp, Homo sapiens
ttttttcaaatccccccggccctttttcctttttcataaaactgtccttttttttgggggtccctaatcccagcgggtttgtttttaaaaagttgccaaacccgttgagcccctaacatgttgtggggctttttgcaagtccctcccccccttgggcccccccccttttttttttttttaaatagggatacccgttatacattcccccccccccccccccggggtttttttggggtccaattaaatttttttacgtgggaatcccgttttattttttaaggga

SEQ ID NO: 536259 - DNA, 303 bp, Homo sapiens
ggaaaggtttgttaagcatcttttaagtgccatgatgagcatacaagccggccgtggtggctcacgcctgtaagcccagcactttgggaggccaaggtgggaggatgacaaggtcaggagttcaagaccagcctggccaacatgctgaaacctcacctctactaaaaatacaaaaattagctgggcatggtggcacatgcctgtaatcccagctacttgggaggctgaggcaggagaatcgcttgaacccgggaggcggaggttgcagtgagccaagacagtgccagtgcactccagcctcgg

SEQ ID NO: 536260 - DNA, 575 bp, Homo sapiens
gttcaatggctgcagaacagttaattgcgactccgttttttactactagacgaagatcaggacagcggctgtggattaatccccggttaaccattaaaacctgatgcattacactgagctgcatacgtgaaagtttaccttttgcctgctagaacatattcctaatacatacacactttctctgaacatacacatctgtgtaaggcacagggtttgggacagaaaagcaaagacttggggaagaacaatgagagcgcatattaaaacatctctacaaaaaagggccgcaggaatcactgacgttctctatgtgcatgctttcgcaaacggggaaagtcaggagacgcattgtcgggatctagctatttaccctacctaatcaggatttgtaccgggcaaagatgaaacgttaggtgtatggcatgaatacagttctaccagctttatttatccaggcatgactctattatagatgtgatgtacatacaatggtcctgaagaatgttgactgtgacggtgaatgcatgattgtgtatagagaaactgcttagctgcggatgaaacaccgtccctcg

SEQ ID NO: 536261 - DNA, 110 bp, Homo sapiens
aagccgagtggtggattacaagggaaatcatcttgtacacatactttatataacaactaaggaaaacagaggccccaaaatgaaagatttctagcagaaccattacagct

SEQ ID NO: 536262 - DNA, 233 bp, Homo sapiens
  misc_feature (37)..(37): n is a, c, g, or t
  misc_feature (123)..(123): n is a, c, g, or t
  misc_feature (133)..(133): n is a, c, g, or t
  misc_feature (141)..(141): n is a, c, g, or t
  misc_feature (152)..(153): n is a, c, g, or t
  misc_feature (155)..(155): n is a, c, g, or t
  misc_feature (161)..(161): n is a, c, g, or t
  misc_feature (170)..(170): n is a, c, g, or t
  misc_feature (198)..(198): n is a, c, g, or t
  misc_feature (205)..(205): n is a, c, g, or t
  misc_feature (213)..(213): n is a, c, g, or t
  misc_feature (226)..(226): n is a, c, g, or t
atttaaattctgacgtttctgacgtaatttaaatgcncgttctgaaccaattttctcctatcttctctaggggtttcgaaagcgcagttaattgatttccgggaagtactcatagcgagttcntaaaagttcntgagaccnaaatttcttcnngnaaaaanaaaagatcntaagtcatacgttttaattgtgtagagnttgttcnacggaagnaataaatgtcgantaaacgg

SEQ ID NO: 536263 - DNA, 163 bp, Homo sapiens
tgggacaatcggagacttctcttacaagccttcccttactcttctcaaatatagctagtacacattacatgcatccttcccaccttaccttataatgccccttaccacagggtaagccttccctggatggccccactgctggtctatggtctagcctttacac

SEQ ID NO: 536264 - DNA, 390 bp, Homo sapiens
  misc_feature (26)..(26): n is a, c, g, or t
  misc_feature (39)..(39): n is a, c, g, or t
  misc_feature (62)..(62): n is a, c, g, or t
tcgcctaattttgagtatgtgtcccntttttagattccnacagataaccttagggccccaanaaggcattttgggtgattgaaaataatagcagtttgtaccttacgggaacctctaaagatgatgatgattattattattatcatgactgattttattgaatctatgaggcttatgaggtcttaagttcaggatcagcctggccagcatggtgaagccctgtctctactaagaacgcaaaaattggctgggcatggtggtgggcccctgtggtcccggctgctcaggaggctgaggcgggagaatcgcttgatcctgggaggtggaggttgcagtgagctgagattgcaccagcctgggtaatggcctgggcaacagacaaaaaaacgg

SEQ ID NO: 536265 - DNA, 218 bp, Homo sapiens
aaaaaaacggggggggtttttttctggttttggccaaaaaccatttggggaaaggatgggggggggaaaccaggaaaaggggttttttgggacccttttttgggccgtttacccggtgccctttttccccaaggggggggaacccgctgggaaacgatgcttcaaaaaaaaaagggggtttaaaaaaagggtcaaaatttaacttttttttccttcca

SEQ ID NO: 536266 - DNA, 851 bp, Homo sapiens
gagcggaacggagcaagagtgggaggcagcgcgtcgggtccgccgcgcacggacgcaagatggagacaggcgaccatagctctctgggacagactccatcaacgtatggagcaacagggcatgagtctagcaggcccggcaaggcgtggtggctgccgtcccgctggacggcccggagcgaggcagcgaggcccgttctaggaaggggccagagaatcgtacgccaatgtgacgcaagagtcattcaatgaggtgtgcctggttgaaggccgatgaccagtcggcgcaccagcacgcagcagttcaccgaagccgtgcaagatttggcggcttcatgcggcagcgggcgctggccagtcagtgtgccgcgtctactggtgggctcctaatctactattgagcgtgggcggaggagcacgcatgcctgcccagtggcctttgcgcccctctttttgggccccacgatacagagtagcattcgagcaattgttccttggtgatctaccggttctatcgcatttgaagccagcaatcgggcttttgccttcagtggaagtatgaaggtccccccgtagatgccttgtcgactaggcttgggcctttggaaatgccaagatagaaaactccgggtggaattggcttgcgcggagtgagccgagcgtaaatcaatactaaggggttggggcgctaagtaaccccgatgtcacaacgattaaggggggccagtggccccgaggggctcaattcaatgaggtacccaaggtttggggcttgggaggggaagtgccaacgggtggtcttttccaaacgccggtcattcttacagttgggccctccttgttggccaccca

SEQ ID NO: 536267 - DNA, 192 bp, Homo sapiens
ccacaggcatatcacaagtctagtcagaaagaaatacatagaaaaacatgatagaatataaaaataattagcaaagagaagttctcaatgcttcagtactaaaatatagtatccttattagaataataaaggactaggaataacagattgtgtttcctgcaatgctgtagttactgcaaatttatcaggtgt

SEQ ID NO: 536268 - DNA, 138 bp, Homo sapiens
aatgtacggaggcgttcatggccaggtggatcatggatggatggatggatgacaggtggatgcagcggttgatgcatggatcgatggattggattggattggattggattggattggattggatcaggttggatgcat

SEQ ID NO: 536269 - DNA, 189 bp, Homo sapiens
tcattttctacactagagacagattccaccatgttggccggcctgttctcggactcctgactcaggtgatccgcctgctttggcctcccaaagtgctgggattacaggtgtaagtcatcgcactcagccgatttaggcttttgaaaaagcaatacttgatgatttcttttagtgttagtttgccagttg

SEQ ID NO: 536270 - DNA, 533 bp, Homo sapiens
ggagagagagaactagtctcgagtggggtctttcttgatttagggcagcattcgggttgagttaaatgatggggaatggggccaaaccaaacaccagacctctgcccatccccttggccttgtggcccagtggtttccaagaggccgaaaaggcggcccagaagggagctagtggggttcactccccaagtgaaggcagaccagtggtcccgtgtagacttgtggtgcaaaaatactaaagtgctaatttgggcatcagagggcccagctctgagaaagagaaggggcaatcctcgtgtgacagcacagcccaggggacacaggaacaggtacggaatacagaggccccgtggccaaggagacaaagggggatcgtgtagagcaaacgaacgacaggacacaaaaacccactaacgccccattaaacaatagtggaagacaccacaggcaacaaaggcgcaaaagattacatgaaaaaatccctcttagggcgataaaggagcaaaacactccaccaacaatgggaagataac

SEQ ID NO: 536271 - DNA, 213 bp, Homo sapiens
agttcgactggagtactctcttccggtcataggccagaccgagggcggccatgcaatcagatgaagaatgtggtgaagttgatgtgccagcggtactcactggcagagtagtcataggcgaaaggagatgggtggtagttgctggaactccctcagaccacagactccaaagtgaaaccagtggatattctccacgggggctacatggttctt

SEQ ID NO: 536272 - DNA, 271 bp, Homo sapiens
tgtaacctccgcctcctgatttcaagtgatttttcctgcctctgcctcctgagtagctgcgattacaggcacacgctaccacacctggctagtttttgtatttttagtagagatggagtttcaccatgttggccaggctggtcttgaactcctgacctcaagtgatccacccaccttggactcccaaagtgctgggattacaggcgcgagccactgtgcccggttggaatcatttttaatatagtttggctagtggaaagggcaccgccaa

SEQ ID NO: 536273 - DNA, 324 bp, Homo sapiens
tgtgccgtggtcccacgaacctaatcctgcatttctctaagagcaatggttcagtattcactaattcagtaatcagcaatgtatagaacataactactgtaaataacaagaactgactctgtttaaatttcctttctattcaagtcttagattcagggtttaagtacttttattcctgatgaatctctggtgttaagattacaactaaacatttacaaagttctggtaataatttcttccagtccttctcagatactatggttctgtgttttatgtactaatactgtgttccaaaaggaatcatagtgaaggctgatcacccag

SEQ ID NO: 536274 - DNA, 217 bp, Homo sapiens
cccatcccaatcaggaagcctgtcagcacgccactagaaccatcttcagccagctacggggcagacatcacaagtaagagaagctacaactctagtgtctgctagaggagaccacactaaagattgtcctcaaggagctcccgtcatggcacagtggttaatgaatctcactaggaaccatgaggttgcgggttcggtcccgtgcttatggatgtct

SEQ ID NO: 536275 - DNA, 708 bp, Homo sapiens
  misc_feature (361)..(362): n is a, c, g, or t
  misc_feature (367)..(367): n is a, c, g, or t
gtttccaaaatatgttactgttggtcctgtaaggttacaaagagatctgaagaactttctttttatacattagagcattttccgccgtggaatgagtatagagttaaaaagataacatttattaattaataaaggcaatttaaaatttagtgttagttggagagactgtcaaccatctgaaggtatgaaactgtgtacagtgaaataatttctcctttctccttccttttagttattcccacagaaaactcagcccagtgggaattggtcatattatgcccatgttttaagacaatattcatagtttggatcttagtgacactgtttaaagacaagcagtgttgtttcgctcccccttggnnaatgntaagaacaaaaatatttttttaatgatgtggaagtatatatttcatgttcattatgataaatctacaaaccaaatgaatgttcttatgggtggagttcttctataagagtatattaaatgctttcagagttgtattaatttggtttctagatgatataccacttatttggagtgacttaactcagtatgtaagtagatgagatttgttgattttgcccctaaaacgggcttgagtcattttaggagtgagttgcacaaaaggacctaaaatgctttgttttgtggctttcttttaaggagaatggggtctcgctctattggccaggggtggagtgccatgt

SEQ ID NO: 536276 - DNA, 144 bp, Homo sapiens
ctgaacccgggaggcagaggttgctgtgagccaagatccaccattgcactccagcctgggcaacaagagcaaaaacttcgtctcaaaaaaaataaataaatgtatccaagccaatgtacataggttatatgcattttatatcag

SEQ ID NO: 536277 - DNA, 467 bp, Homo sapiens
gggctgtagaactcagcgaggactcaggagtcatgaagggcggcacatttgcccagaagttccattgatcatgttgcactgatcggaatggcagaagtcaaacttggtcaggccggtccaattgttcacgaagtggattctggtgatgttctggaaccccgtgaacaacgtgaagaggccagaatcggagttgttgagctcaggaaataattcgaaattgtccttgaaggggaacatgcctggaaagtacttgttgatgagattcacaagggggtccttgtagccccacatgatctcacccacagtgcggttcatgaaggcacgttcgccgagggtggtgaatgccaaggtcatgatgagcttcagggtcatgggcttattctccatcatcaccgccgcacccaagaccaggatgttgtgcatgacgatgtagtcgctctccgagacgcgtgacttgtagggctgga

SEQ ID NO: 536278 - DNA, 1291 bp, Homo sapiens
gaagtctgagtcctgtcctttctctctccccgtgacgagcatgagcttcaatcaatcgctccagcttctccacgcaactaccggatccctggcgctcttgtccaagggcgcgcagactacgagtgccctggacctggtcatgcacgtcgctggccaaagcgtctattgcaaggcgcttggggagctctggttccctggaattctccagtagtccctgcctctcagccatgactgtccactggggccgtgcagtgtgggtctcggggggctctggccgtccgcggtagtatgactccgggcggttctaggactacgtgcacatttggggaggagccattccagagaaccgaggaacggacgatcctatgtggaactaagtccttgatagcttgagccagcactggccttctatagacttggatcacgagaagtagacgtgaagtcctgggagaaccgttgtaaaacctgggaagagcttggaggacggcaacacataggtccctggcggaaggcacaggcatttgagacgccaagggacaggagggaaccccgccaaggcgatacagctacgtactctggagcaaggcccattggtaccctattcaaacgcgaatccaattgcgaattgggaaccccttgcaatgggggctttcaacgagtccttgccggcccacgctagtaaacctgatggcgtaacaaaattgtcccccggcgaatacaggtactacatagcatcgtgacgttgtgggccccagcattagtacgcgccgggtaccttctgtgatttgcgttcgaagtaggagcgatgaaaggcacggctccgaacagtcattgccagaacccgtggaagcgcgtcggggcccaacttgccaggcccaagatcgtgaggggcggcaagcgaagactggaacgaaatacaccacttggcgagcttcccacgcgagaaagggttgcgagctcgcgcagaatgggaacgacccgagatttagtccaacagacgcggaaagttaggcaacagccttggggaaggacccgcgaacagaagtccggcagggagttcctttcacacacggtgcaggtgtacgcccatggctgactttgccaatttggagaaggaaacagggaggtcccaagtgaaacaggacggggaattgttcacaacaggtggaccgtaccaagagcgccggcatgtcaattgtgcccaaggttccatgggggtgttgaccccccgagcgggacaagtgtatagacgttgacccccacctaaacgattcttacaacgggaacgctg

SEQ ID NO: 536279 - DNA, 187 bp, Homo sapiens
aaccatgcgaacggactgatcagtatgtattaagctctgtaggattagaacttaacttgtagattctgtttagaacaataggcaaataggctgggcacggtggctcatgtctgtaatcctagcactttgggaggccgaggcaggtggatcacaaggtaggagttcgagatcagtccgttcgcatgtt

SEQ ID NO: 536280 - DNA, 139 bp, Homo sapiens
catctatgctcccgacaggccctggataaagttgtctctacctcagctggcgcgttcctcgtttgctgttgtctacatactccttcaggtccaccgtcctgatgccgactacaggtcctgtcccatacaacctacagtt

SEQ ID NO: 536281 - DNA, 412 bp, Homo sapiens
gaaagtgtagttgtgtaagaaccgggcttcccaaaaacttaattcctagtaattaaagggtttgccttttgggctgtccaaaaaagaagaatgataattagatcctgggtgaaagcttcccaacaaggaaaggctcatatttggggtaagaagggttaattgttcccagagtccaacctagaggaaattgtgagacttcagtacccaataacattgcttgtataatggtgctggccacgttgttttaatcagttgcctttttttaaaagacattttttatgtaaagcaaattgaactgtcatcagaaatgaagttacattgttgggaccatttctttaaagatttcacagaagttacctttggcatttgacaggacatacaccctaggtaacaaacagcacataccaatttc

SEQ ID NO: 536282 - DNA, 219 bp, Homo sapiens
  misc_feature (116)..(116): n is a, c, g, or t
  misc_feature (130)..(130): n is a, c, g, or t
gctgaaatgccagtttagagctgcctgggggatcagtgggggatgaggagcgatgtccatcagactgggtggctggggggctacatgacagttgcctcagggcataggctctgctnaagggattttgtgngttctgctttgatctggggatcactcagtgcaacatgtggtgggggtgggggccagcctcatcctcctggattcatcctcctttccctt

SEQ ID NO: 536283 - DNA, 1150 bp, Homo sapiens
agattacccagcaacttggcgtcttcccagagagcgtccgtggaggaactggggcaagcagggggaaggtgaatgtagccaagcttaggtacatgagtccgcgattgacttcagagtgctgactgcggttgaaatgggcatgaataaaccatgagagtggttccctgcggtctgattgcttcgtatagccagcctgaaacatggtggctgtaataagattctaagagaattggtgaagcgataaagcgttatagcgtgggaacgtactaaaactgtgctagggcgtatcggttgacaaatgcgtggctatgattacctagctctgaagaacgctgtcttctagacaggtagttgaagtctgttggaaaccagatgggtgtgggcaaagagtcagacatttacattgttgccaagtgaagccgggcagcagctcggactgaagctccacagactgggaagaacttcctttcgaaatctgaaaaacaagcgcgattaccacaagcacaggcacaaggttgcttggctttacttatctcggctctcggccatgaaggaattggcctatatgaaggcattatatgagaggaaattgccagttccaaaagccaagtgatgataatcgccatgcagtgatcatggagcttattaatggttatcccctaatgtcagatacatcatgtcgaagaccctgcatcagtatatgatgacgctattgggactggatagtcaacctgagaaaccatgggactggttcatggagatttccatgaattcagtctcatggttggacacagatgacacatacccagtaatgaataacggagaagtggtatccagatcccaccaaaaggcgagagcggacattggacagagacatgttaacggcatcagaaacgagctcacagggaacgcgtgaacaatgacaggagagaatacacaaccgtagggaacaagaaaagaggaaaccaacaagagaggcaacacacacgagaatcacagcacaagacagcaagtcacaggcagaaaaacaagccactgaagacaggaaaaagacacaacagacacacagaagcaagacaaaacacagggcgcaatcgagaagcacaactaaagagatgtagagaacaagaagcagcatccgacaaaccag

SEQ ID NO: 536284 - DNA, 519 bp, Homo sapiens
tgagaagcgcaatatggaccaagtttgcgatttccgcgttgtttggagttggggaagaaaagcgagttgataatcccgcacggaagaaagtacctgggctatgtctagccacgggaagcccagcgttttcatccctgaatgagaactttcaataatgtggtaaacgaactgaaaatacagggttttccgtccccgagaagtgatggacgagttaagagcctctccgtggattgacacagaccaaagcaatactacaaggaagaaatccacttaatatgctaaaatcagtactaccttatctcttattaaatgagatactacaaatgccagattggaagcattacatatttccagatgggttcagagagtcagtactgtttatgggtcgagactaataaaaccagatgaaacaagtaactacttgtttaccttcggatccacttcgttattgcaacatctacatctcgaggaatctgacacaccccaacggacctagacagcattctaacaactaagaga

SEQ ID NO: 536285 - DNA, 155 bp, Homo sapiens
acaagagtagtacaatcttcccatacacaagaataattaatacagatcttaggagaatcttgaaaagcccagaggatccaaagagcccttcgatgcacgcacgcaaggaagatccatcgcagatgtcctaatagaagaacccacgtgaacaaact

SEQ ID NO: 536286 - DNA, 194 bp, Homo sapiens
  misc_feature (12)..(12): n is a, c, g, or t
ctaaatggctgnacctaaatggctgtacctaaattgctgtgcctgtgaagcttcaggcggtttggatgagaatggctgtcactacgagggctatgttgctgattagaagaagattccactgagcgctattagggtctcgtgttgtgcgcaaggcgaatggagcttgtaataataattgcttcaaagggatagta

SEQ ID NO: 536287 - DNA, 148 bp, Homo sapiens
gctgtgattgagcagtatctgggcattgagatctgagtcgcgctcgggtgcactgtgtgcctttgagatagagataatatggacagctgtgtgttctccaatgctggagaatgggggctttcccttatgagaaaggtctcattgagtg

SEQ ID NO: 536288 - DNA, 273 bp, Homo sapiens
ctagaggatccccgaacaacccggatgatcatcaactcgtcatttaacattaagtatatctcctaatgctatccctccccactcccccctcaccacaacaggccccaatgtgtgatgttccccttcctgtgtccatgtgttctcattgttcagttcccacctatgagtgagaacatacggtgttcggttttttgtccttgcaatagtttgctgagaatgatggtttccagtaaataggcatggagttgcatggcggtgacagagccaggcgca

SEQ ID NO: 536289 - DNA, 879 bp, Homo sapiens
  misc_feature (25)..(25): n is a, c, g, or t
  misc_feature (391)..(391): n is a, c, g, or t
  misc_feature (406)..(406): n is a, c, g, or t
  misc_feature (409)..(410): n is a, c, g, or t
  misc_feature (414)..(414): n is a, c, g, or t
  misc_feature (437)..(437): n is a, c, g, or t
ttattgtgtgttaagttttcatctntgcatcaaatcacaaaaagaataaatagagctttttcctttatcagtcccttgggcacagcaggtcctgaacaccctgctctacaatgttgcatcaagagttcaaacaacaaaataaaaaatattaagaggaaatccccatcctgtgacttgagtcccttaagtctacaggggctggtgacctctttttgctaataggaaaatcacattactacaaaatggggagaaaactgtttgcctgtggtagacacccgcacgcataggattgaagacagtccaggctgctgtacagagaagcgcctctcacatctgaactgcatactgagcgggcaagtcggctgtaagttcagtaaaaccctctgatgangcaaaaaaaaaaaantannaagntcacaagctgtttgtactcaaanatattttctcagtttcagatcctctgctattttattgagtggaaagtcttgagctaaaagggttcaagaagaataatgttgcatttccttatgtctcaggaaacactttttatggtaacttgtcagattgtctatgaacaaacccacttttttagacattgataaagtcttcttttcttcacgtgatattttatacaagaacacttcagatgtattagatgtgactgattttaacaaatcctattagatttgtatcaactagttacatgttctattcatagtcttttgtgaatcattgcctttttgtttaaaaagatggcctattttgagcctttgtataggtacattcctgtttttgtgacaaaagaaaaactttaaaattgtcccaaacagaaaaataatggctatcagaagtatgttttgttttagtgtgagttagcgt

SEQ ID NO: 536290 - DNA, 912 bp, Homo sapiens
aaatttgttatactgcccatcccctaaagccaacagagatttgtagatttaaagggatcatcgatgtgaagacaatagtgtttaacgaaagcaagcaagtcccttaccagtcaggtcataacgagggcacatttcatgaccgaaccctctcaaggcagaggaggagtttggtgggtttcatacaccctgacagaattccttgttggctctaaccctcaattacctaatcttatgctttaacacataactgcattggatgtgagagtaacgtaccgtatggtcatcgttctatatattaacattgaacactgctgcgattgctcaaggacattttcatgttacggtcttttaaaagcaaaggcaatgattattagtaaactatttaagctttctggtctttgaaaatgcaagtctcctttgacataatcatgaaacaacagtagtgcctgtggtttagcccaccaatcttgattgacctataagtagctgatgcattgtgcatatgatgcttgatgatggttttttgcatatgcagaaatcgctgcaaggtaatcacggatagatacacgtggtatttggaaacctttgcaacataagtggatgttactgtaccttggttccgcttatcacttaaacgttagtctaatctggaatcaattaaatgttgcgcaattcaactgtctgaccctgactgtgtaccatcacacctggggtaagttctgctatgatgttgctggcatatttgtaatagtcagggtcacaggttaaaggaaagaaacgcttctaacagtaaattattgtgcctaatgcaattgtactgggaattaccttcccgtcaattttggccaactgtttatcccttttaggtttccccctcatttcacggccccacttttttaacccctttacaca

SEQ ID NO: 536291 - DNA, 125 bp, Homo sapiens
cacgaggtttcagaccccatgtgctacatctggcgccagtgcagtgtcatgtttaactacgagattatcctgcatattaacgtgtcttctatagaatatatttcatgttccattcttccgcaatg

SEQ ID NO: 536292 - DNA, 443 bp, Homo sapiens
tacatccccccgctacagaggctcttccagacggaaaacctgggagcgctagatttgctgtttaaaacgatattccccacacgcgtctacattttgagagagctccaaactatgtgaaaaatactgttgcagccccaagagagtccagattcaccctgaagatatgttagtggaccgcactccgcggcaccttccctaatcatctcgaactggttttgaattttgcccctctgccgtgtctcttcgtcagggagaattttaagagagccgaagctttccatcaccgaatcagtttttcctcttaggaaagctccaggaacttcgtgggctccagggacccagccccacatccaattccaggttcccgctggctttggacagacaggaggggcctgtacagaaacaccacactgtttaataaaatcacaatgatttttattaaa

SEQ ID NO: 536293 - DNA, 480 bp, Homo sapiens
cagaaatgaagctattcatctaccaaccacctgatcttcagcagattttgcaccaatacatgatgggcaaaaggctccatagtcaataaattgtgctgggataactggctagtcatatgcagaagactgactctaaaccctttccattcaccatatgcaaagattaattcaagatggattaaaaaacttaaatgtaaggcctaaaacaaaacccaggagaaaatctaggaaataccattctgaatatcaattttggcaaagaatttctgattaagtcctcaaaagcaattacaaccaaaacaaaatttgacaagtaggacctaattaaagaggttttgcccaacaaaggagactgtcaacagattaaacagacaacctaaataatgggagaaaatattcataagctatgcatctaagaaaggtctaatatccagcatctataagaaacttaaataattcaggtactaaaagaagaaaaaa

SEQ ID NO: 536294 - DNA, 1058 bp, Homo sapiens
  misc_feature (1058)..(1058): n is a, c, g, or t
tgagttggaagctagacgacctagagggagggctgctcagtgccgtgcttcagtcatagtgtgaatgtgaattcagagatgcttgcagctgcagggctaggctgggccctgacttgtctgtgtgcagaatcttatcaaatgctgccagtaccaggcgctaggcatgaacagagtgctgtttgctgctgtgggcgtccagaactgccggcacttccctgtgccttaaggggcagtccttgcaccctgcgagtcccacgattcgtcctcgcttcgcaggcaaggagcatagtcgcgtaagggtagaatgccgagagaaatgggcctcacaagccttctcaccatgttttcataggtacactcgtggaacacgagggagcgtgtatgaagagtggagacccctcgtcaggaattcacgtcgcccccctggctcgtctcttcatctgaacccaggggctggagcatcgattggcgtgcccaaggtagagaagcgcaaggtgatgcttccattggaagatgctcgtgtttaccttcagtcccatggcctccaggaagtggacccagggctcgacccctccatggggttggaccgggtgttccttaccgccaacactgatgcacatgtggtctaatcgcggtacaccacgtgttgccaacttgattggttccaccgcccttccatcctttaagtggcttcaagttcatctcacgcgtctgtctccaaaggggcgtccttggttacacattccaaagatggtcaagtctctctatgctaggcatggtgggtgggaagaccggaggggccaatcctaacccaaggttgtcatcgccgtgggcagggagtgggtgtgccgataaggaagtgtcatggacccagggctgcagggaggggaaggcgaacaacacttggcacgcatgcgagaccacgaggacatgcgaagaaggccccaaggccacagcaggaccgaagacccgggcacaacacaaaagaccaggagcgagtaccagaacaccggaaacgcagtcacagtaggagacaagaactgcacaacgccccaccn

SEQ ID NO: 536295 - DNA, 248 bp, Homo sapiens
acaggaaacagcaccttttatagaaaaggtggttggctctcaaaagagcctttgggttttggttcgcacacattcacatgacaatttacgccctctccccaccaatgcggggagcaagctggatgtacctgggcattatatacactcgcttggcgtgcatggcgcataggttggtggactaaaacagactcaccatgaaggcctcgcaggcttactgtaatggcataaccgccgagctctgaaaacac

SEQ ID NO: 536296 - DNA, 231 bp, Homo sapiens
gttgaccacaccagactgggagatcagggaataggcatggccaggctgccaaggagccaaagcagatggactttccaggcagcaaggtgccttgggggccttcttggaggagcattggagtagacagccacggttgagacacccagagcccagacccaatcatgtgctgtgtgcctggacgccttctgtactggtggacgattagccagaatggacttgcagccttctgca

SEQ ID NO: 536297 - DNA, 123 bp, Homo sapiens
cccccatttcatgcggatttttatttgcatctgtattttgctattatagtgttactgaagtataaccaacctgtccagggcttggacaggagcaaggaacaccatgaccccaagaaaggggag

SEQ ID NO: 536298 - DNA, 1697 bp, Homo sapiens
  misc_feature (797)..(797): n is a, c, g, or t
  misc_feature (1288)..(1288): n is a, c, g, or t
ctcattatatatcactcatgggggattgtgctcgtccaatataatggaagaaaagcggttgtatatataatactaaatgtatttgatgaatgacgagaaatctctcgccgcgactgaatatttgtttcatgcccccccccccccgcttgtgttttgaacaccgccctagataatcttttcgcgcccttcttgtgcggcagtctctccccccacccgttgttttttatggagtggcgtacctccccgctccttgtgtctcaaccacggtggggacgcaaacacacagagggtgtgtgtagtagccgcgcggctctcctccccggcggggtgcattcgccaccctctttgatcctctcggcgtgggccacacacaaaaagggggttagttaggctacagacaagatattattactctacaacacgtgtgggggtttgttcccccgctacgtataaatattttaattgggggggaagacacccccctgtttattttgataataaatattgtggcccgtccaccacacacacagacaagaggggtgttttacaacaaacccgtcgtgtctctttctactctaataaacatcctggtgtttagtacacccacccagcctgcgtgaagaaaatttgttggagcatacccctcggccccccccccccttctgtagtataaagaatgaggtgcccccggcggccgtcctaccttgttgtatgagcaccacctcctgcttcctcatctatgtatcttccggcagtataagtaagtgtaccccccccccccatgttgtgggaggagncttcttgttataaagatgtggtatattatgagtaagatgggcgcccacctacaccccagcttgatacctctcttagaccaacataaccccgcaccccacgcggtgctctcttcttaaaatctatttcccccacaacaccccttcggccactcctgtaggagaaaaattgttttttcgcgcttctttggggcgcgcggagcaccccttcttcgcggagagcacagcaggagagtaccctcccacaactcctctctcggcgtagcacacagctgataccacatctgcgcttataatagagaagcttttccaacacacacagcgtccacaacaaggcgcgcactcatatctcttatatatacctccacacatttgtagatccccacacatatatactgtggtagacccacaccggcggcgtacacacacgggtgtataccccttcatcggggaggatatacacacgcgcgcacacacatctcgctcatcatttnctatagaggggtactcacatatatacacacacacacatataggggggttttatacgcagcacctccgcagatgtgttgtgagatctcacagcgagacacttcccgcagcatagtggcgcacaccacgcgctatattataaagggtttgtcgtttgtttctacacacgcagattataaagtctctatcgtggagatttgagggtctaagacccggaggtataatccacaggtctggggttttatatattatattctaaaattctcctcccctgttatcgaaaaggagacacaagagagagaaatataaggcgctatcttctaccacaaagcgcgccctttccccctataaagaaatctatttctcactttgtattataccccccccccccccagaaccccgggtttgtga

SEQ ID NO: 536299 - DNA, 464 bp, Homo sapiens
taaaaaaaaaaaaaaaaaaactcgaggagcatttgaggtcaggagtttgagaccagcctgagcaacatgatgaaaccctgtctctaccaaaaaaaaaaaaaaaaaaaaaaaaaattagccgggtatggtggcacattgcctgtaatcccaactactcaggaggctgaggcaggagaattgcttgaactcgggaggcagaggttggagtgagctgagatcgtgccactgtactccagcctgggtgacagagggagaccctgtctcaaaagagaagtggccatgtgatccagctctggccaatgcaagggatagacacttcttccgtctctttttgccttgaactaggatgtgacagcattcaggctggagatggaaagcaaacacacaagggtggcagactgagaagacaggaggaacctggatgctttttaaaaaaatttatttttgtggagacaggatcttgc

SEQ ID NO: 536300 - DNA, 259 bp, Homo sapiens
ccagccgcacggttcaaacacagaacagcgggtgtgctgtgtgctgaaaaatcaaggtagagtctgcctttcacacccccacaggtgacggtgagatggcatggcggccagacacaaagctccgtcactctacagtgcagtgtggagagtacacaagacccggtttagcatctcgtgcgggaggcacaagctccagaacaaaactcgtgacacgaaggaaacgatgtgttcgccgaaagcctgtcagtgacattggcaa

SEQ ID NO: 536301 - DNA, 305 bp, Homo sapiens
  misc_feature (256)..(256): n is a, c, g, or t
gtctcaggccccacgcaatccttttgcaaagccaagaagtgtgtgtgttttgtgtgtgtgtgtgtgtgtgtgtgtgtgtgtgtgtgtattgtgtgtagcgaggaggattgggggtgggatcccatgacgtgaccggctccgctcctggtgtatataaggggcgcttggcgcatacggaccccaagccgcagctttgaagccctgagcggccgaactcggagctccaacccaactcgggcttaactccgcctcaccngaagcccagtccaagactctgttgctccctagggtttgcaacaagctct

SEQ ID NO: 536302 - DNA, 1517 bp, Homo sapiens
gatttctgctaagacagtagattttaggagctcttgccatatgaacaaaaaaaaaaaaaaaaagggataaagtgacggggctgcaggggctctcattccccattaatccccagcactcttgggaggccaaggccgggcggactcacctggaggtcaggagctgcgagaccaggcggacacccacacgcagacacccccgcgccacaccagaacagccagacaagcacccgcagcacagggtcgtatagcgcagcgaggagtacccccctgggacacgcaccaccaacacacccacgcgagagggatcctggcacacacaaccgaggtgaccacgaacgcctgagacacccatgccagcgacaacagacccggatggcacaaacagccgcacgatgcgacaacaggcgcgcagacaccacacgcagagggaggagcgaaccgcagcgcacgtagggatcacacagggagcagcgccgaggcggaggccgaccgacacggcgcagagaccaaggggggacagacagacgtaagaacgcaacgcagcgaagcaccagacgagagcggcggagagacccgccgagcggcgccacaatggtcgagcaccacgcagaggaaaacaacgcggaccgaagctgaggaacagacacacagagacgggcagcgccgtcgcgcaaacgaagcggggggcgaggcacacgaacagagtgagtgacgcgagaggacgacacaccgaggagagagaagaacgagagaggcagacacaaagccatatgacgcggaggacagaacagacgcacagaggcgagcagaaacgagagagaaacaccatgacgtgagcgcgacacacgaccgagcgtgagagcgcacagcacgaccggacggccagcacgcatctcagcaccgacagccagtagggcgaccgacgagcggtggtcggtcgccaggcgatgacgacgcgccacgtacggacatgggagcgggcccaccagtaggtgctgctcagcaagggccacaaacgcctgcgaacacgaaggtcgagggcagcgtaggcggcgagagaagagcaaccagcggacgagccgcgacggaggccaaacaccgactgaggtagacaagagagggcgcagacagcacagaagagagcacgggcataggtgagcgcgagcgcgcgaaccacaaccgagaggtggagagcgaaagacctagcacgtgagagcgacacagaggaggaagcgacacaagcagagaatcaagacgccgggctgacgcaaacaggagaggcagaccacacagacgagcgtcaggagacggagacagacaaggtagaggggccgccgaggcagatgcgtccagatggagagagcacacaacggacagcacctctcaccacacacgaacaagcaggcagaaaccagagcgagagtgagacgacgacggcgcaggccagagcgaaggaagagagcagacgtgacgacgcaactccgaaacgagagacacacaacgacacgcacaagcaa

SEQ ID NO: 536303 - DNA, 155 bp, Homo sapiens
  misc_feature (99)..(99): n is a, c, g, or t
gatttgctgagttcaaatctgcggggtgggggagtcttccctggcattcagcaacccagaattaaaaaatccctccaagggctgtttgggaccccccanggaacggaccctactttttttccgaacgatttccagctcccagcttgcagcagctc

SEQ ID NO: 536304 - DNA, 146 bp, Homo sapiens
cctccgggtcgcctctagacggactcccctacgacgacccgtgtttgcacgtcacttacacggacgacgaacggacacgacgaacgtacacgccgacgcggcgtccttataacattgtagtacgatacagaggtaggacacggtag

SEQ ID NO: 536305 - DNA, 354 bp, Homo sapiens
  misc_feature (135)..(135): n is a, c, g, or t
aaagctgttgatgggatatgtgaaaccacagatcaagcaagtggtccctgagtttgtgaatgcatctgcagatgctgggggcagcagcgccacgtacatggaccaggccccctccccagctgtgtgcccccaggntccctataacatgtacccacagaaccctgaccatgtactcgatcaggatggagaattcgacctggatgagaccatggatgtggccaggcacgtggaggaactcttacgccgaccaatggacagtcttgactcccgcctctcgccccctgccggtcttttcacctctgccagaggctccctctcatgaatgtttgaatcccacgcttctctttggaaaca

SEQ ID NO: 536306 - DNA, 1441 bp, Homo sapiens
ggtctcaccgcgtgagacctggcacagcgggcgaggtctcgtgctgtgtctggacctgcagcccctggtccttccgacactcatggagtagctcatcggtatccaaggtccccgactattgttcgttgtcgccgtccgaccgggtgtggacgctcagcgaatagttgtcgcagatgaatgggacgggatcatgacaagatagtcttaagatgacgttgaaaagataattactccttgatgttgctatggaccacggcgtagggagaactctagtatcatgtcttgccatgaactattattcgggaatacaagcagtagtcccaatctgattatacatgtactcgtcggaagagtgcgacttacttgcagttggatcgtaccgctcggggaagggaatgtattagacccatgctgcaccgacccggacagaaccctcgggcgttgagcgtgcctactttgccgggacgattcggtgtaccacacgcggaataatttcaagttgtttgcaaaactcctgcgcgtgcaccttgagcttggtgtcgtcacttgcaattgcaagggcactttgaaaggtggtccaaaaggctgtgccttgcctaaatatgagcaagttgtggggagctcaaccctgggccaatgccccgtttggggggcacaagtgccactccccttgtgtgcacaaggcctccatcgcgacttaagtgcgctgccgcctttcccttgaaacgtgccttcacgttggatcgcgtacagcaaaccgatttagctacaagcaccccagaaatatttctttcaccgttgtgaaaaggggcaacgggtggacagcctccgtgtacgtgataacagtggtcgtggcgcagtgccagtccatctcccacgatagaacaggcgctaatcagtgcccatgatagggtcatgggtccaatcgtccttgtccaggctgttgttcggacatttccaatatggacctgaatcaattgggatgggtcctagtggaactcctgggtggatacaatggacgttttctccccttccacgcaacaaggaaggggggtggtccccttgaaccaatcacttggttgccctacaccctttccgccaccattgtggggccaagacgaaaacagtagtggcccatttggacttggagggcatcccctttaacaaggtttatgctttagaatccaccaaggaaaccatacattgggtaaggaccgtaatacactgagtaatttacatcgtccgaaaaggagaatacacactaattcaagagaaagattaacaacttggaacccagcggtcacgtttcagagacacgccatgggccgcacgaaagagacatcaccgggtggcagagaaggagaactccaaggttgtcgacaacttggagggatgtaccaggaagtaacaggaggttgttgtattagcacacaaaaaacag

SEQ ID NO: 536307 - DNA, 375 bp, Homo sapiens
cgtatatgctgctctaagaagatctaactttttgacaatcttttgcttctatacggtcaaacatgatctcactggggttccacatttgctcctggtctgtccattaggacagctctgaacgtccccttcccttccagagttgcttttgtttttatttttgccttacccatactcctttcagagagactggtccttagagcagaacataaattccatacaagatagcaatggagccagttgcccagagagctttgaacgggacagttatcacaccctgagtcaagtagaatgctttgggcttctaggaacagaaaacctaacccaagctcctttttatgaggtgaggttttgctcttgttgcgtaggctggagtgc

SEQ ID NO: 536308 - DNA, 514 bp, Homo sapiens
tcacagctacagcacctggctggaattagtttcaatgtagtagtatccgtgtccaccatcttggcaaagcttatattccacaaacagaaatgaatcaaactctagtcttgctttcaagttagcggacatttcccaggcctgacattctctatgcgagacttctttacgttagtgctatatgacagtaagctgtttgtattccttctacatctgtttcttgacctgcgagtctaggcatgataacgtcatatctgtgtcgctgcctggcacagtgcctggcaatattgtgcccttgaatgtctgttgaatgaattattgaacaatgtgagacaaactctggaagaagtttggtccaagagacaaagcgtagtggacagaggttttggagcatctgacctgagcaagatgtagacagaaataaggtgggctcttcatctaggaaggactgagctgccaaacaggttatggtcaagggtcagctggctgcaaggaggagaatgagacccagtagcag

SEQ ID NO: 536309 - DNA, 281 bp, Homo sapiens
  misc_feature (54)..(54): n is a, c, g, or t
  misc_feature (84)..(84): n is a, c, g, or t
  misc_feature (95)..(95): n is a, c, g, or t
  misc_feature (97)..(97): n is a, c, g, or t
  misc_feature (107)..(107): n is a, c, g, or t
  misc_feature (117)..(117): n is a, c, g, or t
  misc_feature (146)..(146): n is a, c, g, or t
  misc_feature (154)..(154): n is a, c, g, or t
  misc_feature (158)..(158): n is a, c, g, or t
  misc_feature (170)..(170): n is a, c, g, or t
  misc_feature (172)..(174): n is a, c, g, or t
  misc_feature (178)..(178): n is a, c, g, or t
  misc_feature (191)..(191): n is a, c, g, or t
  misc_feature (199)..(199): n is a, c, g, or t
  misc_feature (211)..(211): n is a, c, g, or t
  misc_feature (214)..(214): n is a, c, g, or t
  misc_feature (240)..(240): n is a, c, g, or t
agtcttatcatccgagaatacaccatcttttctctggataattatttcttacancatgcttgattcctacattttgttgggtcncaacattggcncncgaatgctgntaatatttantctgtattgataaaaagtctggcttgccnctacaagnaaancccccatttaanannncccnctttagcatagcnctgtcatnttttgtgaaaanggntatgtttatttattacaatactgagncatatataaattttcaataaaagcagaaactttcttacctt

SEQ ID NO: 536310 - DNA, 282 bp, Homo sapiens
  misc_feature (177)..(177): n is a, c, g, or t
acgcggcatgcaccttgatgctgatggtcgtatctagaggtatccccctacagcgcctttgggacaaacatgcaacattgcagaagagcaccaaggcaggttcgcagctcaactccgccaggatgtctgcacgtacagaagcgtgctgcaagtgagatgtcagagatggccatcctngcagatcacgtaaggcgctgctaggttaaggtcgctagtacgttaagggcgctgtaggcttaacggcgcttgtatcgttattgcgcgctgtatggttatgtgcgc

SEQ ID NO: 536311 - DNA, 577 bp, Homo sapiens
  misc_feature (302)..(302): n is a, c, g, or t
ctcaacgctttatacattcctacaacgctatactttctcaacgctttatacttcctcaacgctttatacttcccagacaagccttagccaaaccatttacccaaatgaagtataaagcgtggagctcaacgctttatacttcttcacctccacctcagccagctgctgagcctggctcacctccagctccagctgggcccgggcatagaccagttccagctctcggaccttctggaccctcgggagctcagcctccgggaagaggaaaaatcaatcattctttatttttggacccaggctgnaatgcagatcaggactcactgcagccttgaactcctggctcaaaggatcctcctgcctcagcctcctgggtagctgggaccacaggtgtgtgccaccatgcctagctaattttaaattttttgggtagaaacggggtctcgctaagtggcccaggctggtcttaaactcctgagctcaaagtgtttactcccgcctgggcctcctgaagtgtggggattacagacgtgagccaccatgcctgcccaaaaggtctttcatatggtgtatggtaaca

SEQ ID NO: 536312 - DNA, 364 bp, Homo sapiens
gcaatgcagaggtgcaacctcggctcactgcaatctctatatctcgggctcaagcagttatcctgcctcagctgggattacaggcgcccgacaccacgcctgggtaattattgtatcttcagtagagacagggtttcaccatgctgaccaggctcacctcaagtgatcctgccaccctagcctcccaaagtgctgggattactggcatgagccactgtgcccgggctcacgccagtatttataaatatcgggttatatacgtgcaggaaacatgatttcaggttgactgttctcacctttaacctctctatatagcacagggcaatctggccctactgccacatcatctgggctatctgtagct

SEQ ID NO: 536313 - DNA, 200 bp, Homo sapiens
agatgtcgaagcgaggacgtggtgggtcctctggtggcgaattccggatttccttggtcttcggtaggagcctggtaatcaattgtgctgacaacacaaggggccaaaaaccttatatcatctccgtgaaggggatcaaggggcggctgaacagaacttcccgctgctggtgttggatacatgtgatgccacagtcaaga

SEQ ID NO: 536314 - DNA, 242 bp, Homo sapiens
aaaaccccttaaaaaaactttttttaaagggcccttttccccttttttggggaaaaggccccaaaaaattttttttgttggcccaaaaaaaaaaaagggtttaaaggaaggggcccccttgcccttttgggggttttttttccccccgataaacaagggccgggggccaaaaaggttttttttgaaacccttttttccctccttttggcccaaaaaatcctttgggtttccctttccgggga

SEQ ID NO: 536315 - DNA, 460 bp, Homo sapiens
acccttacagcctactagaaggaatgctttacatttggcctgacggcccacatagctgtgagcgcagccgttttccctactggaaccaaaggtcaccttcttgactcctttgctcgtacagatttatgggatctaggcctagattactcgtacgggactggacatggtgacgggtctttgttgaatggacatgagggtacttgcgggctcagagagacgcagcccatctccatacagcattaataaatacctccccgattgtgtttgtgcctaatgctctggaggaaggaagaaacgtggcagatccctgacatctgtcccctttccttctcttattgcctacctcccctttttactttagactttaagaggaacagaaaatcttccgattctctcggatattttattgcaaacactcagtcttttatgattctttaattgttgagaacaaaccaagaac

SEQ ID NO: 536316 - DNA, 291 bp, Homo sapiens
  misc_feature (173)..(173): n is a, c, g, or t
ggggggtttgggcccccccccccccctttgggggggccccttttttttgggcccccccccccgggggttttttccccttttttttaattttttcaaaagcccagccccccggggccccgttggggggttttatttttccttttggtttttgggccccacccaatttttttttnccccccctttccccccggggttttgggttttttgggccctggtttttttccgggggggcccccgggtttttcccccggggttttttgtttttaattaaaaccccccgggcccccctta

SEQ ID NO: 536317 - DNA, 232 bp, Homo sapiens
taaggtattcgaggatttaacgatagccgaaggagcatggtattgagagtaggggaggaggactggtagtgaggagtagggctggaggacgggtcagtgaggagttagggcaggaggacaggtcaggaggagttagggcaggaggacgggtcagtgaggagttagggcaggaggacgggtcagtgaggagttagggctgttgggctagtcggggctgtagggctagtcgggg

SEQ ID NO: 536318 - DNA, 489 bp, Homo sapiens
tggtcctcagctatgacgactaccaggattgggagacttaaagtaaagagaggcataagaaatggtagaagtattattggggaacggataaaggtccatgaaattttcacaactcatgttcctcggccggggctccagctggtccttctgctcagggtcccggcttcccagaacattcggtatctacccaaagtaaacgaagtcattatacaaaaacaatactggcacgtgcatgtttatagcagcacaattcacaatggcaaaagggtggaactaactcaaatgcccaccaaacaatgaatggataaacaaacaataggatactactcagccattaaaaggaaagaatgaccggcattggcagtgacctggatgagatgggaggctataattctaagtgaagtacctcaagaatggaaaaaccaaacagtgtatgtactcacggatatgtgggagccaagctatagctgaggaccatcgttggggtac

SEQ ID NO: 536319 - DNA, 845 bp, Homo sapiens
ttcccgtgggtttctataaacagtttaaggatatgattgggttaaaaaataattggttataaaaattctgttggcaaattaaatggaaaagtatccagagtctcaaaaggcaatgattgtgagataatatggcatgcccggagccctgctcatcaatgaaaaacccatatgtaataatcgaattcatttaacatgaatcttggagtacgtggaccatgtgctgtgcattgtaaccttttgtcgttgtcgtcgttctgcatttttaactccagatatcctaaagctcaatggttggtctctggtttacatccttagagaagccatgagaacagacttgacaagtttaggaaatcataatgtggcagaggtggtgggacgaagaaagtgagctttttccccttgagaaacttctgcatttagtttctatctttccaggcacaacaaatgggtattcttttcatacaacattttcaaatgaacttagaaaagtcttaacatttaggtattttatgcacagaatacatttagatgtgtagggaaagaactcgtacgtggagtttgaggtaccggaaaaatggcgtgatggtctaaacccagtaaaaatgggtggcaaattgttcaaggtcagcatgtctaattggaatctacgatatagggttagattccaatgggttagactatttgctttacaatgacgtgcctgggctataatattcctaaggacaactggggggtggctaaataaggatacaggcctggttaaaaaccagagggggtaatgcgggccactgggtcacggccaattaagggggattatttgggcccattttgctcgggagacacat

SEQ ID NO: 536320 - DNA, 263 bp, Homo sapiens
  misc_feature (46)..(46): n is a, c, g, or t
  misc_feature (136)..(136): n is a, c, g, or t
  misc_feature (187)..(187): n is a, c, g, or t
gagtacagttagagacatcagtatcaaccgatggttagcgtaatanagacacagatggttacatttagaaatactatgatgtgtgcatatacacatgctaatgtatacacatatatttcctttctctgtccgctgngagggcctaaaagcaaagaaatcccagtagcaatgagcaccagatcttggnatcaaataccactctccagtaaaagaaatcttggaaaaaatagctgattctaggaatagcacaggaaatatatacg

SEQ ID NO: 536321 - DNA, 350 bp, Homo sapiens
  misc_feature (128)..(129): n is a, c, g, or t
  misc_feature (134)..(135): n is a, c, g, or t
gactctggcctcttgcctgaagtcttccgcccatggtcaagatggcgccccaatccgcaaagccgtggggctagagacgcaggcgaggggaagcagcttaagggggcggggccaaagctaagtctagnnagganngaagaggaacctcacttccgttgtcaggtggcggcgccgcagccatggagggaggcggcggcggcggcggcggcggctcgggtgctgcgctgggaggcggcggtgagaggctcgcacgcctccagcccgcccggcccccgggagggagagccgagcagccccggctctgggctacggaagaggggcgaatagatcctaccacccggcgaaggtga

SEQ ID NO: 536322 - DNA, 422 bp, Homo sapiens
tttcaagttggcactgagacagcccgtgctctgtggtcccccaggttgccccctaggttgtggcgcatgggctcctcctcccactgccatggcagtggcgacgccggaagtcgacattccaccccgccagggagactggctcccagcgtgtagcatgttgttacagtggacctgcatagcctgaaaggccctcagccggtcaaactcaaactccatctccacattgccactgcagaagctgtggttgctccatcccactattgtcctatgcctgtgtcctatgtgaaacacctgactcttcctaaagtcatccagccccaccacaccatctgccagctggcccagacccccatactgcagtccgcccacggtatgtccgtcataggtggagtcgttgaggtacacggcctcagataaaaaca

SEQ ID NO: 536323 - DNA, 286 bp, Homo sapiens
tgatctcttacggtgaaaagaaagatgatctaaggctcataacactgcagcagaatcattcattattgctttccgtggaggtgtggcgaatcagctaaatactttgacgccgagctggggactacgatgattgatcgtagcggaggtgaaatatgctcgtgatgtctacgtctattcctagtgtatatatatgctgtgcccacacgataaaccctaagtacgccaatttgtatgttcattacctttttcccttggttaaaatatccaaatggttcttttttttttc

SEQ ID NO: 536324 - DNA, 707 bp, Homo sapiens
agcggactcgtgtctcgtctaccaggtccccgtctgccctgcgctcggcgggctggcatccggtccgggggaaagcgtaccattcccttctgcaagtctgaggaggccaagtgtcccgggcggcgcacctcgttgcgtcgagaatcggtgagaaggatgagactacaaggataggcccatgtgagtaatggagtccagaatgaccaacacgagcatgatagataacagatctctacgacaatggaaaaagccaaccacgacaaatgaagatgaggagtccagttgtcttaactaaagtggtgaggcccttggtcctccctttggatgctgttctgaatactgtggtgcctagaggaactcttatgccgttccgcgattagggcagtccccagtacctgtcaggtactagactggggcatttgtaatcacagtaggccgttgggtagaacccagcaggccaaggcatgaaggagtaaaaagcaagtatgcgaatagggacttgggcggaggaagggtgcagaacacgttgtactggaaacagtctagaagggcacaacagcatcttgaagttcattagcttctggcggagacatggtcagtgagctgtatggctccccttcactcatgaccatactttatcgagtctttgcccttatgcccttgaatcccgagtggtttccctaatggttattacggacaactgaacc

SEQ ID NO: 536325 - DNA, 184 bp, Homo sapiens
gggaagatatcagatgtcacaactatagcggcaccgttcagatccagggtgagtcctgatcattctatcagcctccaattttacagaggccctactgtttctacttccactgttgcccaaaagtatcctgataaaactcctgcttgtcatatgagtgagccatagtaaccatattgatcaccac

SEQ ID NO: 536326 - DNA, 206 bp, Homo sapiens
tcctcaggcatcttcactcttcggctccccatgcccttaccctttgcccgcggcactgataggggtcaatggctcccacaggctccttgggcagcttccctctgtgccctttgcagggttcagcacattggagttgaatgcctgcgcttttccaggctaccaccggtgcagctgctgatggatctaccattcttgggtctggaaga

SEQ ID NO: 536327 - DNA, 347 bp, Homo sapiens
ttttctcattctataccctctggatggatttgaaccaaagtcacttacctttcatgacagttgtgaaataggcaagtactgaacctcccagctggtataaaatgaagaggaagatcctgtagagccaagtgttaacttggcatttttaggcacacccgagtgtctccgggtggccctgggcaatggagtggaatggaactcttatacctaatttaaaagtcaaaaaattagccgggcgcagtggctcatgcctgtaatcccagcactttgggaggccgaggcgggcggatcatgaggtcaggagatcgagaccatcctggctaacacggtgaaaccccatctctact

SEQ ID NO: 536328 - DNA, 202 bp, Homo sapiens
  misc_feature (6)..(6): n is a, c, g, or t
  misc_feature (18)..(18): n is a, c, g, or t
  misc_feature (38)..(38): n is a, c, g, or t
  misc_feature (61)..(61): n is a, c, g, or t
  misc_feature (163)..(163): n is a, c, g, or t
  misc_feature (173)..(173): n is a, c, g, or t
ctcgtncaaattcggcanagattgaaacagcagaaganctaacataactaactccattttnttttaaggggcctttacctattcctgcacctaggctaggataactttagagcactgacataaaacgcaaaaacaggaatcatgccgtttgcaaaactaactntgggattaanggggaagcatgtaaacagctaactgtttt

SEQ ID NO: 536329 - DNA, 535 bp, Homo sapiens
  misc_feature (1)..(1): n is a, c, g, or t
ncggcagaatcacactcaaaaaaaaaagaagaggaaatggaggtcttgctgggcagggcatctgggttaagtggtcctggttcataaaactttggacagggaaaatagaaagtcctgtttaatggtctgaaataaagctgatgtgttggagctatcacccaggtagcttctagtcatggacaggtcttgttggtagctagttaaggtatctgcaaggtgatgtctctgggtagcagcctctcctcctaaggagtatacagtggtccctcagtatctacaaggatggcttccaggacccccacagataactaaaatcaacagatgctcaagtcctttatgtaaaatggcatggggtttgcttacaacctacacacatcttcccatatactttaggtcatctctggattacctatacctaatacagtgtacttgatgtgtttcctgtggttatcccattttgtttacgacatgaccttgatttgacaaaaggtctgtatgtgtccagtccaggtgcttcttttcccgaatattttca

SEQ ID NO: 536330 - DNA, 382 bp, Homo sapiens
  misc_feature (14)..(14): n is a, c, g, or t
  misc_feature (33)..(33): n is a, c, g, or t
  misc_feature (104)..(104): n is a, c, g, or t
  misc_feature (145)..(145): n is a, c, g, or t
  misc_feature (222)..(222): n is a, c, g, or t
  misc_feature (275)..(275): n is a, c, g, or t
tccgcggcgaaagnctttttcgtccccgccggnaagtcgcgatttcgtcgacccagcgatcgagttcggtcttgcgtcgcgcactgacgacggaccctttcgcnggcgcgcgagttcgatggccgatgcgcgaccgatgccggantggcgcccgttacccagggcgatgcggccggcgagctgtgccggatgggtgcttgcgttcatgatgcgattctccanggtggttgacaatctgtgtcgaagcgatgtctgatgcgcatttgatgcctcgncggcgacaaaaaaatggaacaatgacgcatttagaattcctttttgaggaattaaaatcgctttttcgcgagcatcataagggttccccgtgctgaaccgactcgac

SEQ ID NO: 536331 - DNA, 582 bp, Homo sapiens
ggagagaactagtctcgagttttgattttttttttggaaaaccgtatctgcaaacttgtttcacttttaaaaagtgggccttttcttgatcagaaaatagcttcaaaggcaattttctccctgtgaaggaaacccattctgtgcaaatgatcattctgcaaaattgccctgggctggtccttaccagtctgcctgattgacctgaatgcctgctgagtctgagcggggggccttaggggttggctcatcaaggagcttacaagtgagtggctgggtgtgggtacagagggacccttgcgcacccggcggtgcccttgcacacacccacctaatttgcagggcgagggaagagcaggttgggccaggacaagggaggaagggcagagagggctcacggcccgaccactagaagtgcagccgcgaaacggggacggattgggccccgagccaaagcaagcaaggaccacctccatcaaaggaagacccagggagcccctttgggtgacggccgcctatgaaatcccctactgcctactgaactttaagtgggatctccaacggccaaagtctttgtggcaaccc

SEQ ID NO: 536332 - DNA, 218 bp, Homo sapiens
tcgatacgacttttttttttttctttctttccttctttctttttctttctttctttctttctttctcgctctcgccctctccctccctcgctcgttttctctctctcgctcttgccctctcgctctctccctcgctcgttttctctctctctctctctctctctctgtctctcgctctcgccctctctctctctgtctctctctctctctctctctct

SEQ ID NO: 536333 - DNA, 94 bp, Homo sapiens
agagtctgaccatgacagctgagcagaaggattcagaactgaatgagttaagaaaaaccattgagctgctaaggaaacagaacgcagctgccca

SEQ ID NO: 536334 - DNA, 111 bp, Homo sapiens
gctccaccggaggggttgggatggtgtgttgcttaaaaagaacaaacaggccagggggcagtggctcacaccttgtaatcccagcacttggggaggccgaggggggtggat

SEQ ID NO: 536335 - DNA, 170 bp, Homo sapiens
atagccaggttactggattagcacacactccttttgagtagacacgactctctctctcttcgtgcttgacgttatatcttgatgtgaggttcgctcttctcccggaccccgttaactcggccgtcgggatggatacacaagaagaagcccccgtttttgcagtacagccg

SEQ ID NO: 536336 - DNA, 307 bp, Homo sapiens
ggggttttttttttttcctttaaaagggcttcccataaccggggcccttccatgggggaacccttttttttcccaggcgggaaaaaaaattttccccgggggcttttttaccaaccgcccctgttttctttaccttttttaaaaccctttttttgggttgggccggggggtgggaatttttaaaaaaaaagtttttaggcccttgatcccccattttaggttctgggatttttggggaccttttttgtttttgggcctttttccccttttttaaccattttcccccgccccctttggggccccccca

SEQ ID NO: 536337 - DNA, 331 bp, Homo sapiens
cccataacccctttttgctgttttcccctgatcccactgggtaatttttgggccgtgattcccggttttaaataatttggaagggttccgtttttccccccctttttcctcccctaagaattttaaaatccccttctctgttccgctgttaatgctggggccccaatttagttttataagcctttccccgtttttaagttttgttttggggtttttggcccctgaattttttttttgtttgtcgataaaaaatgtaaaaggggaatgtttataaatttccgttttgttttgtaatgtccagaattttaaaattaaaaaacgggttggttta

SEQ ID NO: 536338 - DNA, 347 bp, Homo sapiens
  misc_feature (238)..(238): n is a, c, g, or t
  misc_feature (241)..(241): n is a, c, g, or t
  misc_feature (246)..(246): n is a, c, g, or t
  misc_feature (251)..(251): n is a, c, g, or t
  misc_feature (281)..(281): n is a, c, g, or t
  misc_feature (287)..(287): n is a, c, g, or t
  misc_feature (290)..(290): n is a, c, g, or t
  misc_feature (302)..(302): n is a, c, g, or t
tatatagtcacgactgctccgatctcagaatcactacaaacgcgattggtggcataattgaatccatttcgatgtcagatcagttgccacattcgagatggtcgtctttgttgcctgcggtgatacaactgtcacatacgacatgtctgaggatacctccgaagccaaagtcaagatcccaacaccaccgtctattgctgccaaagcacagctggctcggcagcagtcccatcgcccntangacantcccnttccccggtcagacacgtgcggcacgaccncatctncgntcagtccgtgtntccagcagcaggatttccacattccatcagtctgtaggctccatt

SEQ ID NO: 536339 - DNA, 1115 bp, Homo sapiens
agtaccccggttctggcgctgctgggtctcggttcgggttcgttgccccgtgtgccgggactgggcggtctctcctggcgcccagccggtgcgcagcagccggaggtgtcgggaccctctggagccaccctagcgggccccgccgtgctggtctggactccgtgtcctgtggctcccaggtcgctgcctgtcctcgccgccccagtggagtcccagtgctgactactcgatgtacttccctggcctgtgcctgctgcctgcgctgcgcgggatgctggcagtgggatcctgtggcctggtacccgtggcgctgcccctggcgcaagccaatctgtactttggtgggatgacttgtcgcgtatttctagctggcgtgttggcgctgcccgggtgtgccgggttgcgggaggtccgtggcacctgggggtgcggtgcccgggcgcctttgagcgctccaggagagacgccctgtggcacgacacttgggcaaaccgagcccatgggccggcaccttggccatacggtcaaggcgccggcgacggcccgggaattgccggaggagtgggcagaacaggcagccggccgacgcaaggggaattacgggaaagcccccccaaaggtgggcaaagaggcggaatcctagggcagcgctagcgcggcacataacgcgtacccctgacgtagccttgccaggacacccaccgctttccgacaacccccaacggggcccccggaggcccctgggataacccctcccagggggggggcgaaaggccgaaccccaacaggggctagcagggcgaggcctaatggggcacggcggcacaacccgttggggcccaccaacggacaacccgcgcaaagtgcaccgcccgccgcgtaaggacctgaggacaaggaacgcccttagcaatgcgcaccaacgcgaaagccggccacgacgagtttgaaaacaaactgtggccccgcggcaatccattcaacaaaagggggcgccaaccaagggtgtctgcgaccaggtgcgccctgtgcaccccacttgctgagagactgtggcgcttcacagtaagagccactcaccttaagcgcacccccctttatttcgacccccgaaa

SEQ ID NO: 536340 - DNA, 374 bp, Homo sapiens
ctcccactcatcgtaccacagctgagaaatacaccagaatgagcatggaagccagtgtgatgctgcacagatgtgttcctgtgatatcatgcccgactactgaccctcgactgggatcactaatggatattcaaatgatccaactccacacatctgccaaaaaagaaaaagtcatcggtgcgagcagtctcgattcaagactccctagctgcagaaaaccaatgttgtcagatgtcacaggttaatatattatatatgccacacaaaacaggaatagtacaggcaatgatcttccaaagaaagtctttacggcatctgtaacttctgggaatttcagggttatcatcttgccagtcagctcccactaaagtact

SEQ ID NO: 536341 - DNA, 325 bp, Homo sapiens
gaaagaataaatttgcattctttataaattacccaatctggccaggagtggtggctcacgcctgtaattccagcactttgggaggtcaaggagggcagaccacctgaggtcaggaattcaggaccagcctggccaacatggtgaaaccctgtctctactaaaaatacaaaaattaaccgggcatggtggtgtgcacctataatcccaggtactcaggaggctgaggcacgagaatcgcttgaaccgggaggtggaggtagcagtaagccaggatcataccactgcactccagcctgagtgacagagtgagactccatctcaaaga

SEQ ID NO: 536342 - DNA, 1405 bp, Homo sapiens
ggtagttcagcgccggcgctggtgttgcgaggcggggcgagagtgaggcaggctacccgaggtgcgggatcgtactgcgggagagctgaggcccgctttatcaccagggttgcttatcaggcatgactgacgatagtgcccggtcgtcgtagtcacggcatggctcctgacaggcctgagagcttgtctcgtgatgtccgttcgtgtggttgtcgataatggaagctggtgccatgaccaccagtggtggtccggagcaagaagcagctgtcgagtggcagaagagcggagctggggagggacgataggcatggcacgggggggcctggatggacagcgagagacagaagtagcccttgatgtgctggggtggagctcgcgattgctgtaggaagcgcagggaactatggttcagggttggggttgcggtgctttgcgaaccgttcggggcctacagagaacatggccttgacataacagatctagccgagttgaacccactggtgagcccggatgggaccccagtaccaggaaggacgcgcgagtcgggctcgcacggtgatagctttcgacgcaagaacccagggctgtgacagccccgcagggtacaacgatccactcccttcacgtccgcgagaccatcccgagcacacaacgtacacgacggcacgaacccgggcacgggctcggccacacaccccaagaacacgatccagggacagacagtccacatccaacttggcctagcaccaaattttacacggcgtggtccctcaaggatttccaaccgaacacgaaactcttacccattggttgccccgacggcacaattcccgcggtggcaacccgcttctcccaatttcacaacaacactggacgacaactcgccacacgaccccttacggcaaagctacaccgacatccaagggatcccccacttggcacaacacacccgcgctggcccgcacggccccattcaagggagcaacgacggcgaacgaacgacgcaggacagcacgacaccacaaacaccaacgagccacgggcgcaacacaaccaaacaccaaacacagcacagcaacgaaaacaaaacacagagacacggcacaccagcggacagacgcaacaagaagacacagacaagcgcacaccaccgcagcgacccaaaaaacagaggaacacacggcgcgagaaccgcgaccggaagccacgccagaccgcgccaggacgcgacgagacagcagcgacaaacaggccagccccagcggacggacggaccacacaagggcgcacaacacaaccgagagaagagcagaacagacgcagagcagcacacagaacgggagcaaccgccccacacacgcacaaccccgacacggcccgacgacgcgcgcgaccacgcacg

SEQ ID NO: 536343 - DNA, 247 bp, Homo sapiens
cttacgggttaaagcgattcgtgctcagcctcctgagtagctggattacaggagcccggcacacagctggctaatttttgtatttttggtagagatgaggtttcaccatgttgaccagacttgtctccaattcctgacctcaggtgattcgcctgcctcgtcctcccaaagtgctgtgattataagcgtgagctaccgcacccagccagattactgaattttgatgtaagaaataagatctttcggt

SEQ ID NO: 536344 - DNA, 110 bp, Homo sapiens
  misc_feature (12)..(12): n is a, c, g, or t
  misc_feature (59)..(59): n is a, c, g, or t
  misc_feature (84)..(84): n is a, c, g, or t
ttctaagtgccnttcgagggctgtgaccggcgcttcgctaacagcagcgatcgcaagangcacatgcacgtgcacacgagcganaagccctatctttgcaagatgtgcga

SEQ ID NO: 536345 - DNA, 287 bp, Homo sapiens
tcgcgacgtgtcatccctacttaaagacagatagcctacggtgtaacagcgtacgtacaagaaagttataaaatgtgtccttggttttactaatgataagatgaaaaacattcaaattctccaattgaacaaggtatgcaaggatttttatgttgttgttttttttttggttaaaccagtgcagcacaaaataacttacgggcaatataaagataagagctgaatgagcatgccactacgggcgaaggggggtcatttcacagcaatcagtatttttccccaatccg

SEQ ID NO: 536346 - DNA, 215 bp, Homo sapiens
atattgaagatgactgggagacaggtttaaggaagtgaggtttcgggctagagcttgtccaaagaaatgagggctatccctgaagccctgagggaggacagtccatgtgagttgttgtgactggagggtgtcagggtcagtccaggtgaaagcaaataggttttgggaatcagggtgtagggaaatggtaaagaaggcatcctccatggtgctga

SEQ ID NO: 536347 - DNA, 289 bp, Homo sapiens
  misc_feature (47)..(47): n is a, c, g, or t
  misc_feature (263)..(263): n is a, c, g, or t
actctagagtatcccccgctctcatcatcctaatcttacatcacttnacacacttcggtccttaacttgttaacttattttacagcgctgatggctgatctatgtaaaggtttcacggtaccaaaaacacttcctgcctataatacatcaaaacatgttcctgaatgtgtgtgaatatcatcaatgtctctgtcccatcttcttcagggttccgattaagctcctcaaatttgtggatctcacggattaagaacatccccatnacgcctggcgacctttgtgtccgcta

SEQ ID NO: 536348 - DNA, 714 bp, Homo sapiens
ccagcactgaagctcttggtatttattcaaatgaattaaaaacatgcccatagaaaaacctgcacaaagatgtttacaacagctttattcataattgccaaaacttggaaaccaccaagaagtctttcaataggtgaatggataaactattcatctagacaatggagtattattcagtgctaaaaataaatgcactattaagccatgaaatgacatggaggaaccttaattgcgatattattaagtgaaagaagccagtctgaaaaggctacatactatatgattccaatatgacattctagaaaaggaagaactatggcgacagtaaaaagtggttgccaaagaaagatcatgtcctttgcaggaacatggatggggctggaggccattatccttaacaaactaacataggaacaggaaaccaaattttccatgttctcacaagtgggagtgaaataacatggacacaaaggaataacatactggggccacctgagggtggagggtggggaaaaggggacgggaccggaaaagtactatggggtactaggcttagtacctgggtcactaaataatctgtataacaaacccccttgtcacgagtttacctgcacatgtaccccctgacctaatttttttttaaagtggttgcaggggatagggacataatggagattatatacattggctaagcatacatgacacaccgagtga

SEQ ID NO: 536349 - DNA, 416 bp, Homo sapiens
tagcatcttcatctatcagtcatcatcttcatcaagctccatcatatcattcatccatcctcatcgtttctcgtgttcctcatcttctccttcttcgtcctcctcctcttacatccacaccactccacctcggcatctgagtcaggtgcttcctggtcctctcggtcacagctactctccgttgttaaactggggcaggagcttgaagacactctctcggtagtcattcaggttggtaacctcacagttaaagaggtccaggcttttcagacattctaactttttcaaaggttccaaggtgctgatatctttcagtttatttccacttaagtttagatgtgtgagatttggaagtttttcagctaacatgtccagacctccaaagattctattttcactgagttcaagctttttca

SEQ ID NO: 536350 - DNA, 139 bp, Homo sapiens
aaatcgagctcgcccgtttaatatcacacaatactaacccttcccctctctgatgtcttacatacctcccaggagatgaagtgtattcttcactaggttaggcaattgggcaggtccccaagcgtggaacgtgtcctga

SEQ ID NO: 536351 - DNA, 168 bp, Homo sapiens
tgtaatctctcctaagatggaagtcccccaattgtgtttccccatagtggaatccctccaaatggaatcccccaaatggaattccccaaatggaatcgcccatatggaattccccatatggaatcccccatatggaatccctcaagtggaatccctggatgactactt

SEQ ID NO: 536352 - DNA, 741 bp, Homo sapiens
  misc_feature (119)..(119): n is a, c, g, or t
  misc_feature (156)..(156): n is a, c, g, or t
  misc_feature (177)..(177): n is a, c, g, or t
  misc_feature (182)..(182): n is a, c, g, or t
  misc_feature (190)..(190): n is a, c, g, or t
  misc_feature (193)..(193): n is a, c, g, or t
  misc_feature (198)..(198): n is a, c, g, or t
  misc_feature (214)..(214): n is a, c, g, or t
  misc_feature (253)..(253): n is a, c, g, or t
  misc_feature (264)..(264): n is a, c, g, or t
  misc_feature (278)..(278): n is a, c, g, or t
  misc_feature (294)..(294): n is a, c, g, or t
  misc_feature (297)..(297): n is a, c, g, or t
  misc_feature (299)..(299): n is a, c, g, or t
  misc_feature (324)..(324): n is a, c, g, or t
  misc_feature (350)..(350): n is a, c, g, or t
  misc_feature (387)..(387): n is a, c, g, or t
  misc_feature (408)..(408): n is a, c, g, or t
  misc_feature (453)..(453): n is a, c, g, or t
  misc_feature (464)..(464): n is a, c, g, or t
  misc_feature (519)..(519): n is a, c, g, or t
  misc_feature (636)..(636): n is a, c, g, or t
  misc_feature (646)..(646): n is a, c, g, or t
  misc_feature (663)..(663): n is a, c, g, or t
  misc_feature (691)..(691): n is a, c, g, or t
gcctcgtccccttctctctgtctcccttgcctcccccatcacgtcccctgacaccgacaccccattgctcccacagtctccccagtctccactttggtccccagcgctgtctgcccgangatttgcctgaaggctgcccccaactctgcacccgcnccccgagggccaccgaggacnatgantaaaaaanatnctgcnccgatggccccgccancccgaggagaggaggaagaagaggaggaggaggatgaanccgtccccganggccccagccccanccaggagcgccggcanaancntgttgtgcacccctcggcacctgcncccctccctaaggaataagctttcancttctttgataccaatgaaccggcgtgccaggagatnctgtttgaacctcagaacaanatccccgagctgtttgccattgtgcgccagtgggtgccccaagtncagaaaaaganagaagtaatcggaaatgagattctgcgccgaggctgccatgtgaacgatcgtgangggctgaccgaaatgaaactgctccactatgcgtgcaaagatggggcacacggagtcggggaccccgcggcagccgtgcgcctctcgcagcagctgctggcgctgggcgcagatgtnacgctgcgcnccgctgggaccaacatnaacgcgcttcactacgcggcctattttnatgtgcccgacctcgtgcgtgtgctgctgaagggtgcgaggccgcgagtg

SEQ ID NO: 536353 - DNA, 218 bp, Homo sapiens
aactacctctacgagaacacaaaaattagctgtgggtgatgccacatgcctgaagtcccagctacttggcaggctgaggtgcgagggtcgtttgagcaccctgaagcagaggttgccactgagctgtgattgtaccactgcattccagcctggtcgacagaatgagacactgtctcaaaaagaaaaaagaaacataactctgtcatcagacaatgtat

SEQ ID NO: 536354 - DNA, 122 bp, Homo sapiens
ctcaggagcttgcacctagtcactcttctgagattatccctggagaacacggagaacaggatatcttaaatactcaacagagaggctgagcagagcaaatggggggttgacctcatcccgta

SEQ ID NO: 536355 - DNA, 188 bp, Homo sapiens
agggccaaatggtctgaacacagctccgtgaagacctggagctgactgaatgaattattcgggacccataggatggctgcgtcacttctggtgccttcgtgttcgaggccagcacaccaagaccactggccgccgtggccgcaccgttggtgtgtcctagaagaaataagtctgttggccttatcgag

SEQ ID NO: 536356 - DNA, 359 bp, Homo sapiens
agataaacataatttccattaagaaaatcttgaggccaagtattgtggctcactcccgtaatctcagcactttgggaagccgaggtgggaggatcgcttgaggccaggagtgcgacaccagtctgggcagcctagcaagactccgtctctacaaaaaattaaaaaaatgagccaggcacggtggcatgcgtctgtggtcccagctgctttggagactgaggctagaggatcgcttgagcccagaaggtcgaggttgtggtgagcaatggttgtgccactgcactccaaccttggtaacagagtgagccactttgtctccaaaaagaagaaaaaaaaacctgaaagatttaacgcataat

SEQ ID NO: 536357 - DNA, 955 bp, Homo sapiens
gggcggggtgtttttagcagagggggaaggggtgttcagggaaactctacattctcgagtatgaagaaactagacagtcagacctccaggactaagatgaagtgagcctagaggagatcgggtgtgggagtgcttctgtcgttagccgggtgcagtgctgtgtgtatctagttccagctacttgagagggtgaggcatgaggattgcttgagtccacaaagtggcagttgcaatgagtggagatcgcgccactggtctccaccctgggtggcagaggggggcgctgtctcaaaacatagacaaaaacaaaatgcttctgtcaggtaacaatctttattacagggcttgtagtctttctttctcagctggatggtaaggtggcgtggcaaatggaaataaacggtgtttattatccttgtcgttgtcgagaaacgcaaacgaaatgggcctcgaggtgcctaggcgggggcagctcgtggggcgcggtcgccgtttaggtcggggtgaactgcgatgatgcttcgactccctgcctgcggtcgggccgtctgctcttgccggtaggagcgactccgttcagctacttttaaagggcggtgatcccggtatctccccggagcggcgggatacgcactggagagacgtcgtcgatatgacgggcccgccaggggagaaactcgagagcggccgcgcgggtggcgtagttgcgtgaggtagcgcgccgctggcagatgtatcgaatacgctctataaccacaagtccgtggtccccagcgcggtgctggctgcccgaccgactctcacggccgctgtggtgtgcacgggtacgtagaacgtgatgcgaatgcgcgccgacaggtattttcgttgcggacgcagcggattgtgacgccttctctgtcgcgcggctcgcggcgcgcgccatcggatggcggtatgggtcgcccacgccgct

SEQ ID NO: 536358 - DNA, 234 bp, Homo sapiens
acggatgatggatagagggggtctccttctcattactcgccttcattgcgcgctggtgacgaacgactgcttgggacacctgtgtgatctgcctcgtctctggctatgtgtggagtcgtgagcctaacatgcgtgtactggcgccttggtacttactaccctttctacatctccatgcaaagccctaacaagagtacggggaaagtactaattttattattattggaaacagag

SEQ ID NO: 536359 - DNA, 136 bp, Homo sapiens
aaccttcacaggcttcttgatttacccctgccacagccttcccttttcatttacctgaggggagaggctagcctcttaccatagtaggatgctatatgtttagcccaaggacagctatagagactggaactgctgt

SEQ ID NO: 536360 - DNA, 313 bp, Homo sapiens
  misc_feature (54)..(54): n is a, c, g, or t
  misc_feature (64)..(64): n is a, c, g, or t
  misc_feature (132)..(132): n is a, c, g, or t
  misc_feature (192)..(193): n is a, c, g, or t
  misc_feature (205)..(205): n is a, c, g, or t
  misc_feature (236)..(236): n is a, c, g, or t
tgtattttttgtagagactgggttttgcccggctggtctcgaacgccctggctncaagcagtcntcctaccccagcctctcacatggtgggattacaggtgtgagccagtaatcccagcactttgggaggcnaagaagggaggattacctgagcccaagagttggagaccagcctgggcaacatagtgagannccatctctatanaataccaaaaaagttagccaagcatgatggnatgctcctgtggtcccagctacatgagcggctgaggcaggaggatcacttgagcctgagggttcagggctgtagtga

SEQ ID NO: 536361 - DNA, 260 bp, Homo sapiens
  misc_feature (42)..(42): n is a, c, g, or t
  misc_feature (48)..(48): n is a, c, g, or t
  misc_feature (52)..(53): n is a, c, g, or t
  misc_feature (61)..(61): n is a, c, g, or t
  misc_feature (184)..(184): n is a, c, g, or t
  misc_feature (220)..(220): n is a, c, g, or t
  misc_feature (231)..(231): n is a, c, g, or t
  misc_feature (258)..(258): n is a, c, g, or t
gcgttcctaggtggtcggtctcagctgcctgggtgtggccgncctagnatannaaccaccnacagtactggaatccccgctgctgctccaggcaagttctggttgattaatgagggatggggtggtccctcaagccttcccctaccttttgtggaaccagtgatgctcaaagacagtgtccccnccacagctgggtgccaggggcaggggttcctcagtntagccggtganccctgataccaggagcctgggcctccntg

SEQ ID NO: 536362 - DNA, 179 bp, Homo sapiens
ctgagagaataggagaatgtaggactgctgtgattaggactggatcagacgaagaggggcgtttggtatttgggttattggatgggggttttatatttgataatatgtctgtgtatgaaatttgattggccctctaatgatagatggagacaccatgctagggtgtaatggatgaagat

SEQ ID NO: 536363 - DNA, 259 bp, Homo sapiens
ggtgggagggagccaggttgtgatggagggagttttacaggaagcagacagggccaatcgtcgaatccgaattcctgtgtctgaggcaacaacgtcatcggggccacatcgatgatgggcaggcgtgacgtcttggtggttatgttttcaatcactgtcttgccccaggctccggtgtgagtcgtgcagcctgtcgactgtgaccgctgtaggtgaacgtctgcgctgttgccctcgtccgcggatctcgtactctcga

SEQ ID NO: 536364 - DNA, 292 bp, Homo sapiens
accggattgttacgtgtggcggtgagcgcctgtgaagcaggcgaatctcttgagcccggggaggcggaggtagcggtgggccgagatcgcgccattgcactccagcctgggcggcgagagtgggattccatctcaaaaagaaaccaaaaaaacacaaaaaaaaacatgccgttggagtactgtgtttaaggtgttgtccacggacacttacaaccctgtagcatgaataatgtaggttttacattatcgaatctggtgactgtattatatatttcgcttctaaaagacggaa

SEQ ID NO: 536365 - DNA, 413 bp, Homo sapiens
  misc_feature (210)..(210): n is a, c, g, or t
  misc_feature (385)..(386): n is a, c, g, or t
  misc_feature (394)..(394): n is a, c, g, or t
  misc_feature (397)..(397): n is a, c, g, or t
accttgttatgtgcagccccaacatataaaggcctgtgcctagattttggctttgttgtcattatctcgctgcctcgcccagagctcagtttgctgtcagaaccattgctggtgttgagctggggttgaaagccagctgagatcactgtcttaggggaatgcaatcatcagcatagagtgtcttgagcaggacagacctgggtagggctnccacagcaggggctgttctaggggccaaggaaaagaaggaattcacagagtgaagggaagaggctaagaggaaaggtttttgatgaaggcaaagtttaccttctttacatatctgtctagggattggtcccaccattatatgttagaaatgtgaacaatcagttatttccttttnnaccataanttncaatcacatgttgagt

SEQ ID NO: 536366 - DNA, 961 bp, Homo sapiens
  misc_feature (326)..(326): n is a, c, g, or t
accgggtggccgagcgggcgttctgttggtgctatggtgttcttgtttgttctttcggttcggtgctttttgtttgtctttgtgctgtttgtctacgttgtgtttagctcggtgtcggtgggttttgtctcctgtgtccgggtttcgctgccgggttacagtttctccctcctcgcctgtcccgcccgtggcatcagttttgggggttcctgccgttccttcccggtccccgttttccctgttgtgcgtctttgctttgtcctagtttgtccttttgcccatgttatgatctgttcttctgtatgtccctcgccggggaagcagtngcttatcagaaccctggcccagtggccgccagactacggggactacgatcttcgggatgctactcccgggaacaacccacgggtggcaccagtacaccgtagcccgtgtgaccccgaggctcccggaggcccctgccggcgttctcttccaccaagcgccttgccctctggccccgtccttcttgcgccccgccagagtcgcccttggtgtcttggggaatggggtctaatccccggggctgcctcacctctctcgcgccctcatgctctccccattttgaggggcttctcttctccctccataagggcccggcatattgtgtttgctcggattcaacacggcgaccatgaccttgttgattgttgctgttgtgtgcccccgctcacccagcctgtccacctcctcgtgttgttcctgaccttgcgttgcctgtttgtgaaatagatgccccccctgcccttgatgcatgaccatggagggctacaagtgactgaggggagaatcccctcctgttcactctccccaccctgctcccgacccctcagcttccccgaccctcatgccgttggcttgtaaattttccccggagctgttttactgtctacttttcaggattaaaaaaaaatccaaacgt

SEQ ID NO: 536367 - DNA, 533 bp, Homo sapiens
gcatagttgttcttgtgtgccattgtcacctgcaaagagctattcattgaatactttaattattatatcttcctaataataaagttccttcacaccctcctatcccatcagtcttgtcttttccttcctctttttttatttggaaatgggttcttgccttgtctcccaggctgaagtgcagtggaccgatcttggctcatggcaccctctgcctctgggatccacgcatttctgcctcagctccccaaattgctgaaattacatgcatgacgcaccacacccagcctgaaatctaatactcaacatcacataattctaagcagtaaatgaatgcccattaatttgcttaaaaatttgtccctgtaaaagtcaaacacatggaacggtccttgcaatcatcacttaatccaacataatttggaagtgttctgcaccatacacccctagggacacctattttaccaatggtctaaggattgaaacaacaccatggatatgatccagtgcccctccagagaagaaccatccgggca

SEQ ID NO: 536368 - DNA, 955 bp, Homo sapiens
gctcacgtagctacgactgatggagtctgcctacacgtgacgccgtggaccagacgcgtacgtcccactactgatctgtggcgcgtactgggggagttctcagacactacgttggctacaggcgttgcaggatacgaattacgcacttgcagggccgcctatgctgggcgctggtatgcatggcatagtccggaattagaccagacttagttagttactaaatatagagagccgtggtcatgtaggactcattgccgtagttgcaacacaccaatatgacggcgactcatcacgccgtggaactcctagcaggatccagtaattgttgtcagcacagacgactcctacttctaacacttcctctgtgcttatcgaatgcggagagcagcttgttactcgccccggagttccgcctatggagcaggtcatagagcatccctatggaatgaagttgcgtaccgacatcaggcgctaaggcacttaggttgaatattggaataatgtctttccgactgaccgcatatatctaactcgtccagtcgagttcgcccgccttgcaagagcccgtatcaaaactgaatcaatacaacaaatacatcaagggggaacaaggaacacaactgcagagggattgtagtgtgaggcgtgtccctggcatccggtgaaaccaaggaattggctgccacaattgacccaggaaagtggacgaatgaaagcaaggacagtggagccacccgtgggggaccattggagtgagcttagcggggcaactacgctggtgttgttgaaaataccgacgcggacttagaggtaccatggtcactcgcccttcaagacgctccgggggaggtgaattgccgtggggcccgacaaaaccctaggcgacaaaattcatgggcgtgcaaagtccctttgccgagctacacacaaacaggccttactgggtggtcagaag

SEQ ID NO: 536369 - DNA, 856 bp, Homo sapiens
  misc_feature (620)..(620): n is a, c, g, or t
  misc_feature (673)..(673): n is a, c, g, or t
ggggggcctctctagcttgcggctgtgtctatggtcgggccctctggcgtccagctgctccggaccgagctcgggtgtatggggccgtaggaaccggctccggggccccgataacgggccgcccccacagcaccccgggctggcgtgagggtctcccttgatctgagaatggctacctctcgatatgagccagtggctgaaattggtgtcggtgcctatggggacagtgtacaaggcccgtgatccccacagtggcactttgtggccctcaagagtgtgagagtccccaatggaggaggaggtggaggaggccttcccatcagcacaggttcgtgaggtggctttactgaggcgactggaggcttttgagcatcccagatgttgtccggctgatggacgtctgtgccaacatcccgaactgacccgggagatcaaggtaaccctggtgtttgagccatgtagaccaggacctaaggacatatctggacaaggcacccccaccaggcttgccagccgaaacgatcaaggatctgatgcgccagtttctaagaggcctagatttccttcatgccaattgcatcgttcaccgagatctgaagccagagaacattctggtgacnagtggtggaaacagtcaagctggctgactttggcctggcccagaatctacagntaccagatggacttacacccgtggttggttacactctggtaccgagctccgaagttcttctggagtccacatatgcaacactgtggcatgtggagtgtgcctgactctagcaggttgttctcgaaactctctacgtggaactcgacagcgacatcgccaactgacctatgtgtgcacaggtgc

SEQ ID NO: 536370 - DNA, 179 bp, Homo sapiens
tcaaaatgacttcagaaactcactgtgcttcagacctactaagataacaaagtacatactcctggaatggaagaactcaagtcaatgaaataaaaagcacaactgagagcttcaacaatagactagatcaagcagaatacagaatttgtaaaaccgaaggtatcttaacccaggcagac

SEQ ID NO: 536371 - DNA, 903 bp, Homo sapiens
  misc_feature (667)..(667): n is a, c, g, or t
  misc_feature (720)..(720): n is a, c, g, or t
ggggggcctctctagcttgcggctgtgtctatggtcgggccctctggcgtccagctgctccggaccgagctcgggtgtatggggccgtaggaaccggctccggggccccgataacgggccgcccccacagcaccccgggctggcgtgagggtctcccttgatctgagaatggctacctctcgatatgagccagtggctgaaattgggttgttcggttgcccctcattgggggcaaccaaggtttgggtttaaccaaaaaggggggccccccccgggtttggaatttcccccccaaacagtggcactttgtggccctcaagagtgtgagagtccccaatggaggaggaggtggaggaggccttcccatcagcacaggttcgtgaggtggctttactgaggcgactggaggcttttgagcatcccagatgttgtccggctgatggacgtctgtgccaacatcccgaactgacccgggagatcaaggtaaccctggtgtttgagccatgtagaccaggacctaaggacatatctggacaaggcacccccaccaggcttgccagccgaaacgatcaaggatctgatgcgccagtttctaagaggcctagatttccttcatgccaattgcatcgttcaccgagatctgaagccagagaacattctggtgacnagtggtggaaacagtcaagctggctgactttggcctggcccagaatctacagntaccagatggacttacacccgtggttggttacactctggtaccgagctccgaagttcttctggagtccacatatgcaacactgtggcatgtggagtgtgcctgactctagcaggttgttctcgaaactctctacgtggaactcgacagcgacatcgccaactgacctatgtgtgcacaggtgc

SEQ ID NO: 536372 - DNA, 476 bp, Homo sapiens
tgatttcaaaacatgacagatggagtggaggtggtttacaaaaacgtttcccctttacatgtcttacttattctggaatactgaagggtgaagtacattgaaacaaataatctctccctggatttctcatcaatgacattattgacattgggcgtgacaatgctttgttgtggaggacccccttgtgcattatagaatgtttagcagcatccctgtcttcttacccactagataacaggaacatcctgcaccccatccctaactgtgataatcaaaatgtctctagcatggaaaatatcttctttggaggaagaatttcccccattgagaaccgtcttgctcttaacggttcctattaggtaggttggaaataatttgccaataaaaataattattttattggcagggcgcggtggctcatgcctgtaatcccagcactttgggaggccaaggcaggcagatcacgaggtcaggaa

SEQ ID NO: 536373 - DNA, 197 bp, Homo sapiens
gaaattttttattgaagtaaattttgaaatgatggagaaatttcagaagcataataaagttcacaataaggataatactttatataatgtataaagtatatataatataattgcatatgcgcatataaaccgcacattcatattcaaacttaaaattgacgctttttttttaaaggcccaaattgtacagtgataca

SEQ ID NO: 536374 - DNA, 105 bp, Homo sapiens
gtcgatcacgtatcttcacaccctccgccttgtagatgacgttaggtccacttcatcttcgcctccagctcctgacgccttcccctcatcctggccgcgcacgaa

SEQ ID NO: 536375 - DNA, 201 bp, Homo sapiens
agtcgcacgcactgggtcaatattactgtgccgcagtactcttaaaactaggcggctatggtataatacgcctatacactcattctcaatctcccctgtacaaaacacattagccctaccccgttccttggtacttatcccttatcacggctataatttattatcaaagctccagtctgccgtacgtacgatacaggaccg

SEQ ID NO: 536376 - DNA, 447 bp, Homo sapiens
  misc_feature (6)..(6): n is a, c, g, or t
  misc_feature (26)..(26): n is a, c, g, or t
  misc_feature (48)..(48): n is a, c, g, or t
gggaanaatttagggatgggaatacngggtgaaaagacatagatgtcntttgcccctttaacttttcccagaaagatgtgccagatttaccatggctatccagcactgtgagagggatctgggttctgacccagttgcactacgccccacgtttttgttttacttcatttttttaaatccctaaaagtcaggtacagggtctttagcctgtaatactagcactttgggagactggcgggaggattacttgagctcaggatttcaagaccagcctgggcaacagagtgagacccagtctctccaaagaaaaaaaaaaaaagaaagaaagaaaaataggcaatgctcatgcctgtaatcccagcactttgggaggccaagacaggcagatcacccgaggtcaagagtttgagaccagcctggccagcatggtgaaaccccgtctctact

SEQ ID NO: 536377 - DNA, 1391 bp, Homo sapiens
  misc_feature (184)..(184): n is a, c, g, or t
gcactactagtgaggagtgtaccagccagtcagcggagagatgctgggtgggcatgccatccgcattctgggctcgagggagtcggagaatggacacagccctacctgtcgtggtttggccaaactctcctggacatcactgcacatgcgaggtgtacgaaagtggctgtctttgagaattagntcagtacgtgacaggatgtcaatctgatggcaatcgacctcacgacagtggtaggctggtagattccacaagcacctgatgtcagtcactgggcaaaagagtctaatgtctgccgtgtgaccgtggtcggtgccaggatccatggagtggtcgagagtcgtgggtaaggaaatatgcagtttttacttctgtataaagcttcggcgtaagggactacacaggttctcactgacctacgtggtccctgaagggaactgggagttagggcctaaagacgaatcagtagcctggtcgtgttcccacagggaagagacgcgaacgtcccgtagggcttactagtcctcgaagcgcgttgctgtggtctaaccaggtgtgcatggaacgagtggcgccgaccggttggagggcacagcccggaattgtccctaggacagccaatggaggaccgttccctatcgccgccctcttggtacacgaaacgttacgtgttggccccaggtacgcgaggacgattaacactttgggcttgcgcggcccataggctttgaagcgtagattgaggtgccacgcgcattctcagaatggaatacgcgaattcccaattccgtttccaaagggggcgaaaacaaaggaaccatggagagagcacaccacggggagaattggacaataggtcgtaggaggttcccctaaaagcccatagggggacttgagaagagaggtcttgccaccccccccatagtcagaaggttttctcgaccacagccgaaggataaaggcggattcaccagcgaggctgagaagaggatagagggccgttatttccgcgaagcaattttgtgggtgtccacgacgcgataacacttccaaggatgtgggaacgcacgcgaacatgtgggatgtgtttcggggggaacggccgccccatatgtgtggaagaaaaaccggggccaaggggtccttcccccaagggggccccccactataggcgaaattcatacagtacgggacggtttttgggcaaactggggttcacacaagaagcccgatcatttccttgggacttcttttgggctgacttcccaagccacattggacgttccttactaaacttaagggaacacagtgagagcaactcttacataaccggggtgggcaaccatcctatggacttaaagtttccaattggttggggtttgggaagccc

SEQ ID NO: 536378 - DNA, 434 bp, Homo sapiens
acttggtgaagttccacttgatggcatttcccaggatgccctgtgcccttgggctggagtcttcactccacttccacagcgggtgggcgtcgtccccgcttcacgcagatcttgctgaacatatcgcactttgaccgttgtagcccgcggcgcaactctctgatctcttcgttactccctggctcctgcttcccgaactggttacaccgggacggccaggatccgcaaaccacactcaccgtatcgggcgtgcaggtcgacgagctgacgtgtacgcttcacttcggtctcgcctcactgggaggccacgttggtgacgatgcccacgacgccccggctacttgtccaggcttaccatgtgcccgtcgactgtcctcggcggacaactcgtgcctggagcgcgcacagcgccagtcgtcccgaaactgagacag

SEQ ID NO: 536379 - DNA, 548 bp, Homo sapiens
ccttttgttggtgtgttcttctctcacaaacccccgtgccttccccccccacccccccgtgcgcgcgcgcgctcctctttttttccccctttccccccgcccctttctcttttggaggcccccttccccttctctttcccccccgtcgcctctcccccccccccttggcgccgccccctccctcccccccatctctcccccctccccccttccccccccccctttttctctctcctggcccccccccctccccccgtgcgccccgtgcgtcccccctcccgcgggcgcctctggggccgccccctctacgccgccgcccccccccccccggcggcgctcgcctttctcctccctcctcctcccgcccccgcgtctcttccccccccccccctgggcccgccgcctctgaagtccctccgccctccttccccctccccccctgctctcctcttgccgccgcccgggccgacccctcccccctctcgccgccccaccctcttctcgtcgcgtgcctctcctccccctcccccaccgctgcccctttctcg

SEQ ID NO: 536380 - DNA, 503 bp, Homo sapiens
atttggctgccagacgtctcctctcagccaatcctccgcttaggcccatttgatgcctcactggggctgggcacacatcctgcagacacagttggggtaccgtgggccggacgccggcaagcagagggtggagaatggatgctaggtcggcagaaaggctgtggccgccaaaggtggagactgggagcaatgagaacccgtgtctggcgctcagagtctgggtagagcagacatgagaaaattgagtgaagtgatcccggggtgtggggggctaaccccaggagcaaacaggtgggcggctattggaaagagcaagcggaggaggtaacttgaacgggctgatgagggaaggccccactgagaagaggttgctgagctgaagaggaggccaccaggcaagggcccggggcgccgcttagagtagggtagctagtggtggggtggagggatcctgaaggaattgctgggatgggctggctaaggcctgggtggcaggggatgca

SEQ ID NO: 536381 - DNA, 1030 bp, Homo sapiens
aaaaaaaaaaaaaacccaactttcttgtaccaaagttgtgcggccgttcgcgagaactagcctgcaagaaggagcgtctgattcacctcgggacaatgtcagtgtgcgggtgctgcccccagttgcccacggaagggctgacaccagaatgacgtcccagttctggctgacagagtccggcactccattgctcactgtttcccgggaaatctccactgtatggccggggttggtggtgactatctgaagaagcctgggggcggtgggtgaaccctggctctgagctcttccttcccatttgtccccattttccttccccaaccttacccacccagttgggcccttgaaagcagggccaaaccctacttccttgtctccccttcttccccgattattctcctcttgggaatcttcaacttctgaagtgaatgtggatacagcgccattcttgccccctatttggccccatccatggactcttgccatcggtgcagtctcaagtccttgacccccagctacctacgtgtctagtctgtagggacagttgcctccccctacaatctccaagtgactcaagccttacacaaagggaggggacacattccaatccccaagatggaagtactcataacctcatgtaggtcctaactatacccctttaaccccacatttggccagtggaactcataccataccttggggaacaaaatcccgccacaagtcaaaggttcccatggattccaataggacatcataccattatgtagaggaggcacttatcagaccctcatggctgggaaagctgataacctgaagcaactcccagagtcatcttggagaagcaatacacttaagaactatcaaacttaccgcacccaagtgaaggccttcctgtcacggtgagggtatgacaccattagtaatacagaaggtctcacaatgcgtgcacagtggtccagcatgcccccagggtcggtgccaatcgtcgggaatacaagtccagactccacacttatgggtgcagggaccc

SEQ ID NO: 536382 - DNA, 1009 bp, Homo sapiens
cagaggcaggactgtggccaggaccaaccttcaattccattccaactcagccttatgcattatgttaggatctcgtaggcttctttattaatacttattgttggggattagtttcatgctgcacataatgggcgtttgcacttggtactgacccaggacttttggagccacaccacacatgcggaacgactaggcctagagcaaggtcgagtcattactaaggagctttcgtcaagccaccattagcgacgcggtgttcatcctatgaggactcaccaccaacggggattcttgcgacagacggcagctggcacagcaaggccactgaggcagacggcgctctccttgaagccaactttgtccaaataggcaacacggacgtgcggccatcgcgcctgacaacaggcaacacaagccacacggatcgctggcacattaggcttatcggcacatggcgctgatactacgggttccagcacagcgcacggtacctgggaatgtcgcttggaggagcccctataaccgcaccaggggttctctcgcagcgttactttgtctcagttccttgcgtacaacaaattgttctcagtacttggcgcccctctacagggcaccttggccaattttgcgaaccacttttacaggcaggcacaagcggcttggccacgaacgtggcccatgggagcttataaccaccgatggcaccttggaacgatcataccaaatctcgttgacgcgaaatgggcacacttctttcattggccctacagagtcgaaaaacacagcggtcgctgcgcctgttgaaactagctaagaccattgggggccacaaacaccattagagagcacgcccaggattagccatatcctaagagtccaattcgacattccacacctatcacttacaagcgaggcggaacaagctacgccaaattgatcagaaaacaccctatgtgaacattcacaccggtcgcacggcgctgaacgacccaatccacacggttccttg

SEQ ID NO: 536383 - DNA, 2378 bp, Homo sapiens
ggaaacaaaataaccgtaccgcgacgccgagacaaaccggacccgcaaccaccatagaacagcacaaggtacaatataccaaccacagccaatcctaaccctagtagcaagcctacctagggcaataccacgtaataaccctacagaacctatacccatacctatacctacagcgctaccacccctaataaccgtatagctaccaccctagtcctaactacaccaacctactaatactgtaccgcatgcctatacagtagacaaccccacgcggcgcctaggcccaccaagtacccccccaacccaatagctcaacagcaacagccccatattccctctagcacaccccctctaacctaccttaactaaatacctatcacccataaatagtctccacccctactctttcctagacttcctaccctagcatatcagcgcgtactacttattatcaatttgcttataccaccaactcaccacataccactgcacctacttactttcctttactactctcatgacatctatcccccaacctcttacccgcgttctttctccccccatataaccctacacttaccgtctctaccctccttatggctgctctattaccccgaacactcatggttttatggctctatatgctgcttagcgcgcaactccgcgcccaacgcgcacggcccctacacttaagccccacctcagccccaccaacacccgccctagagccccccatatgttcccacctaccacactcgcgccccacggcccccgctacgcgcaccccccgcaccctcctacaacccctctaggccacccctaaggtacgtcccaccagccacgcctcccaccattaccaagctccgcaagcataccactcctaccctctatatctctccaccttacttcactccccacttattccactatccatcactaatacgctatactctacacccccattctgtaaccacatccatcctctcatctcttatttcctaacctcctcatataataccataactctaatgactactactccctcataactgcttcgacctcatactcctactccatatcttcctctctcactattatcttatctaccatcctccacactctcttcccctactctccctgccactatcatttaagttcatctctaccactactctaccctgatcgttccaaatactacttcccctgcactcccacatccactaacctccactgctctctcatctcctcccaccctacctatatctccctcgcacctctattatccaactcccatcacctctttcccatcaacctctctctcttctctactgctctcctactccaataccttcctcgttcctccatctccacatctctctcctctacttcttccacctcccatctactctcttctcccaattatcttttatccacgatctgctctacattgccctcctccctattctttcctcatcattctctataatcttatctcactatctacctttatgtagcgtacctctcctctctttcatctcctcctctcctacctcaccccttaacttctactcttccactctattgctccccctccttatattgctcacacgactccctccccacccaatctctcacctccctcccatctcatctcttcctcccctcctcttcactctcatctccatcttcactcccttatatacttcctactttcttcatcaccatctcttctctcctctatcctagcctcttctctacctccctcttcctcactcacttcctctactatattctctacctctcctacactcatcttcatatcaccaaccctccctcctttcattattaatctttctctatgtttattcactgctttatccatcaaactatatatatcatacccatctatccacttacactccccataacactactctctttcttgctaattcatctctctctctttctatatttctatcctccctccctcgtatcgtttcttcacttatctacttctcgctacccttctataatcactttctttctattaccaatatccccctcctcctatttcctcactatctctttcctcctttactatctagctctccctccactctcctcttactacctcatacactccctcctcaatacactcctatctcgtacccctacttctatcccgcatcacaattctctacacatatactatgttacttactctccgcccccttcataatctcgctcctactcaccccctcactaccctcactctcatctcatactacctatcccagccctttcattgtctccctctcctcactctaaataacttctctctccctctttcctcctctctactctccatctctacttac

SEQ ID NO: 536384 - DNA, 408 bp, Homo sapiens
ctaaggtgatgctacgaagcatgcactataattaccaaactaccatttaagacaacgaaactgacgcttagacagatccacgttgctgtgctacaacgtcatacacgcgagcaggtgcagagctagagatgtgaagctggaagttctgcctttggagcccccgctcttaccgctatccagcgccaccactccacctgctccgcggaggcatccactcacacatgctgccatgtgaacagaggcctctcgggttctaaagcatagtaacaggtcacagtgatatctgaggtatgacattgtgcaccatttagcccgagccctcactgtggaaaaccataggccaggacagactctcgggtggggacatcacgtaccagcatcttcctcctctgttggcgggtgtggctg

SEQ ID NO: 536385 - DNA, 82 bp, Homo sapiens
ggacttcttaaccatctttttgtttttctttttcgaactgccatagtcactatcgtcatcatctcccttctgtcgtcttctc

SEQ ID NO: 536386 - DNA, 859 bp, Homo sapiens
  misc_feature (63)..(63): n is a, c, g, or t
  misc_feature (65)..(65): n is a, c, g, or t
  misc_feature (90)..(90): n is a, c, g, or t
  misc_feature (106)..(106): n is a, c, g, or t
  misc_feature (108)..(108): n is a, c, g, or t
  misc_feature (138)..(138): n is a, c, g, or t
  misc_feature (151)..(151): n is a, c, g, or t
  misc_feature (154)..(154): n is a, c, g, or t
  misc_feature (157)..(157): n is a, c, g, or t
  misc_feature (163)..(163): n is a, c, g, or t
  misc_feature (165)..(165): n is a, c, g, or t
  misc_feature (169)..(169): n is a, c, g, or t
  misc_feature (172)..(172): n is a, c, g, or t
  misc_feature (174)..(174): n is a, c, g, or t
  misc_feature (195)..(195): n is a, c, g, or t
  misc_feature (216)..(216): n is a, c, g, or t
  misc_feature (219)..(219): n is a, c, g, or t
  misc_feature (221)..(221): n is a, c, g, or t
  misc_feature (233)..(233): n is a, c, g, or t
  misc_feature (252)..(252): n is a, c, g, or t
  misc_feature (280)..(280): n is a, c, g, or t
  misc_feature (283)..(283): n is a, c, g, or t
  misc_feature (285)..(285): n is a, c, g, or t
  misc_feature (303)..(303): n is a, c, g, or t
  misc_feature (319)..(319): n is a, c, g, or t
  misc_feature (322)..(322): n is a, c, g, or t
  misc_feature (340)..(340): n is a, c, g, or t
  misc_feature (349)..(349): n is a, c, g, or t
  misc_feature (351)..(351): n is a, c, g, or t
  misc_feature (354)..(354): n is a, c, g, or t
  misc_feature (371)..(371): n is a, c, g, or t
  misc_feature (393)..(393): n is a, c, g, or t
  misc_feature (397)..(397): n is a, c, g, or t
  misc_feature (401)..(401): n is a, c, g, or t
  misc_feature (403)..(403): n is a, c, g, or t
  misc_feature (409)..(409): n is a, c, g, or t
  misc_feature (413)..(413): n is a, c, g, or t
  misc_feature (427)..(427): n is a, c, g, or t
  misc_feature (442)..(442): n is a, c, g, or t
  misc_feature (453)..(453): n is a, c, g, or t
  misc_feature (489)..(489): n is a, c, g, or t
  misc_feature (536)..(538): n is a, c, g, or t
  misc_feature (550)..(550): n is a, c, g, or t
  misc_feature (555)..(555): n is a, c, g, or t
  misc_feature (565)..(565): n is a, c, g, or t
  misc_feature (567)..(567): n is a, c, g, or t
  misc_feature (577)..(577): n is a, c, g, or t
  misc_feature (580)..(580): n is a, c, g, or t
  misc_feature (583)..(583): n is a, c, g, or t
  misc_feature (585)..(585): n is a, c, g, or t
  misc_feature (588)..(588): n is a, c, g, or t
  misc_feature (595)..(595): n is a, c, g, or t
  misc_feature (598)..(598): n is a, c, g, or t
  misc_feature (605)..(607): n is a, c, g, or t
  misc_feature (609)..(609): n is a, c, g, or t
  misc_feature (633)..(633): n is a, c, g, or t
  misc_feature (684)..(684): n is a, c, g, or t
  misc_feature (721)..(721): n is a, c, g, or t
  misc_feature (808)..(808): n is a, c, g, or t
ggcgggcaacacaagcaccagcggcggggactccaacagcatctgcccggccccctccacgangnccaaggccgaggaggccaagaagcnggcgggccgcgcggcngnggagaaccacgtgaggaataaccaagtgcngggaattggaagnggntcnacaatngnccangcngngcagcgaatagctgaaagggngaagcaagagaatctgaaccncgncngtattcccactnccttccaggcccgccagcncatcctgcagtatggcttgaccctcagngancnggatcgacacccagagancgaccttgccatcganggngctgatgaagtagatgcngatctcaancncancaaggggggcggaggcngcctgacccaggagaagattgnggcnggcnangcgagncgcntcatcgtgatcgcngatttcaggaaagantcgaagaatcncggggatcagtggcacaagggaatccccatcgaggncatcccaatggcctatgtcccagtgagccgagctgtgagccagaagnnngggggcgggggngaacntcgaatggcngncaacaaggcnggnccngnggngacaganaangggaatnnnancttggactggaagtttgaccgggnacacaaatggagtgaagtgaatacagctatcaaaatgatcccaggtgtggnggacacaggcctattcatcaacatggctgagagagtntactttgggatgcaggatggctcagtgaacatgagggagaagcctttctgttgaccctgcaagagcagagtgtgttcaccttgagtntccagcccacagccaaggtggacgtacctctccaggagcctttgccttaat

SEQ ID NO: 536387 - DNA, 106 bp, Homo sapiens
tgattcttataaatcagctgagttaatttatagataaggtaatcttaaattctctcaaattgttctaatactccatgaccttaggtgaggattttaccttaatcac

SEQ ID NO: 536388 - DNA, 509 bp, Homo sapiens
catggaagtgcagatccaaacttaccgatgcaaacctgtcatccgaatcagacccgattcttgaccacctgttttccaagagcatctggttggagggagccagggccaagggccatctcctctggttacctggatactgacaaccgttgtgttcacattggcaggtgtgcacacagttatccgcactgtattatggtgctggtaccatgagagggtgcgttcacaccaagggcacgttaagatgcgaggtggggctaagacctgcttctgagattatgaggtggctgaccctcacagggcctgaactctcacagcagggctcacccccaagcctgaatgcttagctatgactctctttggacaataaaataaagtgcattactgaacaaagagtagctcaaaaccagaatcagacaaatcgccaatgcttttcctttagctaaaagacaaaagataacatgaatgatgtgaatgccgaaacttaagattaagggaaatgcgtgtggagg

SEQ ID NO: 536389 - DNA, 319 bp, Homo sapiens
cgactcccggcaggcgccgcagtggtgaaatccgttctccaatagaatccataaaatagaacctcaatcgctaatcccggtatcgggatcactttatgaggttctcccccatggcattcactccccttgtccaggcccatctcgacgcgtgggttgcctgcgccgctgactttggcccatttctctcgggccaggaaaccaccctcaccctcaacgagcagcgcaaggcttatgagcaggtgcttgttcccatccgattcccgccggtgtcagctttgtgacgtcgatatgggtggcataccaggcatgatgtcgacgc

SEQ ID NO: 536390 - DNA, 576 bp, Homo sapiens
aaaaatatataaatatgaactgtgttacgagatgattgctgtgacgaaaaataaaagcagggtaagaaggatagagagtaacaaaataggggatgattgctgttttgggaatattatggaagtattgtgatgaagtagcttttgagcagaatcctaaaggaagttttctaggcaaaaaataagaactgagtgtaaagcttgcatatctgttgggcagacggtggttagtctgtaagcgtttggggttgtggggaaagggtgagtgaagggtctttccctccctactcaggaaggtggaggtacagagtcagtgttgctaggaacacatggagctctgtgggctctcccctgcaatccgacctgataatagaaagatgcagtgacaagacagatggaatatctatttgttatgcctgcagtgggaggtcaggaaatcccttatcaaggatgtcatgctttatataagaagaatgaattcaccaggagaatcgcttgaacccagcaggcggaggttgtagtgagccgagatcgtgccattggactgcagcctggaaatagagcaagactccgcccgct

SEQ ID NO: 536391 - DNA, 519 bp, Homo sapiens
aatgtaattgcattttatagtgaacactgttgtccacatatgctgtgaaaatagaacgcaccctaagtaatttaaaaataataacaaatctgccatggcttgaaatttgtctgagtttacatggagaggagaatttcacaaatttaataagggagtatataatgttatcctgttgcaatgttaaagctttataatgaatccagaaaaaacatggacttaacaattaataatatatgttttttaagagatgcgtaaataatagtactctcagttaccttctcactttttgataactagttcttcaactgctacagaacctggtatcaatatcagcagcaactcataattatggggtactgcctgcctatagagtaacatactaacaatgcataacatctaaagtctctattgagctacttgcaacaaaatatcctagatagggtggcttaaacaacaaacattatatctcacagttctgaaggccagaagtccatgatcaaggtgacaggtgattttggt

SEQ ID NO: 536392 - DNA, 463 bp, Homo sapiens
gtggagtactgcctcttgccactgtgtatctctcgtattctgtccaacatctctctacatagtatgacaccgtcggacatgctgtctattgttgtctcgggatagtgaaatcccgaacacatcaatagctcatgtcctgcaggttatacagcgtaaggatgtgcgagcaactacagagaacacatggtccaggagccaccccatgctccccattgttggggcctggctgcgcacccactgcacggatcctgtagctgtcctcgtttgtgctgcactgcctgcatagcgggtgcgtggcttgaggaccaggacagaccctggtgtgggcaagcagggtgtggcccacctgataggacaggtggggtaatactgacagaacgtgcgtgctcctaggggctgcctcctagaggtggctcttcaggactctgccccacaccggcccccactacctttgggtccagtt

SEQ ID NO: 536393 - DNA, 82 bp, Homo sapiens
  misc_feature (2)..(3): n is a, c, g, or t
  misc_feature (6)..(6): n is a, c, g, or t
  misc_feature (23)..(23): n is a, c, g, or t
  misc_feature (59)..(59): n is a, c, g, or t
tnnatnttttcttctttagcatngcactgtcattttttgtgaaaatggttatgtttatntattacaatactgagtcatatat

SEQ ID NO: 536394 - DNA, 228 bp, Homo sapiens
  misc_feature (107)..(107): n is a, c, g, or t
acgagacagatacgaatcgagccggtacccaactcacagtggggaacctttcttggatagttcaggtttgaaacactcttttggtagaaactgcaagggggataatngcacttctttgaggcctaccgtagtaaaggaaataacttcctatagaaagaagacagaagctttctcagaaaattcttggggatgattgagtggaactcacagagctgaacattccttgcg

SEQ ID NO: 536395 - DNA, 328 bp, Homo sapiens
  misc_feature (69)..(69): n is a, c, g, or t
  misc_feature (80)..(80): n is a, c, g, or t
  misc_feature (83)..(83): n is a, c, g, or t
  misc_feature (87)..(87): n is a, c, g, or t
  misc_feature (92)..(92): n is a, c, g, or t
  misc_feature (97)..(97): n is a, c, g, or t
  misc_feature (117)..(117): n is a, c, g, or t
  misc_feature (128)..(128): n is a, c, g, or t
  misc_feature (133)..(133): n is a, c, g, or t
  misc_feature (150)..(150): n is a, c, g, or t
  misc_feature (162)..(162): n is a, c, g, or t
  misc_feature (170)..(170): n is a, c, g, or t
  misc_feature (181)..(181): n is a, c, g, or t
  misc_feature (184)..(184): n is a, c, g, or t
  misc_feature (214)..(214): n is a, c, g, or t
  misc_feature (311)..(311): n is a, c, g, or t
aattaattgatgggaagaaatgatgataatcataaactgctaataacctccattatttaaatattcagnccttgccctgnctnattntactnatccnccaatacaggaaaggccctnccttatttagntctgntttacggcataaagggnacttgggccggnacggtggntcacccctgtnatnccagcacttagagaggctaaggtgggtggntcaactgaggtcgggagttcgagaacaaactcaggcctgggcaacatggagaaaccccatctctactaaaaatacaaaattagctgggcgtggtggnacacaccccttaatccc

SEQ ID NO: 536396 - DNA, 472 bp, Homo sapiens
ctgatctagaggatcccttcgatgtgggtcagaggggatgcttgtggaagctgaaaaatccatgaagctgttctctgaaattttctcgcctggggcagcctcactacccaggagccacttgtccttcattagcctggggaacgctggtagttggagaaagctgtggactgctaattcagaagaagaggtagaattctctagagcctcagtgtatttccagcaggtgtgtggaccagagttggagtggggatagtgagtgcaggagtgggatgacccagcatgcttatctcgtttgacagtagtgtacaggggtgggctctgaagagctctcgtctagacatggagtgaggagtgggtggggaaggagtgagaagccaggtgtagggcatagactcaaagcgagcgagttctgtctccagtttcccaacatggacaattcacatgtccgtcagatctgagcctcagcatcgaa

SEQ ID NO: 536397 - DNA, 169 bp, Homo sapiens
  misc_feature (116)..(116): n is a, c, g, or t
  misc_feature (128)..(128): n is a, c, g, or t
  misc_feature (152)..(152): n is a, c, g, or t
gggaagcctataggaccatcacagacactttggataactcttacagtgaaggtgtctggagtttcccctatggacgctgtctcctgccaccatacaaaaaagcgccactgcagggnggaatgccaggntcccatagagggagaccgacagtnaagtggagcctgccatg

SEQ ID NO: 536398 - DNA, 912 bp, Homo sapiens
ctcgcgccaccactggtccgccggccgcatctccaggtgtctagccgcccagcctcgacgccgtcccgggacccctgtgctctgcgcgaagccctggccccgggggccggggcactggtgtccaggggcgcggtggtgaagtcggcttcctcgctagggccgtgactgggcgggcttcagctcattgaagactccttcatagccgtcttactccgggcttcctgcgctggtgagcgtcaggccgaggtttgacccgtgagccatcgctctccacgggaggaccgttgcggctagtcgccgccgagtgggtctcggcgagatcgcgcgcgccacttggaatcccagcgatcctctccagtcctcgcatggacctcgttctctggtcaccctggcgtccagtaggtcccaagtggtggacaagacgcgagactaacgaggagtccatcatcgaggtagctgccagatagagagtcgctagtgctcgtgtccctatgtaactaggagacgatggcgctgcaaccgtgcccaatactcgtcaattgattacaagtaatttcctggcaacgtcgattcgcttggcctccactcgccgtgctggctcctaacgtttcatctattggcccgtggctgctcttgacctggcaaacaacagcccaataaaaacggtgagccatgggacgggctcacaagatgagaagttccgacaatctgcgagccttggatgttggggcggacctaaacttgtttccgaacgaatgaacgtttatacaccatacgcgaaggcgtgcgttgaaaagaacagcgaacgaaaagccttggcttgaacccaacccaagggaacacataatgatccttctgggaattaccaaacacccgcaatgggctcattcgatggaaacctggatgtggccg

SEQ ID NO: 536399 - DNA, 423 bp, Homo sapiens
ttccccccccttccaaagcaggaccaaggtgggcccgccccttcttcccgccaaatcctgtccccaaggccaggatccaaaaggggttgtttttaatccagggagggagaagatgatggtccctttatggaccccagttttttaagaaaaaaaagaagataatattttttatgggccttgggaacctgccaggttccgggaaaatgaaaatggttccagcttagaggttcccgtttaagattttaaggattgtttcctgagccaaaccccctaagtaaaaaatttttaggtccccgacaaaccaaagccttgattccccctggttttttaacccgggtggtgtagtaaaagctttgtttccaaatccctcttgagtaaaaatttaaataaagcccccctttttccttttttttttctaatgga

SEQ ID NO: 536400 - DNA, 163 bp, Homo sapiens
cttgtgaccagaagcggagtggtcatggttgtgcccactgtggtcgtggccgctgtgggcatgacggtccgtcctgggttgcaggctgcagacgttctcgtcggcttccgagttccagtcgatcccgaccgtggcgtgttcgatgctgaattgctcgtcgacg

SEQ ID NO: 536401 - DNA, 501 bp, Homo sapiens
  misc_feature (466)..(466): n is a, c, g, or t
  misc_feature (491)..(491): n is a, c, g, or t
aggcatattcctgagtccaaacaaccgcatagtacacactgtatgaattgttgaaagcttttcctgtaagatcagcaacgggacgggtatgcccactctcaacacttgtagtcaacacagcactgaatgttctagccagagcaattagacaagaaaaagaaataggaggcaatcaaaaaggaaaggaagaagggaaatagtctgtttgctaatgacatgatcttatatgcagaaaactccaaagactccatgaaaaaaattgttagagctgacaaacaaactcagtaaatttgcagtgtgcaaaatcaatacacaaaaatcagcagcatttctttacaccaacaatcaactatctgaaaaagaaattaagaaatctaacgcactcacaacagtcccaaaaagaaaagctaaaatacttaggagtagccgggcacgatggctcatgcctgtaataccagcactctgngaggcccaggtgggtaaattgctgnagcccagagg

SEQ ID NO: 536402 - DNA, 151 bp, Homo sapiens
cgcgtctcctaggtgatggagatgtgtacgtaatattattttaactgctgcaagggtgtgagatgttccccctgctgtaaatgcaggtctctcggtatttattgagcttgtgggactggtggaagcaggacacctggaactgcggcaaagt

SEQ ID NO: 536403 - DNA, 328 bp, Homo sapiens
ggcgaacagcagctggtaccgaaggcggacggtggagcccgagagggaaccagcggtgaaactgaggctcggggtggagcgcaggattgtgggacgcgccatagactgctgtctttcccagcagcatgcggaagatgtcgtgatcagcgaggatcagctaatcttttccgacggaggaggacacgtcgagcgcacgcagtgacggcgaggaggccgaggtagacgaagagtcggctggatgtgcagcgggcagtgagaaatgatacgaagagcctcgcaggacagaacgcatggcaggcgggacacacggagggaagtgagatctcgt

SEQ ID NO: 536404 - DNA, 164 bp, Homo sapiens
gatctagaggatcccgggctcggtaatatttgatgaacaaattatagatggctggagataggcctggatgagcagctgctgaactccatcctctcttattcctcgcaaggctgcctccagctggcttttgcacctcatttctagaggcattcctggagagtcct

SEQ ID NO: 536405 - DNA, 123 bp, Homo sapiens
gtttgcttccaaattaaaatgtccacaaaggatcaaaagtttattttgccatcatctaaaaagaaatacagtctggccgggagtggtggctcacgcctgtaatcccagcactttggaaggcca

SEQ ID NO: 536406 - DNA, 215 bp, Homo sapiens
  misc_feature (135)..(135): n is a, c, g, or t
atgtaatcacggaggccagtatgtacagccaaggggggaggtttatttctgggtctcttcctccttggtcacgtcttgatgatctcctcctttctgggcctgggaggcgctcttcagggcggctggcgtgcttcnctgggtcttagacctccggggcctcagcctgggtcagccagggagcttctggcggggccttatctgggggggtaccgagc

SEQ ID NO: 536407 - DNA, 404 bp, Homo sapiens
gattcttcatagacagattcagaagtagtctcatccatgagattttctggaatgaatgaacattagtctaatattacttcaagtaagtcataaagaagtccatgcttccttgcatatcttaagaaaaggaactttcacagtagcatctgtgtgtctgccatgctctactttcacttgtcttatgaatgtattacatttcatagtttcgggtggctgtacatgattgcctgagaggggtttcttccttcctctatttctatttcactcctgaaaatttagctaaaaatataaaccatttaaaaattggaatccataaaggaaaagattactctttgactacatgaaatatacaactcatatgccaaaagtttttacaaagtcacaagatatggcaaactacaaca

SEQ ID NO: 536408 - DNA, 105 bp, Homo sapiens
tagctgttccttgattaacacttgatatcgcaaaatattggcagaaggctttcgcaagaggagcagcagctgaccgccatgaaggtgattcagaggaactgcgcc

SEQ ID NO: 536409 - DNA, 431 bp, Homo sapiens
tagactggatggatacggtcatgtgtatcttcagagttatcagaatttaataacattatgttggaggaagtaccaagccttgtacggaataaacaactgtgctggtgagtagattatttcgtaagctgccagaagggctggaactcgctgtcatcgaaaacatctgtataatcttcaaactcttcgccttcttctctttcggtatctgcataaagttaagaaaaattagaaaccatcggctagtgtccttacttcaagaaaatggttgccagccggaaaaacacttaaaagcctgattgtctcaaaatgttaattagcctttgaactctgcatagaaatgactatctttcgcacttacattttacatgttatgcaagaatagagtaactctaacaaggtatgtagagccctccaaaacgcggggaccccct

SEQ ID NO: 536410 - DNA, 234 bp, Homo sapiens
gcccccccccccccccccgggggtttttttggggggggggccatttttttttgggtgcccccggccccccccctcccccttgggaaaagaaaccccccacccttttttacccccccgggggttttccccccccccccccaaaaaggaaaattggggggccccttttttaaaaggggggccccgggggttttttttaaccgggggggaattttggggaaaaaaaagggtttttta

SEQ ID NO: 536411 - DNA, 1358 bp, Homo sapiens
acctgggctgacctactagccgatctcgtggccaggcgtgacgtcgtgctgctcaacactgctgcagacggcctgcaggttgatgacggcgtcgttccacagcttgcccagaggttggagcgtgccgctcaatcgattgattcgggagcggcacacgaccatctcgaccgttggatagctgctacccaaggctgattgctaatgccatccaggggcccgcccatagggctgggccataggcaaatgccgacccccatggtgaggggcgatgtttgcgaacaagggtgacgatgacggccacaacggctccgaggatggtggaggagagcaaagtcgtcatcccggcgcggacgaaatctgggtatggggagagtacggccgtcgtcgctcccaggaagccggtgcccgccgcaagcctgacatcgccgtatccgagggatgaattgagtcgccacatgagccagaagaaccctgttgacactgccgcgatcagaacacacgcaacgagccaccgtgcacgtggcggcgcgtcaggacgattccgcccaggagcgctaccccagcctcggcgacgcagcgacgccataacttcagtggtaggaaggtcgtcgcataatcgacgatgaccagagtggtcaccgatcccgaccagatccaccaacgccccatgcccatggtggcgcgcagaccgatgcggccccgcatacggctgctgtcatggcgacgacgaaggtatgcgtcggagtggtgagggaggcgtatgtgggcttgattgccaggaccgcgtcccccacttcttcgacggttggctcgacgagattcgggaccgtgacgcgtagatgccacagcgccaggccgcacgccaccgcggagccgaggatgatccacatgggctcgactcacatggacgccatggactcggcagtggagagcaggccgcgagcttcgcatgcggcccgactgcgtagtcgcgtcatctcagtgcacatctgctcttccccgctcatgaggttcgcggcgtaggacatcgttacgtccagcatggtggcgatctcagcgatgtcacagccggccttgtggagggcgaggagccgagcgcgcgtgcttcctgctggcacgatgcgttcacgtgctgcgttgatgtcgtcgatactgatatgcaggatgcgcacggcgtcgatgacgcggatgcggtgaattggacggtccccctggccagcgagtcgttggacgattcgactggggacatgcgcgagcagggcgacgacacgccacggaacgcggcattcatggacgagggaacggacatggagcgagaaaaagcgggcgtcgacccatgcagtcgacgtcttcgagga

SEQ ID NO: 536412 - DNA, 86 bp, Homo sapiens
gagctctctctgtgggggaaggcagagtatgtaaagaaaaagttaactaaaggtcttcaggccttcaaataaatatggactaagtg

SEQ ID NO: 536413 - DNA, 972 bp, Homo sapiens
cgggacaccaaactgtcggggggggggtgttttgtggaatatttgagttccaaccgtggtctggatatgaccaagagggtgcctccaactggaggccttggcacgtggaaagctcacttggggagtgtacttgcatctggctgtatgtgatcaataacctggagggttgtgggcaagaaccgaacgtatgtggcgtgggacttgggttgttaacacaagggtttgcacgagtatgagggaccccctgtgtctcttattgtgagaaaatgttgcccctgggaaaggaaaggactataagtttcggttggagaagaagaagagtgaagggcgagggatgcacgagggaattgggaagttgatgttcaaagtgcccaaccaggagagaattgtctgtgttgacgccttgggaagtgctggaacttgtgttagatggcagctggaagaaagtgggccctctgaacttggggcgtgaagttgtgttgttgttgccaactgctgcatgataagagaatatagtggcacagcctgggaaagtggtgtgagccacatctgatgcgcacgcacaccactgggattgtggtgcccgtgagatggtctgcaattgaaccaagcatgtctgttagaaaactgtggtgaggctgatcctgtcacaaaccaagtgcgctggtgtctggggtgtataatggctgggtgaatgatgcaccctctgttgccacgaaaggcctcggctaggctgtggacttgagccactgagcacagtggaaccatgggcacgtgtgttgggctgttgaaaatggaaggggtgacacctttagtgagcttagcacaacgggattataaccagtcctttaacccagcaccagcccagtgtaaagaagccagccatcactgcttcaacgccagatgttaatgtgtaccttaaatatataaccttggcacgttaccaaaccaaagtaaacctgggggtggact

SEQ ID NO: 536414 - DNA, 349 bp, Homo sapiens
caccatgacgcagagtgacaggtgtgtgcatatgctggtcctcagccctgcccaggagacagttgtggtgtctgtgggtctatcagccctgcccaaggatacaggtgtggtgtgtagcaggtctatcagctgtgcccaaaagacagttgtggtgtagcacaggacctacaagaccctgcacagagtaacaggtgtgctgtgtgctgatcctcagccctgaccaggtaacaggtgtgtagtgcacacgtactcagactataacacaggtatacaaggcgtgatagcgtgtgggtcctcagacctgcccaggtaacaggtgtggtgtgcgcgggtcctcagccctgcccag

SEQ ID NO: 536415 - DNA, 526 bp, Homo sapiens
cctcgatatctgtcaaggcttcattataagtcatataaagacacacacacacacgagctatgggaaagctggcttcagcaaaataaaaaataaagctaaggaattatttgtaacttggttgctaagtgaatgaaatggtaatattataccgatcttaatcatttagcaacaataataagttctgggtcatgatcaatagctagaagactacttaagcaaattaaaactcatgcacaatcctcacccatcagacaagttctactttcgattccattatgactctagaatggaaaaggtcaaaaatgtttactggttcacataataggaaagattgtcacatttgagtttttcatcctcttacagggaatcaagacaatacaaaatgaaggctaaagtaaataatagctgattaaaaattagttgatttgattttattgatacatcaaactatagacccattcagtgtatgttaatactagaagtgtgtcagaggccctcagttagagggcattttatttctcccaca

SEQ ID NO: 536416 - DNA, 172 bp, Homo sapiens
tcggatctcacttaccaggatcgcttccagtcgctggaacataccttcaatgctccagcggcggggatacagttcggcgatctgttgcgcactgacgctctcaggcaggttgctccagaacatcaagctgctgtcgccggagtccgttggcgaatgaagcgtcagttcgaca

SEQ ID NO: 536417 - DNA, 310 bp, Homo sapiens
  misc_feature (10)..(10): n is a, c, g, or t
  misc_feature (26)..(26): n is a, c, g, or t
  misc_feature (134)..(134): n is a, c, g, or t
  misc_feature (160)..(160): n is a, c, g, or t
  misc_feature (234)..(234): n is a, c, g, or t
  misc_feature (282)..(282): n is a, c, g, or t
gtggtcgtgntgtccaagcctcctgncatgggctgtaagttgtacttcttccagtagctgctccggagaacgtggtcctccaccccaaatcacatctctgcctcaaacatcgtgttgtccctaccttccgcagncctggcccctcctaggaagcccgggnccacaggcaacacctaagtggccaacccctctgcctgtcctgccccccagacgatgactgaaggctcctttganaccttgagatgattctgctactttccagacttttcttacaaagcaaanacttttattttctatgcaaaaaaaaaaa

SEQ ID NO: 536418 - DNA, 1371 bp, Homo sapiens
ctaccagacaaccttagccaaaccatttacccaaataaagtataggcgcatcagcaaatgcacaaccgtggcgcaatcagcatcatcagtcaccgccacagggcaacagcatgcaacagacattcatcaacccaagccatcaatcatcagccaaggcactcaacgccctcatcacctgtctgcatcacatgcacattcaactcagcacacatcacactatgagcaagggcagcagccaaagagcctcaagcaccccgcgcaacacccagcacgcagctcaccatcaagcaaccagcatcaacacagcagccacaccgccgtcgtcatagtcagcaaacacaataagtagggcacagcattttacatcagagtcagcaggcagcaccaacacactcacctgcagcctatggttgcatcagcatgggttggtcccacagcatcagcacatcatatcaagttccacacgttatcacacatcttagcacacaaacaagcaaacccgtactcacaaatcgcccatgtgttacaaacattaatcaacgtagtatacaggtgtcccagaaggcagcgcacacgcagcatcctattaggaaccacatcagagcacacaacacaccctgtgggttaagcagccagcaggtcacacacacacattttcaaagcgaaaggcaccaatagagtcagagggcactcacaacacgcaaggcaccacccgaacattcacacgacacaggacagttaccacagggcatccaaacaagccgcaacgtaacccttacaaacaaagtcccacaaagacgataatacacacgtggacacatccacgttcgaaccaacgcctcaaaaatttggggacgccagaactccatcagtccagccacccttactcaggcacagccaacctacaagtggatgaagatcatcaaaggtatacagcaatgtggaaaaaccaccacattatcttcccctcccgggacaattaaaaggaccctgggacgtcacacgcatttacaagacacaccacaggacaaccgtggcaccacaatgataaaccaagggaccccaaaagtaaatactaaccacacatccaaacacaaaacagacagggtcatctaaaataaaaccacccatccaccgtggatcaaaagcacacaaacacaacaagggcacgtgggcgtcccacataaaagagcaacaagggtcaccacagcaaaaaggatcaaacacgggaaaccaccgaggcaacaaacgcataaacaccccgaggcagaggtcgaaaaccagaaaaaaaatgtcaaaccacaaatagaaatccaacacagaaaataaaaaagaggacaccagaccagaccccaaagggcaaacaaagac

SEQ ID NO: 536419 - DNA, 136 bp, Homo sapiens
cgacacacaaccgatattgtgatggtgatgactgctacaccttatgggatttcgacccctggggccagggaaccctgatcaccgtctcctctgcatccccgaccagccccaaggtcttcccgctgaagatgatgtt

SEQ ID NO: 536420 - DNA, 423 bp, Homo sapiens
  misc_feature (20)..(20): n is a, c, g, or t
  misc_feature (44)..(44): n is a, c, g, or t
  misc_feature (54)..(54): n is a, c, g, or t
  misc_feature (90)..(90): n is a, c, g, or t
  misc_feature (345)..(345): n is a, c, g, or t
  misc_feature (366)..(366): n is a, c, g, or t
  misc_feature (406)..(406): n is a, c, g, or t
  misc_feature (412)..(412): n is a, c, g, or t
ggcttgcaggcgtgagcagnggcacggtggtcagcgtgcagcgngacgggactngccctgcccagccatgaatcgcttggccatgctggntctgttttgttttggtttttggtttttgggtcagggtttcactgtgttgcccaggctagagtgcagtggtgccacagctcactgtgaccttgaccttctggactcaagtgatcctcctgcctcagcttcccaagtagcggggatcacaggcatgagccgccacacccggccatcacacctgggattttcagttgggaggtttttggttttggagacatccaaagcctgaagccagggtgggttttgggcaggggntgcatttttattgaaaactgncccagcaagctgcgttccctgggggccccaggattccacntaattnggcttgggaac

SEQ ID NO: 536421 - DNA, 159 bp, Homo sapiens
  misc_feature (28)..(28): n is a, c, g, or t
ggggcacttaatgcaaaatcaaatcggngcaccacccccccagcaaaacttcagtgatccaaaaaaaaaagcgtggctattccagatcatcacgattgtggcggtggtctcgttgggctggtacctgttcaacaacacgcaaaccaatcttcagtcgac

SEQ ID NO: 536422 - DNA, 407 bp, Homo sapiens
attaatgagaactgtgcattgaaataccattctggacataggacctggcaaagatttcatgatgaagactcaaaaagcaattgtaacaaaaacaaaaattgacaagtgggacctagttaaactaaagagtttcttcacaggaaatgaagttatcaacagaataaacagacaacctacagaatgggagaaaatatttgcaaactatgcatctgacaaaggtctaatatccataatatctaaggaacgtaaacaaattaacaaccctatttaaaaaatagactggccaggcacggtggctcacacctctaatcccagcactttgggaggccaaggcaggtggatcatgaggtcaggagatcgagaccatcctggctaacacagtgaaaccccatctctactaaaaatac

SEQ ID NO: 536423 - DNA, 800 bp, Homo sapiens
gaagcagctgggccctctgggaaggctgtgttcagcttaggaacataccgcctgtatctgctgtcccatccccatgaccccacatgaacaccccccaccgcactatcactattattccctgtcttcctgtaaagtttcactcctgaataaagacttcactattgcctatagaaaaagaaaaaaaaaaggggggaacgccacataaaaagtacatcccccagaaggaggccaagaagacaatacgacgagtaccccacgcttccaatggatacaaaaaggggacccccaaatacggtgaccgtacagtacatctacatacgcgacaaaggaacagggagcccgcgcagcggcaccacacaacacacggctcggaaacgacaacggccagaaaaccacgcagcgaaaagccacctatgacgagaccacaatgcagcggcgacgacacacgcgacaccccctaacacactcactcgcgtccgcacgcgcgcagaccccaataacccgtgggagaaccaaacacccaaacccccaaacccaggcaaaaactccacaaaaaagagcacccaacaacgggcgcaacaacagctaaaaaaaaactctcctaccaacagcgtgccaccacacaaaccgagagacaacacaaaaacccacagcccgcagcaaacagaacgccaaagaacagagccaagagaacaaaaagaaaagagccaataacagagacagcgaaaaggaacacacacacaacaccacaacaactacaaacaacccaaagaagggagaaaaccaaccagcaaacaagt

SEQ ID NO: 536424 - DNA, 399 bp, Homo sapiens
ggagacaggttcctggtgtcgtaatcgactgtctgaacgctggagccgttgctggtgaagggagtgaaggtgggtttgctgctcatgctcaaagtgaccattagcagcaggttgtcctggtcgataatgcgaggaagcaacaccatgttgaacccgctggtgatcgttgcgggagtcagcgatgtggaagatccgaccgaggccgctgtggtagtagagcttgaggcaatatagctttgcacgttaccgacttggataggtgcaggctgtaaattcaaagttgtgatcgagggcgaacggatgtttgaaacgcgatactgttcagatagcgctttaatgatcagattcgagccagcccaaggtgacttggaggtatctaaaacattgaacgagctggag

SEQ ID NO: 536425 - DNA, 88 bp, Homo sapiens
gcggccgcctactactactactactgctcgaattcaagcttctaacgatgtacggggacatgaggaaataaatgtgggttgtgctgcc

SEQ ID NO: 536426 - DNA, 228 bp, Homo sapiens
tctctgcgatcctatcgatcggtgatccagcacctccgcctccgggttcaagcattctctgcctcaccctcctgagtagctacgattacaggcacccccataccctgctcatttttgtacttttagtggaggtggagtttgaccactttggccaggctggtctcaactcctgacctcaggtgatccgcccaccttggcctcccaaagtgctggatcagcggatcgagt

SEQ ID NO: 536427 - DNA, 309 bp, Homo sapiens
  misc_feature (41)..(41): n is a, c, g, or t
ggtgcgtaatgaggtgggacgccatgtacaaagaaagaaanaaaatcctgagtgcctacctacgtggggatcattccttacatcacagaccaaccttcacttggaagaagcctctgaataaaacctgagcccggggggcttctgtttatctttgggagacgcatttattaaccaaagttattctttctggatctgccgggtccttataaagtggatgaaaaatgttttgtacccatctggaaaaccaacaacttgaaatctcaggtatttcatgtcaggggggggaatttgaaaatatatctatctgta

SEQ ID NO: 536428 - DNA, 910 bp, Homo sapiens
  misc_feature (239)..(239): n is a, c, g, or t
tgcgtctgtgatctgtaggttgtgaggagttgtgtatatgtgtctgtttgcttgtgcctgtgttggttctgtatgtctcgggtgtgtacgtgcgctgttgcgtatcgctctgtctgctggctgtggttgttggtggtgtctgctggcttattggcttggcgttggatctgtcgcgattgtctggcacaggttctgtgtgtgcgtccttctccaagttttttcccccggtttccgcccgnttcccggggggggtaccccgttctcccccctctcgccggggttctcccccccccccccgttaagtttggtggttaccgcgcctcctaatgggcgcttttttgccccgccatctcgtgtggactcgggccccgccagatctctttttggccggaggaactcgcgcccccgcaaacccttcttgtgtgaccggcgccccgtagatttccaatgttctcccgttgcgcggttcccggagcaaattcctccccgggattttgcgcccctatcttgcgcgccgggggaacacacctgtgaaaattggactcaacttctccttcctgcgttgaaatatgttatggccgcgcccctctcctatgggctttcttctctctcccgggggcgcgccaaaattcttttggtggggcccccccgctgattttccgagctctgtactctccgcctagccacaacactcctggggcagcagccccctagtctcagtactcctactgggagggcgtattcccgcgtattagccactgcccccccctcacccgcggtttttcttcacgccattgactattttgtttggtcccgttgcaattgttgctgtcgccctcctgcacgcccgccccccccccttttttccgcgacgggggccaccacccccctgggaaaccccaaaaaaaaa

SEQ ID NO: 536429 - DNA, 518 bp, Homo sapiens
  misc_feature (157)..(157): n is a, c, g, or t
tctagaggtcccgtacaggccgcgttcaggccttggtcactcaatgactccagttctttaataaacagtaagacaggaagtctcagccatgggactctggagacaggtgggaggaatggaggatggaagcaggacagccaacttcagaaggccaggnaggacatctttatggagaccctgaaagacatcgtggagtattacaacgacagtaacgggtctcacgtattgcagggaaggtttggttgtgagatcgagaataacagaagcagcggagcattctggaaatattactatgatggaaaggactacattgaattcaacaaagaaatcccagcctgggtccccttcgacccagcagcccagataaccaagcagaagtgggaggcagaaccagtctacgtgcagcgggggcttgtacgcgtacaaggcccggccttagagccaatccttatcccgaagttacggctccggcttgcagatttcccttacctacattgttccaacatgccggaggttgg

SEQ ID NO: 536430 - DNA, 319 bp, Homo sapiens
atctgtctgtgattttggaggctggcttcaaataactgatatatgactgcctattcatatttaaggggaagcactacaagctcattgaaagctctttggatggtctagattagttgactggtggacttccctcgtggggaattgttatctacctggacttttgttgggggacctgaaatggcggggttttggtaggggttttttcgagtcatttactttagagaaaaatcctccaagttccttcttggaggatatgagtctattgccactgtactgagaacaaattctgggaagggcatatcttgagagagggaaggat

SEQ ID NO: 536431 - DNA, 463 bp, Homo sapiens
  misc_feature (28)..(28): n is a, c, g, or t
  misc_feature (64)..(65): n is a, c, g, or t
  misc_feature (78)..(78): n is a, c, g, or t
  misc_feature (99)..(99): n is a, c, g, or t
  misc_feature (121)..(121): n is a, c, g, or t
  misc_feature (129)..(129): n is a, c, g, or t
  misc_feature (218)..(218): n is a, c, g, or t
cgggaggttcacccggcattaaagaccnaaggtagattaattccatggaggggggggaaaaccnntgccaaaagggtngaaatttccaaaaccaggaancctttttttcttgcaaaggatnacaattcnttgccagcaagagaacaaaactggatggagaatgagtttgacgaatttacagaaggaggcttcagaaggtgggtaataacaaactcctntgagctaaaggagcatgttctaacccaatgcaaggaagctaaaaatgaaaaaaggctggaggaattgctaactagaataaccactttagagaagaacataaatgatctgatggagctgaaaaacacagcacgagactttcgtgaagcatacagaagtatcaatagctgaatcgatcaagcagaagaaaggatatcagagattgaagatcaacttaatgacataaagtgtgacgtcaagattagag

SEQ ID NO: 536432 - DNA, 978 bp, Homo sapiens
ggaagaggaagatgaagaggaagaaatcgacgtggtcactgtgggccttgtggtcgcctcctctgatatcaatggtgtcaccagatggcaacatcggtgtgcgtgccacgaacgcagtcctgggtcccgggagggctcgagtccacacgaggtgatcctcaaatggatgccttgccatccaccagcagcacaatatgccgccccctctccctacgtgtgagagtgaggatgctagcccgctacagaagatgataaagagcgaggcgtccccacgtccgctcaagagtgtcatccaccccaaaggctagagagcttgagcccccgaaactctgactcggaggacagtgagcgtcgcagaaaccacaatcatcctggtagcgccagcgttcgcaaggaccttcggtccctgctttctcacgctcagggaccgacgtgccggagttggtcacacgaatgagaaggccgccaaggtggtcgttttgaagacagggcacgtgagtatgtccactccctccaaggccgaggagacaccagctttttgctggaacaggaagaattgcaggcgagacagcagcagttggtacttgaaaattgagcagcgctcggacttgctagaggcttctcaaactgtgcagtcactgcaacttggcacatttgatattgtcgagccaaacgttgtggttgccttaaagaagtgtgggtttacttcaaatcggtcccgtgtcagagtccggcaccgggtgggcagagagcaccaagtggggtctgtggaacgttgggcagctgaacccatgtgttgtggcctttcatctcaccttactcctgatatgggctacgtggacgagggaccttggggtgtagagcctggtgtccagttcgacacaaggcgtcttttaaggcaccgggagcaaggtgctcccggaattaacggccgcttacggaagagggggaagacaataaacaggaatcagactaaca

SEQ ID NO: 536433 - DNA, 888 bp, Homo sapiens
agcggaactctagagagggactgggagcagcagagatggagctaggtaccgcctcttcagagagcccaagccttagtttgtgaagccgagatatccgatgatgccacaggggccggtagctgatccgcgtcaacgttgcgtgtatggtgcaagggcaacaggagaaaatgtagagaaccccgagtgagcatggctatgggaggggaggggatggctgggtgcttgatggatcgcaagtgtgggggtgcttaggtccatgggaagttgtagtcacgttactggattgtatggactagattattcgaatgacagcgcacgtattgaactgaacttaactcgggaggagacgggcaaagcaaacgtggaccgagagttaaacagagggacacaatggtgtaattgcccgaaccagtcaaaccatagctgaccgtgtgcctatccagagagtgctaccgaatgagaactccagaaaagtgtgcgacagggatagcccaacagtgaccaaccacatggagacactacgcaagacaagggggagcgccccaccagggagtaagacagatctatcaaagtacgctcaaacgagggctagagagaaaaaaccccacatggcattagccacacgaaaagcacgtcaggcaatttgcacggggaacacctgagaaacaggcccacactcgtgctgaacaaacaagaacgggtctcccagacatacccatatcacacacaagcgtagacgtgtcagagaaactcacatatgatgggagaaatggaaaccgccttagggcgtcaggcacgacacttacgaatacaaggaccaacctgggatacacgacaacatcgatgaagcagagtgaagcaccttgtgacagatgagggccaacacag

SEQ ID NO: 536434 - DNA, 259 bp, Homo sapiens
ttgaccccgacgagatcgccttcccgggttaagtgacatctttacgcaataactctgcgaacaacggcttgtcactggctcaggttgatcccaaggtcgtcgaagaggtgtgggactttgccgagcaagcatcctggtgagcagctcaccctctccctcgagaatcggacgattaaccttccgggtcgcacgacctacccgttccatattgatgacgtcacgcgtcagcttctgctggccggtcaaattccatttcaaa

SEQ ID NO: 536435 - DNA, 246 bp, Homo sapiens
tcaatttctacactctaacgaacatttaaatatgaactaataccaatcctactcaaactactctgaaaaacagaggaggatggagtacttccaaactcattctttcaggtcagtatgactgtgatatcaaaaccagacatctttgaactggttttggtaacagggtcatactgacccgaaagaatgagtccggaagtgtgtgtgtgtgtgtgtgtgtgtgtgtgtgtgtgtggtgtagaaattgaa

SEQ ID NO: 536436 - DNA, 370 bp, Homo sapiens
  misc_feature (68)..(68): n is a, c, g, or t
  misc_feature (73)..(73): n is a, c, g, or t
  misc_feature (77)..(77): n is a, c, g, or t
  misc_feature (80)..(81): n is a, c, g, or t
  misc_feature (85)..(85): n is a, c, g, or t
  misc_feature (93)..(93): n is a, c, g, or t
  misc_feature (106)..(106): n is a, c, g, or t
  misc_feature (125)..(125): n is a, c, g, or t
  misc_feature (152)..(152): n is a, c, g, or t
  misc_feature (168)..(168): n is a, c, g, or t
  misc_feature (173)..(173): n is a, c, g, or t
  misc_feature (175)..(175): n is a, c, g, or t
  misc_feature (185)..(185): n is a, c, g, or t
  misc_feature (211)..(211): n is a, c, g, or t
  misc_feature (230)..(230): n is a, c, g, or t
  misc_feature (261)..(261): n is a, c, g, or t
  misc_feature (300)..(300): n is a, c, g, or t
  misc_feature (326)..(326): n is a, c, g, or t
  misc_feature (333)..(333): n is a, c, g, or t
  misc_feature (357)..(357): n is a, c, g, or t
  misc_feature (366)..(366): n is a, c, g, or t
ctcactccttaaattcacactttgccacttaactccagtgtggatgacagagcgagaccctgcctcanaaaanaaanaannaaanatttgttngccacacttattnttttcagtaacctgctagngcacaggctgtactttaggtacttaanatatgcactagaatanttttncnaggccctaanatatcactgttatttttggagtaatncagtataggttcgtttaanagagatttttataacttcagacatgcatcantaggaaataacttgagaaattcatatggttatttacaanttcatattctgttactacagtaaacnttaaggnttttatacagttaagattgtacanttttttttntttt

SEQ ID NO: 536437 - DNA, 289 bp, Homo sapiens
catttcataccattttattgctgaacagtattccatggtatgggtgcaccacagttattttaaccattaactcatggaaggacatttggattgtttccagatattgaccattataaaataaactgctaagaacattcacgtacatgcttttgagtggggataagtttttgtttctctagaataaatgcccaagagtgcagtggctgggttgtataataattatatgttggccgggcatgcatgtcacgcctgtaattccagcactttgggaggcgacgacgggtggatc

SEQ ID NO: 536438 - DNA, 125 bp, Homo sapiens
gaggaagcctgggaaggaccggtgtgctcggagatgatcggggaaagcatagtcccctgtctgcggcaccagacacttcttgttgcttcgctgtttctccccgcccagccagcatttttttccag

SEQ ID NO: 536439 - DNA, 144 bp, Homo sapiens
ggtagtcctaccgagtatatagtactctatgatgtctaatatctaggattcataaaataacatttctggtaattctgacatactaatagtcactcaagcagtaccatttagttacagttgggatatattttcgactgtatggaa

SEQ ID NO: 536440 - DNA, 136 bp, Homo sapiens
aaaattattttcacagtcccccccaactctcattgcgtcgttaaagtccctccaatccttttttagttgtgaaaaaataaggggcctttaaaggaggaggaggaaaaggggaaaaaaacccataatgggcctaaaa

SEQ ID NO: 536441 - DNA, 461 bp, Homo sapiens
  misc_feature (166)..(166): n is a, c, g, or t
accctgagcactggcaaagcccaaaaccttcaccctgaaaggttcacggttagagcccggcagcaacaccggccctttaagtaccttccctttggggccggcccccggaacttcctcggggggggtctaaggctgctttaggtcaaatttaccctgctccccgtgntgcccaagtttcggttccaaacctgcccttaaacccagggccccctgcagctaaaatcccaatttgccctaggtcccaaaaatggggtttatatccaaattgtattcccctttcccaaaaaggtttcgggtgggggggagggccccccccaattcaaaaaaaaccctaagtgtggatgttcaaaattttggaaaaatgtcccttaagtgatttaaaaagggcctggcctgcaaggataaaaggtttttttcaaaacctttcctaaaagcttaaaaaacgtttgttgcccttggga

SEQ ID NO: 536442 - DNA, 528 bp, Homo sapiens
ttgggtctccattcggggtgtaccatggggtgaccgatactcgggtggcagactcaggcaacatcagagagaaggaccggtgctgcgtcagcgtgtgccaggggtacagtgcactgagggcccaggaaaccttcatgcaaggggatcagggccggcggttctacaacttcctcagggctgacaacatgaagaagatcatcctctcgcacaggcaagctctttggggagaccatgtaaagaaaccccagagccggaaagacacggactggagccggctctacacagaaacatccctgatgcagatggatgacaaggtgatgaggaagtttcagggttataactccctgaaggaatactatgaggaagaaagttgcatgcggtacctgcacaggatttatgtccctctcatgcgggttaatgcagctgacgatccgtgggtgcatgaaagtcttctaaccattccaaaatctctttcagagaaacgagagaacgtcaggttggtgctgcctctgtgggggctccattcag

SEQ ID NO: 536443 - DNA, 124 bp, Homo sapiens
tgtgtggtatggatgcttagtgcctcacttcgttctgtctatactgccccatctgagcagccatagctcaccatcagatcaacctttgattttacatcgtaatgtattcaccactggagctcac

SEQ ID NO: 536444 - DNA, 208 bp, Homo sapiens
  misc_feature (166)..(166): n is a, c, g, or t
tcatgctgcatcgaagaagctggtgatcgttggggatggtgctgtgggagacctgcctcctcatcgtcttcagcaaggatcagttccggaggtctacgtccctacttgtctttgagaactatattgcggacattgaggtggacggccagcaggtggagctggctcntgtgggacacagcagggcaggaagactatgatcgaatgcggc

SEQ ID NO: 536445 - DNA, 360 bp, Homo sapiens
  misc_feature (22)..(22): n is a, c, g, or t
  misc_feature (25)..(25): n is a, c, g, or t
tcggtacccgaggatacatgtncgngaggatcacgatgtccgtgaggatcacgatgtccgtgaggatcacgatgtccgtgaggatcacgatgtccgtgaggatcacgatgtccgtgaggatcacgatgtccgtgaggatcacgatgtccgtgaggatcacgatgtccgtgaggatcacgatgtccgtgaggatcacgatgtccgtgaggatcacgatgtccgtgaggatcacgatgtccgtgaggatcacgatgtccgtgggctgtcgggtctagtcggggatcacgatgtccgtgttactattatccacaataatattacacccggacgtgagtctctctgcaaatcaccgtaactgta

SEQ ID NO: 536446 - DNA, 717 bp, Homo sapiens
agcggagtctgcatctgagtaacatggcggcggcggggtatccaggctgtggtggggcgggatcttgggggcgctcggcgctgaccgatgggactgggcgacctccgttctgttgctgccggtgaggcgggagagcgccggggtcgataggcgccccagtgtcagtaccacggaatgatgtggccgcacagagtcagctctctaggcttgatggaagagtatgtggctgagatcttgtgcgcaagttatgtccacacaatgttcaggtgtgccttgcttcggatgatgttagaaggtctgtatccatcctgatggcgtcatcccagtgctgagtttcctcagggatcgcactcagtgtccacagttcatacatctctggttgattgtgacagtagtggacagtcccaacgtctggctaaaaccgtgttgtgacgatttgtctacaaccatgttgtctctgcgcattcaagtcacaggagtccgtgtgaagatgctacagcgagatagagacgtgacagcccattgagtctgcgtgtctctgtgttcagaggcagacaagtggtatgaaagggagatctgggagatgttgggagtcttcttatgtaagcagcctgatctaagaaggatcctgacagattgtggcttcgagggacattctttctggaaagactttcctctatctggctatgttgagttacgttatgatgatgaagtgag

SEQ ID NO: 536447 - DNA, 942 bp, Homo sapiens
actctaccatcttgcaggcacactcatcacagggctaagctcgcactgaattttttacctgagtaggccatagaaataaacatgctaagctttttattccatgttctaaccgaaaaaaataaaccctcgttccgacgcgaagctggccattcaagtattatccgtcacgcaagctagaccgatccatgatccttcgtaatagctagtcctcttcaacaatatacatctccggacgaatgaacgcatagaccaataactaccgaatcaagtatctacagtcattaataaatcatgaatggctatagcaataaaactaggaatagccccgtttcacttcgtgagtcccagaggttacccaatggcgacccctgctgacatccgggctggcttcttctcacgatgaagaaagactagcccccatctcagtcatataccaaatctctccctcacggtaagcacgtaagcctatctctctgcacctctctcaatctgatccatcatagcaggcagtcgaggtggattaaaccaaaaccagctacgcaaaatcttagcatactcctcaattacccacagtaggatggataatagcaattctaccgtacaaccctaaataaccattcttaatttaactatttatattatcctaatagtaccgatttcctactaatcaacttgaaactccagcaacacgacctaataacgatctcggcagctgaaagaagctaacagtgaataaacccttaattccatccaagccttctctccctaagaggcctgcccgataacgggtttggccacaatgggcattttcggagaattcgcagaaaacaaagggttatattccacgattataaaccagaactcttagctctatttactagcatacgtcgcctcacaagaagagcccactcacacaggagaaaagagcgcggggcaaacccc

SEQ ID NO: 536448 - DNA, 162 bp, Homo sapiens
  misc_feature (22)..(22): n is a, c, g, or t
  misc_feature (25)..(25): n is a, c, g, or t
  misc_feature (144)..(144): n is a, c, g, or t
tcggtacccgaggatacatgtncgngaggatcacgatgtccgtgaggatcacgatgtccgtgaggatcacgatgtccgtgaggatcacgatgtccgtgaggaaaaattacctgtcttgactgccatgtgttcatctctaagtanttgtaagctgctatgtat

SEQ ID NO: 536449 - DNA, 687 bp, Homo sapiens
cgattgtcataaccccgataaactccggttgcctggtttgtgcaaatagaaccccgacagcgttgttctttcttacaaagaaggtaaaaggatgacttcaacaagaatgacattatgtgcgggggaagaaatgacaccatcgcgttaacaacgctcttttcggtgcagcgatgaatcgatggggcacccgccccttgcccccgctgttggagatacttctcctgtgctgtatactcagcccaaagaggagcctccacgcttttcggatgggccccacgctagatggtgtgttccccggaatttttcccactctgctaaataatttttacatcggccttggcttgtttttagaataaattgttattgtttttatggggagaagcgtttaaaaattcgtgtaataggtagcatccttcgtcagggcgaggtttattagaagggggatagataacattcacctctcgataagctactaagtaatagcaggctctccgtctagacaccaagtctctattaaaatatgtctgtaggccactactactatttagcgaaatatatacctactaatatttatcctattcacttttgagaaataattgtaaattaatcgattactcccttcttccaaaaataataaaactctcttttttacaccctcttctcgcccaacaaataacaaaacaacat

SEQ ID NO: 536450 - DNA, 743 bp, Homo sapiens
  misc_feature (22)..(22): n is a, c, g, or t
  misc_feature (25)..(25): n is a, c, g, or t
  misc_feature (478)..(478): n is a, c, g, or t
  misc_feature (494)..(494): n is a, c, g, or t
  misc_feature (511)..(511): n is a, c, g, or t
  misc_feature (549)..(549): n is a, c, g, or t
tcggtacccgaggatacatgtncgngaggatcacgatgtccgtgaggatcacgatgtccgtgaggatcacgatgtccgtgaggatcacgatgtccgtgaggatcacgatgtccgtgaggatcacgatgtccgtgaggatcacgatgtccgtgaggatcacgatgtccgtgaggatcacgatgtccgtgaggatcacgatgtccgtgaggatcacgatgtccgtgaggatcacgatgtccgtgaggatcacgatgtccgtgttccttactaatgttagtaaggaacacagacttgattagagttcttatctcacttagcttttgtgagatcttagcctccatttagaactgttttgaggattaagtgaggcaacataatgtaaaacacaaatgtgaggtaatataagtgtatatacctccggtttgtctgaattagaaacccttggaaatgggcgccgggcgccggtggctctacgccntgtgatacccagcgcntttgggaggcgcgaggntgggaggatcacacaggtgcgggagatgcgagaccatncctggctaacacgggtgaaaccccgtctctactaaaaatacaaaaaaaaattagccgggtgtggtggcgggcgcctgtggtcccacctactcgggaggctgaggcgggagaatggcatgagcctgggaggcagagcttgtagtgagccgagatggcgccactgcactccagcctgcgacggacatcgtgatcct

SEQ ID NO: 536451 - DNA, 280 bp, Homo sapiens
gttgattgaaacatcagaggatgttgtgatcaaatattcgagatcaatctccacgagatgtgagatgcacgatggtggtcgtcacacggcggagatctggcccactgcagtgccaactgctgatgcagacacgcctggagaacaaagcagtccccagcccctgggtctgtggcagcgaggtgtccgccctgtaccccagggatgtgtcggcactgcacaggctcagggctcctgagtggggtgacacggggaggctgggccagggctccaggctccagtc

SEQ ID NO: 536452 - DNA, 852 bp, Homo sapiens
  misc_feature (2)..(2): n is a, c, g, or t
  misc_feature (20)..(20): n is a, c, g, or t
  misc_feature (76)..(76): n is a, c, g, or t
  misc_feature (99)..(99): n is a, c, g, or t
  misc_feature (119)..(119): n is a, c, g, or t
  misc_feature (341)..(341): n is a, c, g, or t
  misc_feature (444)..(444): n is a, c, g, or t
  misc_feature (590)..(590): n is a, c, g, or t
  misc_feature (629)..(629): n is a, c, g, or t
gnttgggggggggggcgtgncttttatttttttttgggtgggggggggggcgggggcgccgccctcccctctcaanccaaaaaataacacctaccactnatatgttatttctttttttnttcactcttgcgaggtgttggggcgtacacccccccaaaaacaaaaagcatttattattatatctatttaacccttgttgtggtagaagtataaaggaaaaaaaaaaagatcaccccacacttgcttctttgtttgtttgttgtatttataagcgaggcgccggggggctgacaaaacaaacacccaaaaaaagagagaagagaaaaatacataataatacncctgtcgttgggtccggggccggggcgtctctatttatcataacaaagagtaacgtccattactgttctctcttttttgtgtggcgcgggtgtggtggcctcnatggcacccaaaaaaagataataaaaataaaaatttcacttgctctctccgtggtgtaactagatttgttttctttctacccctcctaagtgataaaacaaacgtgagagcgggcggggcgagcccctgtcgtcgtttagctggtngtggtgtgatatagccaacaacggccctcctcttgtgcntctttttctaacaaaaatatcaacctattatttcttttgtttttgtaataatgaaagaagaaagaaaaaaataaatacagaatatatatttgtttagataatgaagcgtagggggctctctctctcctctctcattaaagaaagataaagaggagtaataggagcggagtaccaaccaatataagagtgagggatgtaggtttctcagctatcctctcttccc

SEQ ID NO: 536453 - DNA, 934 bp, Homo sapiens
  misc_feature (6)..(6): n is a, c, g, or t
  misc_feature (76)..(76): n is a, c, g, or t
  misc_feature (94)..(94): n is a, c, g, or t
  misc_feature (102)..(102): n is a, c, g, or t
  misc_feature (119)..(119): n is a, c, g, or t
  misc_feature (122)..(122): n is a, c, g, or t
  misc_feature (152)..(152): n is a, c, g, or t
  misc_feature (198)..(198): n is a, c, g, or t
  misc_feature (306)..(306): n is a, c, g, or t
  misc_feature (358)..(358): n is a, c, g, or t
  misc_feature (360)..(360): n is a, c, g, or t
  misc_feature (362)..(362): n is a, c, g, or t
  misc_feature (431)..(431): n is a, c, g, or t
  misc_feature (433)..(433): n is a, c, g, or t
  misc_feature (460)..(460): n is a, c, g, or t
  misc_feature (466)..(466): n is a, c, g, or t
  misc_feature (535)..(535): n is a, c, g, or t
  misc_feature (548)..(548): n is a, c, g, or t
  misc_feature (567)..(567): n is a, c, g, or t
  misc_feature (589)..(591): n is a, c, g, or t
  misc_feature (598)..(598): n is a, c, g, or t
  misc_feature (601)..(602): n is a, c, g, or t
  misc_feature (606)..(607): n is a, c, g, or t
  misc_feature (609)..(609): n is a, c, g, or t
  misc_feature (647)..(647): n is a, c, g, or t
  misc_feature (653)..(654): n is a, c, g, or t
  misc_feature (663)..(664): n is a, c, g, or t
  misc_feature (671)..(671): n is a, c, g, or t
  misc_feature (674)..(674): n is a, c, g, or t
  misc_feature (695)..(695): n is a, c, g, or t
  misc_feature (700)..(700): n is a, c, g, or t
  misc_feature (712)..(712): n is a, c, g, or t
  misc_feature (716)..(717): n is a, c, g, or t
  misc_feature (733)..(733): n is a, c, g, or t
  misc_feature (739)..(739): n is a, c, g, or t
  misc_feature (744)..(746): n is a, c, g, or t
  misc_feature (752)..(752): n is a, c, g, or t
  misc_feature (756)..(756): n is a, c, g, or t
  misc_feature (765)..(765): n is a, c, g, or t
  misc_feature (768)..(768): n is a, c, g, or t
  misc_feature (771)..(771): n is a, c, g, or t
  misc_feature (773)..(773): n is a, c, g, or t
  misc_feature (783)..(784): n is a, c, g, or t
  misc_feature (794)..(794): n is a, c, g, or t
  misc_feature (804)..(804): n is a, c, g, or t
  misc_feature (806)..(806): n is a, c, g, or t
atgttnttcaaccccgaggagtcggagctggacttggactacggcaacagatacaagaacgtgaagctccctgacncctacgagcgcctcatcntggacgtnttctgcgggagcccagnatnttcgtgcgcagcgacgagctccgtgaggcntggcgtattttcaccccactgctgcaccagattgagctggagaagnccaagcccatcccctatatttatggcagccgaggccccacggaggcagacgagctgatgaagagagtgggtttccagtatgagggcacctacaagtgggtgaaccccnacaagttctgagccctgggcacccacctccacccccgccacggccaccctcntnanaaccgcccgaccccgagtcgggaggactccgggaccattgacctcagctgcacattcctggccccgggntntggccaccttggcccgcccctcgctgntgctantacccgagcccagctacattcctcagctgccaagcactcgagaccatcttggcccctccagaccctgcntgagcccaggagntgagtcacctcctccactnactccagcccaacagaaggaannntgagggngcnnattnntntgtcccagagtttattggccactgggtttcactcctgngtgggnncagggtggnngggaggnacnagggggaggaaaggggcgagnacccncgtgagagaatntgcnngtggccttgcccgccngcctcngtgcnnnttgacnttcnttgtcaccngcnacntntcgagccccnnggatgtcccntgtcccaccnantctgcactccatggccaccccgtgccacccgtaggcagcctctctgctataagaaaagcccggacgcagcagctgggacccctccccacctccatgccctgcccatttaatccgccaaccagcccaca

SEQ ID NO: 536454 - DNA, 174 bp, Homo sapiens
ttcctttttaaggttttgtaggcaaggggggccccctgacttcctgggcccgggaatttaacccgtttttaaggttttgcgggaaaggccctttttccaaggggtttttccaaatggcccaaggggaaagcccaacagggggaggacccttaaaaaaaaaaaaaagccccttta

SEQ ID NO: 536455 - DNA, 183 bp, Homo sapiens
agctgatcgacgaggcggcctggcccaggcggtcgccatgcgcgccgtctcaggcgtcggtctggacgtgttcgagaatgagccggacatccaccccggcctgctgggccagcccaatgtggtgctgttgccccacctgggttcggcgacgcttgaggcgcgtcaggacatgggcgaccgggt

SEQ ID NO: 536456 - DNA, 461 bp, Homo sapiens
tagctgggtgtggtggtgggagcctgtaatcccagctactcaggaggctggggcaggagaatcacttgaatccaggcgggggcggaggttgcagtgagccaagattgtgccattgtactccagcctgggcaacaagagcaaaactccgtctcaaaaaaaaaaaaaaaaaaaaacgcagaggttgggcacggtggctcacacctgtaatcccagcactaaaaaagcgcagaggttgggcacggtggctcacacctgtaatcccagcactttgacaggccaaggcgggtggatcacctgaggtcaggaattcaagaccagcctggccaacatggcaaaaccctgtctactaaaaacataaaaattagccaggcatggtggcacacacctgtaatcccaagtagctgagattacaggcatgtaccaccatgcccggcccacagagttttctcttaaataaattt

SEQ ID NO: 536457 - DNA, 549 bp, Homo sapiens
gtgttctagaggatcctgaaaggatccctaaccagaccttccaaaactatgtggaataggaggggggggagagagcatcgtggtctggtggtgctttgcaaagggaatgtttcaaggcttttggcccattcagtatgatatgggctgtgggttggtcgtatgtgtctcttttaatttggaggtatttccttcaatacatagtatatggagagtttttaacgtggaggggatgttgaatttaattggaagaccttttctgtgtctatggagataatcatgtggttttggtctttagttctgttaatgtgatgaattacatttatggattggcgtatgtggaaccaaccttgcatcccgaggataaagccaacgggatctggggggataagcttttggatgtgctgctgggttcagctggccagtattatatggaggatttttgcatcaacatccatcagggatatcggcctgatgtttcctttccggcagtatcttggctaggtaagggaatcaggatgtcgctggcctcataacctgagtcagagacca

SEQ ID NO: 536458 - DNA, 363 bp, Homo sapiens
tgggtacgaaggtctacaaggatataaggacttgaaaatcattaggagagcctatttgcaatatttaaaaattataaaacaggaccaggcatggtggctcacatctgtaatcccagcaccttgggaggctgaagtgggcggatcatgaggtcaggagtttgagaccaacctggccaacatggtgaaacctcttctctactaaaaatacaaaaaattatccaggcatggtggcgggcacctgtagtcccagctactcgggaggctgaggcagtagaagcacttgaacctgggaggcagaggttgcagtgagccgagatcgtgtcactgcactccagcctgggtgtcacagtgagaatctgtctc

SEQ ID NO: 536459 - DNA, 404 bp, Homo sapiens
atataatcaaaattgctgaactctgttcaatcttcattgtaaaaagcagcttcaaagctgagtagatatctatagtcaaatgtataacgaagctttatacttatcaatttctttttagagcagggggcatgggctgaaatacatcttgtgctcaataaacctccccacaccaatatttcaaagcactttctaggttacaataatgacatttcaattccatatacgcatacatagaatatatattattaaacagagtgggtcttaagagtatacttggaaccctcggagtcctccatggacaagaacagggtggcccttggactatccagccaaaggctccactgtggggctagctttggggagagactcacagctggacttctctatccgaccatgtacgagaa

SEQ ID NO: 536460 - DNA, 135 bp, Homo sapiens
ccgcacggcgcataggcagtggtccccggcggctcctgcacgtagaggtgtattcaagtcgcagtcaaagtatatcttgcagtgcatggcaccacggtgcttcgaggatgaggcccgggcagccagggccggcgg

SEQ ID NO: 536461 - DNA, 1200 bp, Homo sapiens
  misc_feature (146)..(146): n is a, c, g, or t
  misc_feature (216)..(216): n is a, c, g, or t
  misc_feature (233)..(233): n is a, c, g, or t
  misc_feature (884)..(885): n is a, c, g, or t
gagtgtgaaatcttcagagaagaatttctctttagttctttgcaagaaggtagagataaagacactttttcaaaaatggcaatggtatcagaattcctcaagcaggcctggtttattgaaaatgaagagcaggaatatgttcaaanctgtgaagtcatccaaaggtggtcccggatcagcggtgagcccctatcctaccttcaatccatcctcggnatgtcgctgccttgcantaaggccataatggttaaaggtgtggatgaagcaaccatcattgacattctaactaagcgaaacaatgcacagcgtcaacagatcaaagcagcatatctccaggaaacaggaaagcccctggatgaaacactgaagaaagcccttacaggtcaccttgaggaggtgttttagctctgctaaaaatctccagcgcaatttgatgctgatgaacttcgtgctgccatgaagggccttggaatctgatgaagatactctaatggagatttgggcatcaagaactaacaaagagatcagagacattaacaggggtctacagagaggaacttgagagagatctggccaaaggacataacctcagacgcagtctggagatttcggaacgcttgtgtttcctctgtgctaaagggtgaccgatctgaggacttgtgggtgtgaatgaaagactgtgcgtgattcagatgccagggcttgtatgaagcaggagaaagggagaaagggggacaaggaacgtaaacggtgttcaataccatccttataccagaagctatccacagattcgcagagtgtttcagaaatacaccaagtaccagtaagcatgacatgaacaaagttctggacctgggagttgaagggtgacattgagaaatgcnncacaggtatcgggaagagcgccacaagcaaaccagctttctttgcagagaagcttcatcaagccatgaaaggagctggaactcgccataaggcatcgatcaggaatatggttccccggtctgaaattgacatgaatgatatcaaagcattctatcagaaaatgcatgggatctccctttgccaagccatcctggatgaaaccaaagggattatgagaaaaccccggtggctctttgggggggaaaacaaacaaccccttgaagggctcaagctaggatcagaagaacctaaaataaataatcccatacccagaag

SEQ ID NO: 536462 - DNA, 694 bp, Homo sapiens
  misc_feature (146)..(146): n is a, c, g, or t
  misc_feature (216)..(216): n is a, c, g, or t
  misc_feature (233)..(233): n is a, c, g, or t
  misc_feature (378)..(379): n is a, c, g, or t
gagtgtgaaatcttcagagaagaatttctctttagttctttgcaagaaggtagagataaagacactttttcaaaaatggcaatggtatcagaattcctcaagcaggcctggtttattgaaaatgaagagcaggaatatgttcaaanctgtgaagtcatccaaaggtggtcccggatcagcggtgagcccctatcctaccttcaatccatcctcggnatgtcgctgccttgcantaaggccataatggttaaaggtgtggatgaagcaaccatcattgacattctaactaagcgaaacaatgcacagcgtcaacagatcaaagcagcatatctccaggaaacaggaaagcccctggatgaaacaacattgagaaatgcnncacaggtatcgggaagagcgccacaagcaaaccagctttctttgcagagaagcttcatcaagccatgaaaggagctggaactcgccataaggcatcgatcaggaatatggttccccggtctgaaattgacatgaatgatatcaaagcattctatcagaaaatgcatgggatctccctttgccaagccatcctggatgaaaccaaagggattatgagaaaaccccggtggctctttgggggggaaaacaaacaaccccttgaagggctcaagctaggatcagaagaacctaaaataaataatcccatacccagaag

SEQ ID NO: 536463 - DNA, 580 bp, Homo sapiens
gcaggaagccagagactatagatagtatgtaagttaaaaggagaagaaggccaagattgcctgggtccactcttgtaaagttgtagaagactggaaatctccctagctcctctctttcccttcgccctccagagcccccaagccccacccccaaatacttgtttcctttggggtatctccatcctgactcttgcagctggggtactctctaggagtatgttttaatgtttgtagcctcagctcagaagaaggctcaacccaaacctactccctgcctttctgcctggggctgccttctctccagagcctccttccattgcacccaggaatcattgctgtgaaagaacatcatagcttggaccccatgtaagccctaaccttggtccacttgtgggagttctctgatagctctttttatttttttagataaaaaaaaatgttttaaggcaagttctcactatgttacccaggctgagacaggagaatcgtttgaacccagaagacagaggttgtggtgagccgacatcgagccattgcactacagcctgggcaaaaagagtgaaactccatctccagaaaa

SEQ ID NO: 536464 - DNA, 852 bp, Homo sapiens
gccgagccctcttggtccggcgctggccaaagccgtgggtcgtcgccccggagccgtggcttagggtcctgggcggttccacccgtgggggagcatccaaggcccagccccggtgggccgttcacgcaccgtcgtgcctcgtggggcaactgctgtgcgcgtgggcgccccggagtgttgtttgtgccagggccaccgggacgagtgttcgacccaagcgctgccggcgccccctgtctgggccctgtcgtcccaagccccaagtgcggtcccccgtggcgccccgggcttgttcccccggtcccccccttccggccggtgatgtctcgccccacaatcccactgggtgtcggccccgacgacccgtgccgtgcgctccagggttcttgttgccccccacgggcagtattcccctcgctctgaggtgttggagagacaacccccatcgggcctcacccgcggaggtgcgactctctcgaggccaccggcctctgctcgcagtgtggtgcttcccctcccgcgcgcttgttctttgcgtccaattgccgagcggctccgctccgcggtacctaggaccacggggcgacaacaccagggaacagtttttacccacggtccctggacgaccgtagggcttcttgtgcccccccctgctgcccagagagcctccttcgcctgtcccgccggcagtactttggggcggcgagctcgcgggtaggctccccgctgtgtcccagggtttcatcctgtgtcccggggagctgtctggagcctagcccccgtctggtagaattcttccccgcgcccccgcggggcaagtatgcccccccccctccccccccaaccaagaca

SEQ ID NO: 536465 - DNA, 606 bp, Homo sapiens
  misc_feature (8)..(8): n is a, c, g, or t
  misc_feature (239)..(239): n is a, c, g, or t
  misc_feature (381)..(381): n is a, c, g, or t
  misc_feature (420)..(421): n is a, c, g, or t
  misc_feature (537)..(537): n is a, c, g, or t
aacgtccnacataacgaatgaacgggcggggggcatgatttatcctcttccgtcgccatgacccgcgataaccagcgtgagctcgcccgccagaagaatattaaaaagcagagcgactcggttaaggtaaagcgccgagatgacggtctttctgctgccgcccgcaagtattgggacgctgagatcatgcagcagaagcagaaaccctcttgccattcgcctgtgaacctgaagccagncctaccacggtcatgtttccttctgcagctctcacagcgtcccaggacccgttggctttctttttagacttgagatctgcagccgagcccctcccgggctggggttgcccttatataatccgctcttcttatgtcccactcnaggaccgcactccctttctcctcccctctctatttctgnngccgacagccaaacccctattattagaatcctccccccaccccccaaactccttcaagccttccctctgcttcccatccggctctaatgcagagtgtctctctacccagccgtccnttcttaaccacactctcttccccgcgacctgtaattcttttgtgagggcttctcctgttggcggatcat

SEQ ID NO: 536466 - DNA, 478 bp, Homo sapiens
cctcacagaagtgggtagaggtcagtccattgcaggaatatatatcgggagagcagtcccttggggctctgtatgctggtgtaacccagaggtaatgtgggtaccctttctgaagctgtcagtggctgtgactagcacccttatcatccctcactgccttggtgggaatagtagaggttagttttcctccagaccccctggcctgtgcctttcttatctatttactctccatgccagacagtaagctttgagggaaggaggagagagagaggtggtgaggatgactccgatgatcaggagtgggatattcctctgtcagagcacagaggggggtcatatcatcttttccctctcctatttggcccaggtgcttggaggaccgaccccatggctgagaatatgacggccagaggaacagagttggctccaagtgggaaagggtccaagcagtcagagaagatgtctgtgtggtttccct

SEQ ID NO: 536467 - DNA, 345 bp, Homo sapiens
ttttttttttttgagatggagtctcactctgtcacccaggctggagtgaagtggtgtgaccgtggctcactgcaacctctgtctcccggattcaagcaattctcctgcctcagcctcttgagtagctgggattacaggcacacaccacacacccagctaattttttacatttttggtagagacaggatttcaccatgttggccaggatggtcttgaactcctgacctcaagtgatccacccacctcagcctccaaaagtgctgggattacagacgtgagtcacagcacccagccaaaattaacatattattgaaacactaagtaacatctacagaacaatagtaa

SEQ ID NO: 536468 - DNA, 286 bp, Homo sapiens
ttcagaaagtttaagcatataaactttttatttttaacctgcctaaatccccggattcccaaacccggtgcctcctaattaatatatctttatatatttagcccaaagccgggaattttttatttccttttttaaaaaattatatttgtctcttagaggtaaaattttctttatataatattgtcatatgtcatagttttaaacccattcccatgatttctatgtttcttaatgatattttgttgtgtaaaattgatcggattgattaaaaaaccaattctctgga

SEQ ID NO: 536469 - DNA, 426 bp, Homo sapiens
tcacgccctgtaatccccagccacattgggaaagtggaagtttgggggggaatcagctgaggtcacgggttcgagaccagcctggctaacttggtgaacccctgtctctactaaaaatacaaaaattagctgggcgtggtggagcgtgcctgtaatcccagctacttgagaggctgaggcagaattgcttgaacataggaggtggaggttgcagtgagctgagattgtgccactgtactccagactgggcaacaaagtgagactctgtctccaaaaaataaaaaataaggccgggcgcagtactcacgcctgtaatcccagcactttgggagctgaggccagcggatcatctgaggtcaggagttcaagaccagtctgaccaactgcacccactccctaataaattcattctccttgggagcctcc

SEQ ID NO: 536470 - DNA, 848 bp, Homo sapiens
agcggaagtgcctggaagcggaagctggacagacgaggagaggccttgggtgtgacatcaacggaacctgagggaagcaaaactcagcaaggacgcgcccggtctgctggcctgtgggctttggcctttcaggttgcccaagagcaaagaaaagtggtatcaggatagcacagagcaaagaagataaagcaagatcaaagaacccatcaagggtgtccggtccccgggtgcagacggcaagggcccacatcactgggaagtacgcgtcccaatcgcagcgcctccgggtgccccttggtggccaagatggcagaaaagacgggtacctgaatggctcccagttctcctggaagtcggtcaagacggaaggcatgtccttgcccaagccaggggtgcgacgagtcaaggccaccgtcagcggcagctttccctcaaacaccggcagcttgttccaggatgcccgagagccacgtcaagcgatgacagaaggtaaagctttcttggagagccagatgcttgaaccattcaaacagcagggccaaggcaacggtatagaacaatgctgacgacaatcaaaacaggttaagatgaacgacaattcacagggacgctacatgacatccaattcccaagatggaagccggatctggattaaactccagaagtcagggtaacaatttaccacagatggagagcaacctgaagaccatcgaagaaggagaacaaagtggactgaggcagaggacacgagtttctcctccacgaactggggaacttgagaccagtctctgattcacacaggctggataaaattcatgttgcgaaattggatccaatccatgcaagaa

SEQ ID NO: 536471 - DNA, 596 bp, Homo sapiens
  misc_feature (388)..(388): n is a, c, g, or t
  misc_feature (450)..(450): n is a, c, g, or t
  misc_feature (537)..(537): n is a, c, g, or t
  misc_feature (559)..(559): n is a, c, g, or t
  misc_feature (568)..(568): n is a, c, g, or t
cggtccgggtgctcatgtgcatcccctttctttgtcttcagtgtaggcccaggatgcagtgctctcatctcaacgaacctaatttagacttgcctcccagatgagcctagaggtaacctagtggtggtttgcctaagtatggcccacagaggctcctgtatgtcctaatacttgatccctagttggtggaattgtttaggacagattgggaggtgtgccttgttggaggaggtgtgtcactgggaatgggtttaaggtttcaaaagtccattccaggcccaatctcccccagccccccactctctgacgaaactttggaatcagatgtggactgtcaggtattgctccagagctgtacctgtcttcctgtcttcctgtctgccgtgcntcctgctgtgacgaccatggactcaccctctgaacttgttaagcacatttcctttataaatncctaagtcatggtgtctcctcgcagcaatagaaacataataagacactagctagtccgtctgtaattaatgccagaagtccttttcngggtaatccaagcctgtcaagntgacaatantaatcccacagtatggaaactattatag

SEQ ID NO: 536472 - DNA, 756 bp, Homo sapiens
taattctagatcgcgagcggtcgccctttttttttttgttggtttttttatccataattccaactttaatttaaaatccaggggatccccgtgcaggttggtgacgggggtaaagttccttgggaatctggttttgggcccagggaatagtcttgtggccctgtaccctttaaaaaaacggggcatttaaaggtgcgcgtgagtaaaatagttgaaaatagctggggcacaggggcccaccgtgcacgacaacacataaaaaaaaaaaaaaaaaaaaaacaaaacaaacaaaaaaaaaaaaaaaaaaaaaaaaaaaaaaaaaaaaaacaaaaaaaaaaggggggggggcccaaaaaaatacccccggggggggccacaacacgcccacccttttttaaagaggggccccccaataagggagggccgtcctaaaaaacaacagcaaagaaccgcgggcggcgcggaattaaacacacaggccgcggggggagggaaacaaagcgcgcgacggcggtgcccctgttgaggaggcaaccccacctccggggggggggggagcaaacatgggggaacacaccacacccacagaagagttttaacgccgccgccaggggaaaaaaaacaacctcagagagttatacagggggtaaaccccccccgggaatatcagtacgcgtggacgagaaaaaaatatcgcccacagcagtgtctatttgcagacaaatttaaacgccgggaagcgtaaaaaaaacttgt

SEQ ID NO: 536473 - DNA, 902 bp, Homo sapiens
tgtttttcccgccctccaaaaccatatcttaagttgtgtgtttgccagcctggtatatttagtgattaaaaataaacccctttgcaagagacctggattatctgttctagtgttaactgttcaactttggtaagtcactccctctctctgaccctcaattttctcacctgtgaaatatggctgattccactttcctaagtaccttttcaagactgtgtgaatcttaaatgatatactttatatgaaatgttatgtagttactacatttttcaccttaaaagaagattatagtagagcttctttctgatacttatcttgaatacaatttgatataatgtctatgaggctgtagctctatgataacagggactatatctgtcttgcttgttattaattcgtcagatggcatatggtagcactcaaatatttatggaataaatgactagacaatgtggttatgtaagaaattcagaaggatgtcatattaaagtatagggagtaccatgatgtggcctgtctggaaaactgatcatagagaaacttttgcagttattaatatcaaagtaatatatctatgaacattatatagggcatcctggagatctttgctgtgattatttagaaagaaatattatttctgtggtctctgggtgtcagttattaattacattaaatctatttgtttgataaatacacttactgtggtgttatgagatggactaggatgggacagtggtcaggctgcatttggaagcgaagtaaagaagttaggcagaatatgaatacgaaggggatgaaaagatcatctggaaagaagacttaaaaaaagctgatgggggacttgaacagtctgaaacgagacagcagacaaaccgacgacacacgtaaacaagggggacaag

SEQ ID NO: 536474 - DNA, 302 bp, Homo sapiens
acaggaacaaagatgagtgtggcagagggagaggacctctcatgtgtaatactcagtacctgtataagaaaaaacaacaaggaagtacaaccaaagacaggcaggcagctggcgctaggccgaaaccaggcctgcgcctgcctggactaaacccagtagttgaaaatcaattcataacttagaaaccgatgttattcatagattccagacattgtatagaagaacatttgtgaaactccctgccgtgttctgtttctctctgaccgccggtgcatgcagcccctgtcacgtaccgcctgctt

SEQ ID NO: 536475 - DNA, 770 bp, Homo sapiens
  misc_feature (5)..(5): n is a, c, g, or t
  misc_feature (79)..(79): n is a, c, g, or t
  misc_feature (108)..(108): n is a, c, g, or t
  misc_feature (125)..(125): n is a, c, g, or t
  misc_feature (127)..(127): n is a, c, g, or t
  misc_feature (132)..(132): n is a, c, g, or t
  misc_feature (134)..(134): n is a, c, g, or t
  misc_feature (137)..(137): n is a, c, g, or t
  misc_feature (142)..(143): n is a, c, g, or t
  misc_feature (150)..(151): n is a, c, g, or t
  misc_feature (154)..(154): n is a, c, g, or t
  misc_feature (172)..(172): n is a, c, g, or t
  misc_feature (177)..(177): n is a, c, g, or t
  misc_feature (180)..(180): n is a, c, g, or t
  misc_feature (185)..(185): n is a, c, g, or t
  misc_feature (191)..(191): n is a, c, g, or t
  misc_feature (197)..(197): n is a, c, g, or t
  misc_feature (222)..(222): n is a, c, g, or t
  misc_feature (236)..(236): n is a, c, g, or t
  misc_feature (251)..(251): n is a, c, g, or t
  misc_feature (257)..(257): n is a, c, g, or t
  misc_feature (263)..(263): n is a, c, g, or t
  misc_feature (266)..(266): n is a, c, g, or t
  misc_feature (270)..(270): n is a, c, g, or t
  misc_feature (272)..(272): n is a, c, g, or t
  misc_feature (275)..(275): n is a, c, g, or t
  misc_feature (288)..(288): n is a, c, g, or t
  misc_feature (295)..(295): n is a, c, g, or t
  misc_feature (302)..(302): n is a, c, g, or t
  misc_feature (357)..(357): n is a, c, g, or t
  misc_feature (382)..(384): n is a, c, g, or t
  misc_feature (386)..(386): n is a, c, g, or t
  misc_feature (388)..(389): n is a, c, g, or t
  misc_feature (395)..(395): n is a, c, g, or t
  misc_feature (404)..(405): n is a, c, g, or t
  misc_feature (414)..(414): n is a, c, g, or t
  misc_feature (419)..(419): n is a, c, g, or t
  misc_feature (423)..(423): n is a, c, g, or t
  misc_feature (426)..(426): n is a, c, g, or t
  misc_feature (433)..(433): n is a, c, g, or t
  misc_feature (443)..(443): n is a, c, g, or t
  misc_feature (445)..(445): n is a, c, g, or t
  misc_feature (455)..(455): n is a, c, g, or t
  misc_feature (461)..(461): n is a, c, g, or t
  misc_feature (464)..(464): n is a, c, g, or t
  misc_feature (470)..(470): n is a, c, g, or t
  misc_feature (476)..(476): n is a, c, g, or t
  misc_feature (505)..(505): n is a, c, g, or t
  misc_feature (509)..(509): n is a, c, g, or t
  misc_feature (529)..(529): n is a, c, g, or t
  misc_feature (542)..(542): n is a, c, g, or t
  misc_feature (744)..(744): n is a, c, g, or t
catcnctttggaaggggacttactatactcagctcttacgctacccaaacagagaagccttctttttaaaacccaaggntaaggaccagtgaagaatagctccaattngacactagacacaaaanancttangnggnaaagnnagggggnngcngggggcggggggggaagngaganggnggagncccccngtcccngcctcactgttcctgcacgtgacanacactttccttgcnaacttattaataggngcgggngcatcnggnaaangnggncgaagcggcgaangccaggngtgaaanagtcctcccactgacttgcgactccttagacttctaatatgtacaaatgcttganacagcaaattcaacaactaaaaatnnnangnnattgcnaatttttgnntcatgaggnaaagnggtngcnacaatcngtggggactnangtgagaggangtgagngtntccgcncctccnaagcgccgactaggactgacctctgcgcnaacnacggtttaaagaggatttcnctttgaggcagcngtctatggaaggaaatttcttaaggtaatataggtgtgcacaaaaagggaaaacaccctatttcatttttcaatttgttaaagattatagttttgagctcctctcctaaactagaaatccactaactctaacttagtattctactccaagacaaagggtattatgtttaaggaatgataggatctattgggaatgctaaaantataaatttaatacatcaatgcgagt

SEQ ID NO: 536476 - DNA, 265 bp, Homo sapiens
ctgtggatcacagtactagccaggggaggaatttcataagaatcagcagaacaaacttctactcacgatgtttgcgaccaggcaccgtgtctcacccctgataatccagcaccttgggaggccgaggtaagtggatcatctcaggtcaggagttccagaccagcctgactaacatggtgaaaccccatctctacaaaaatacaaaaattagccgggcgtggtggtgtgcatctgtagtcccagctactcaggaggctgaggcagg

SEQ ID NO: 536477 - DNA, 1736 bp, Homo sapiens
  misc_feature (278)..(278): n is a, c, g, or t
  misc_feature (921)..(921): n is a, c, g, or t
tgggcccatagcgccgtcggcgcgggtaataaggggggagagaaaatttatgtttaaacctaaaaatatcattataaagataacatctggaaaaaaaagggaaatatctaaacttgggatttccaactgggattatgggcaatggtggaacactggatatcggtccgggtcctctatgggatattatggggatatgggactggacatccactggaacacatgttctcccgcgcaaaacacatactcccgaggtggagaatttatagaggggaatatcncaacagagagaggtgtgtacacgaaaacccgtgtgttgagacgccacctttctcacaacactccagagtgtgtcaaaagtgcgaacgtctccgagccgtgtgtttcaaacaagagggagatcacgcgtgagacaataagtctctcacatgtgtggcgaactctcccaaacaagatatataaagagacccagcacaagagacaaagaacaccagaacagagacttgtgtgtgggtcacagtgacgatgtgtctctctctcccgaggtgggcgtgcccccaaagggaaagtgttatatacacagagaacatattataaaagatattttcctctaccagagaaagagcgcgtgtggatcctcgacgagagagaggagggggcgaaggacccagcggcggggatgacaccgctatagggatgacaaccttccccaaaagtgggggccgtgaccatgttgtgagatgagaggtttttccccaccaaacaacaaggcggtgggcgacgaggccccactgctgtggggcgccgaggaacactaacatttcaccaatatacgaaggtggtgattcgacagccccctaaacgacgttcattaaggtgcggacagatgtgtggtgtctacaaaattaacacgagggaggggangacacctcctgttgttcctccccccgaagaggaatatcaccgaagaaaaatgtcggaccaacagagtgctaccggggtgtgttgcacaccaaaaggatacctcgcgaggggggaagaaaaacctccccgaagaagagataatgtgggggccacccagaagagatttatcttcacctataaagcgacgaggtgttctattccccttcccctcataaaaaaaggcttgtggtgacaaagagaaggttccccgagggaaagaaaagcccctttttcggcttattccccccaagcgcggcggagaagattacaactaagaaaggagggccgccctacattaactactcccctataaagctctctgaggaagtcccccccaatttcccccggacatctcgaaagaagaattccaactccaaaaggcccaaacgagaaaatcaaacaagcgtccgaggaggagcgacgaaaaaaaacacagagggtgggcgcgcggtcttaacaccccgcagctacggaggagagaagacgtctctcccccccaccaagatgagacacacaccatctccgtccgcggtacagcggacgaagagggtgtttcaccactggacacttcgagtgagatcactcaattgagtaaaaacagcaacggctggtcagatgtcaccagaagggagctcaaaaaaacacaacccagagagtggaagagacatcacacaaaagcgatggcgcagctcgaggaaaacacaactctcacttgcagcaagacgaaagaagcaaccaaacgacaagatcaacggatggatgcgaccgagcaacta

SEQ ID NO: 536478 - DNA, 230 bp, Homo sapiens
  misc_feature (77)..(77): n is a, c, g, or t
gtggagctgcctaagacctgggagctcacccctgcatcaagtggctaaatgtgagacgccagtcaaggagattattnggaactttaagatttaatgactggcctgctgggttttggagtttgatagacccagagcccttttgctttgggcaaattcttcccttttgggaaagagggaatatttaccccaaatggcctgcacattgcattggttattcttgaaaagtaaac

SEQ ID NO: 536479 - DNA, 384 bp, Homo sapiens
cctcctactagctctgaagaatctgggcgtccagatgcatggtttccccccagagcagcacaccccctccaccaaaggatagccaaagtacttcattaaatgggtcctgtttcccatgccaagttggtgagaccccccaaaagaggttgtcagatgccctatacagaagcattcctactggcatcaggtgggtgccactcaaggtcagagatcccagaggaaacagcagacatccatctttgctgttctccaatctcctcaagtgacgtttctaggcatgggagcatattaatagggcctgaagtgaacccccagcaaaccacagtagccctacagaagagggacctaactatgaaataaaaaaaaaaggatgaaagctaaaaa

SEQ ID NO: 536480 - DNA, 149 bp, Homo sapiens
tctacacaagagaaacagagctcacagacatagagaatatatttgtggttgccaagaggggagggtacaggaaaaatggactgggagtgtgggattagtagatgcaaaatattgcatttagaatggataaaccataacaccacacaatt

SEQ ID NO: 536481 - DNA, 245 bp, Homo sapiens
ctcacaacattgcacagacatgcatcagtgtgaccccgtggagagcgatgaaagtgcgcccatgcttggttccagcttggatcagatccccttcaaggacttgtggcccgatgacagctacgggtttccactcttgcttcagaaagaagaaattccacgtggtacttcacagttcgcagggtcagggacaccattcctgtggactacacagctccggggttggttggacactggtcatagctggg

SEQ ID NO: 536482 - DNA, 216 bp, Homo sapiens
  misc_feature (4)..(4): n is a, c, g, or t
cccntaagagaccgtgttgcaatgtgttagccaggatgttcttgatctcgtgacctcatgatccacccacttcggtctcccaaagtgctgggattacaggtgtgaaccaaccacggcccggcccaatggagcacacatatctaagatgcagcagttccaatgtacatagacctcaggagatatgtaccaaaatgtccattgcaacacggtctctca

SEQ ID NO: 536483 - DNA, 523 bp, Homo sapiens
  misc_feature (30)..(30): n is a, c, g, or t
gacgaattagatagggttcttgctcttcanaatctcagaagctgctcagggagatagccatataataagtcactgtaatccaatataataataatgattacgagaacaatactaatgatactatcatactaatttttctggattattttttccagagtttgcagggacagttagagtcaatatgaattctcagaataagcactgccagatagtccggaagccctttacaaggaaagtgacatttttgctgtgttttgaatagtgaacaagaatgtgcaggaagagaatgaaaggatatcactagcagaagaaatgcctctttgtaaaaccatagaaaataactctgagttgccatataggacatatgagaatttcagtgttactgaaacaaaagcttttggaaaaggtatggtgattaaattgggtatacaatctgaaaggtaaattgaggacaacttgtgtgccagtttgcatacctactatactgtaaagcagtgtttgattttataatgaagacaatggc

SEQ ID NO: 536484 - DNA, 293 bp, Homo sapiens
acttttattgacaattttcagcaatagactataaaggtaaaattgaactagtctaacgattctgctttgcctatatagcttagaaaagtcgcctcctttagacagtaaccttaattttatattcttcgatagagacaaacatgttgacaattcactttggaggaacattaaaacactgttatactgagtcccaggtagaatcaaacttagatttgttcattacatgtaggccgggcgaggaggcactagccagattaccctactcaaagggttgccgtcgcgggaggtactct

SEQ ID NO: 536485 - DNA, 234 bp, Homo sapiens
cgaccacacactactgtcgctgctcagttccggggacacgtgcgtcatactgttgttcctaagaacacttgtacaaggtgagggtgtctatactacataatgttcgtgtcttcggctacaccgcatagggcgaaggggcctgcggagtatacaatgttgaagcctgagactagttcggactccccttcggcaaggtcgaagggggttcggttggtctctgctattccatttaag

SEQ ID NO: 536486 - DNA, 336 bp, Homo sapiens
  misc_feature (12)..(12): n is a, c, g, or t
ttagcacaaagngagcactggagtagaaacagtgagtaaaactttactggtgacagttgatggtacagatgggcaggggagataagcctggtaatgatcaaaacaattaatgtatataaaaagtacttagaggctaccatgggatgttctgcttctggggataatggagtaactagcaggtaaactaaattctgctgagaaatagaaaaacttgaataaaaataagtatgtttaaaggtatctagagctgctcaagcaatcaggacaaaaggtcacaagattctagagaatggagaacaacctaaaggtgggctgacatttcatgtcattacagaa

SEQ ID NO: 536487 - DNA, 727 bp, Homo sapiens
tccggatgtttgtcgtgaacgaatgttgtgggccccccaaagtgggtgtaaagtgccaggccggtgttgcgttaatgtggttggcgcccccctggtggttgttggtagcggggggtatcctttgccccccctaagtggctttcctacacgcgtgaattcgccgcggtatccactcaaaatggaaggggggcccccacacaattttgtggggaatatccgcactgcatgttagatcgcgtgagatagacactgtcggttggctccaataagtagtggccccctcccccgcgcaagtgttccacccacgggcgtgttcaatagtgatctccacagggtgcgcgcgcagagatgtttagagaaatcgattgctgtgttcgaaagtcgcgctccgtgtgataggagagttgtccacgcacgcctctgagtgtgtgaggagaagtataagaggagttcactcagcacagtcgggtgtgagaaagatagagtgatactgtgtggacccacgtgccgcgcgcgtatagaggtcgtagaccccacatgagagaaaaggagtgtgagagagatataatattaactcttttatgggaccgctcttgtggagacacttcacgccacacacttgtttaacacaatatgtgtctggttgggaattccccggtacgaggcgacgacgtacgagagcgctctacgaattaaaatacccccactagtacgaaaatatacatac

SEQ ID NO: 536488 - DNA, 120 bp, Homo sapiens
cggaggcccccttatacttcttcattctatagctatacttattgtatcactgtctgataaagcagagataatgcaaactgttgcctgtggtgcaaatctaactcatagcctctatttgcg

SEQ ID NO: 536489 - DNA, 486 bp, Homo sapiens
cacgaggtgcacctggcgggccagccggtcgcgctcttgcgccgcggcggtcaatcgggctgcgcgttgcagctcgtcgtgggcgcgccgcgcggtctgcgcggccatcccgatcgccatgccgatcgccagttcgatgatgacggtggcgttgtgcccgaggttgagcgcgaagtagttcttgacggcgaaattggcggtcatcaccgccaggcccgtcagcatgccgcccaccggaccgaactggatggcggccgagatggtgggattgctggcccacaacgtcgtcggccaggtctggttgtcggccgcccagtgcgggctcgcgacgaggtggttcgaccacatcagcaacacgacgaccaccagctcgggcagcacccacgccggcctgcggccgaagccccgcagataagccagcgcgcagggcgggctccagccgatcagcccggcgaaaagcacccaacccagcacggggcgaagcag

SEQ ID NO: 536490 - DNA, 243 bp, Homo sapiens
gaacaaggaaccagtagaaattaaaggctcatagaaacacaagagggaagacgagaacctcagagaacaatgccaaccagtgacagtctgaaactagagtgcttgggccgacacttgaagggctagaagagaaaatcacaaactgtacgttggatctttgagtgcggacgcttgtggaggacaagcgtgtggaaacccaaccacattcgtctttgagcaactggacagtcacagcagactcaa

SEQ ID NO: 536491 - DNA, 131 bp, Homo sapiens
ggcacgagggaaactttcctgcctatgctccagcacatttccaagaacaaggacaaaggcacctatgaggacttagtggaggggatgagggtattcgcaaggagggcaatggcaatgtaatgggtgctgag

SEQ ID NO: 536492 - DNA, 213 bp, Homo sapiens
tagagatcttcttattatcagtaaataatgattactaaagtcattctgactggataattctataaggttcagtctgtaccattaggatgtttcagtattagtaatagagcatctaaatcaatgtgttaaaataagttagtctctcacaaaagaaacagtcccaaggaggagtggctaccaggctgcttgggttggtggctcaaagacatcatc

SEQ ID NO: 536493 - DNA, 159 bp, Homo sapiens
  misc_feature (40)..(40): n is a, c, g, or t
tcagaggatcccctgttgctaggctggagtgcagtggttnatcatggcttgtgcagcctcatcctccctgggctcaggtgatccctacacctgagcctcctagtagctgggactactactctttgagcccagtgagtttgacgaccatgcctgatgcaa

SEQ ID NO: 536494 - DNA, 144 bp, Homo sapiens
aagaacaccatgatgcgcaagcatccgagggccctggaagacaacccagctctggagaaactgctgcctcatatcaggtacggtggctcagctgatagttcttagtgatcaattgactgtgggctggaacctcaggggaggtgc

SEQ ID NO: 536495 - DNA, 752 bp, Homo sapiens
taattatctattctgcgttccgtaccccatttccaacgtttcattataggtacttcaatatgcactcccaccttggaggccagtatattgctaatacaatctcgttgtctagtttatatatatcttcgtacacaggctgtaagaattgttacttgttcttgttgactataactaatttataagttaatgcttctatatgtatacctgtagtatttctattaggcgtcaatcttaacacaataacgttacattaccctcagtaactttgatacagacatttgcgtaacactatgattagcagcctgtgtctctttcgtgtctgtgtgaaacttcttacctggtaagccaagattaatagagactctgctatattcctaaagggaatcaagaccgacgatttgtgtatcttttgctgggtgccatcctattgatgagtaaagctctactgtcactgtttatgttggttctttcacaactgcagcattcttttccccttttccttatgtttttaatctgtctaatttgtcacatgaagatgataatacatggcttatgaggaatgagcattttagaagtgcttgattggagatgaaacatatttatatatatatggactaggaatagttctattttcgtcatttaataaatttattaaatcattacttttcccttgagggatataattttttaagatgtcgactactatgcgtacaggtaataatcgatcgtataattaactctggtgcatacat

SEQ ID NO: 536496 - DNA, 624 bp, Homo sapiens
ggtccttctaggcatgcatttttctaacatcatgtgctcattttgtgtctgtgttacattttggtaaatcttgaaatatttcacactttttcattgctattatatttgttatgatctgtaatcagtgatctttgatactactattctgattgctttggggcaacactatggtgaacttaataaatgctgtgtgttctgactgctctatcaaccagctgttccatcatctctctccctctcctcaggccttgctgttgactgagatacaataataaagttaggccaattaatagccctacagtggcatctaagtgttcaagtgaggggaagagtcacatatctctgactttaaatcaaaagctagaaatgattgagcttgatgaggaaggcatcctgaaagccaagacgggctgaaagctaggcccattgtgccaaacagccaagttgtgagtgcagaggaaaagttcttgaaggaaactaaaagtgctactccagtgaatacacaagtgataagaaagtgaaacaaccttgatgatatggagaatgttttagtggtctggatagatcaaaccagccataacattcccttaagccaaaacctaatccagaaatctcacgggggga

SEQ ID NO: 536497 - DNA, 119 bp, Homo sapiens
ttacaaattctgtgcagaagtactggccgcatacaaatttcccactgaaggggatcccgttttgaggagcagaaagacataaaactctgacattggcacacacagaggggaggagcttg

SEQ ID NO: 536498 - DNA, 907 bp, Homo sapiens
gcccccgccggggggcccgccagttttctctcagcgcgctcctcccgccgcgagctcttctttgtcccccctcttcggggccacccccgcgcgggccggcgcgtgttgaacaccccacctgcgtgttttcccacaccccacgccgcgtgacaccacggctcttatttgtggccccaccctcatgggggccgccctctcttttatgtggggggtgacgcccacccccatcctattgtgaccccccgcactctgtgttgtagcccacacaccaaaagtcgcaccgcgcgctcgtaggtgatgtcccgccgttgtctccgcggcgatttctttccctccgcgcggagatatattttcgtcttcgcggagcccgccacgcgcggtgttctcgccccccgcacgcgcgtttctcgcggggggctctatctcactctcttgtggcttcccgccgcggggagaattattttgggggagagagagaaaagacagggggttgtttttttggtggccccccgcgccgtctctatagggtttggttggggcgctcacacacactctgtctgtaattccccacacccacactctctctggagagagagtactcttatgagagtgtgtgtgtgtggagttgttgtctcttgagagcccccccggagagtgttgagagagagcaccccctcttggccacacactttggcccaaaaaccccctcttttttcccacacaaaaaataaaaaaaaaaaaaaaaaatttaagctgggcccggttggtggttggctatagatttgagctactcaggaggctgatgtatgaggatcacctgagtcccggaggtcgaggcttcagtgagcccagatggcgcccctgcactcccgcctgggtgagagagtgagacactgttccccaggga

SEQ ID NO: 536499 - DNA, 392 bp, Homo sapiens
gagccttctccctctcatactggccagtctcctcatccccttgctcagggtgtgagagcaggttcactggcccctgccggtgtctggggtccacatagagccgctccccgctctgcccaggcagtgtcagcatggcagacacattcatgacactagacacagctggatcagcatttgaggtggctggtggtgctgaagcaggcaagatggccagacggcgagaggggtggtaagcagcatggtcaggaacatcaggaggtcttgggagtccaagttgcctggagctgagaaccccaggtgtgaaattcatctgggagccagcagctccagctgagtggacattcctgtttccactttcgccttccatgggcttctcagcaacttcagtctgt

SEQ ID NO: 536500 - DNA, 102 bp, Homo sapiens
cctcacagaccctgtttctactaaaaattcaacaagattagccccttgtggtggcgtgcacctgtaattcccagctacttgggaggcctgaggctacgacaa

SEQ ID NO: 536501 - DNA, 422 bp, Homo sapiens
tttttttctaagacaaggtatgcctctagcgcccaggatcgagtacactggcgcaatcttggctcacagcagcctacacctcccgggctcaggccatctttccacttcagcctcctgagtagctgggaccacagttgtgcaccaccatgtctggctactttttgtattttttgtagagagagagtttcactatgttgccccggcaggcccggaactcctgagttcaagcaatccacctgcctcgggcctcccaaagtgctgggattacagtcgtaagccaccacgcttgtccaataaatggattttaatggaggagttagaaaagttctttggtgtggtttcagattacacttcacaaccaaccttaaagaaactactactggatagtattaaagaagaatgtccacaattatctgtaaggg

SEQ ID NO: 536502 - DNA, 1063 bp, Homo sapiens
gactgctgcatccgggtgtctcggaggctggtgcgccgtttgtgtctgtctcttggctaaaagatcgggggagtgaggctgggccggggcaggccgcggacaccgggtgtccggaaccacatgcacggacgggggctggacatgacctgtagaaacaagatgtcgtaggattgtctcagagaggctatgagatagcatcaagaatgcaatattgacgtggtggtggaaaagcagcaaattaacgttgattgctttccgagtttgcttgcatgtgtgtacttaatttaattaacgagggcgtggtgatgagacttatcgataaggatgcaagcttggcttagttatatcgcgcgactcgatggaaagagattgtcaaccgacgtcctatacaccatgctcgtggtaggctgttgcataagcgaacgctatagccgtgtccgtaaatggatataattgccagtatcgtgaagtggacgaaggtccagtagagttggatgagttgaccaggttgagagggttggtcgtgggtcgaaaaacagtgatgcttctgcatttgtgtggcgttttcggtgtggattgtcagtgcttagggccttttgggaagtcttcgtgagtttgccactcgtaatggtggaattgcatgtaacgagggaggtctatggtggctaataagaagaatagacgatatgtaatagcgccctgggaaattatggctgttactattctacccacggacaattggccgtttcaattctatgtatttgtaggggagagcgtcctggggttctgggcacacggttgttgggcctgggactaggaaagaactataatggggacaggatggaacacaaacagtcgtggagttattgccccacaaggcaacataacaagggggccttgtcgagtgggggtatatggtagaagagttgaatgcttttaggtggggttcaaaggcacgcgaaatacggtattaaagggtaaagtggaccgaatgttttgcggtagaaaggttaaattgatcctgtaaggtggataggttactcaaggagtttaaaaggtttgg

SEQ ID NO: 536503 - DNA, 112 bp, Homo sapiens
acttgtttagcgaaggagcatggacctggctgacctgcacgtggcatgcacctgcacctcacctccatttcacctgcacactcaccggcagctcacaaccgcatcacccgtt

SEQ ID NO: 536504 - DNA, 225 bp, Homo sapiens
tccagtacccgagcatgcttgcatggcttgtcaaggtcgacgtgtattcagctacatgcgtgtgcatgtctccctggactaagttccgtcgagacgtgagcaccgttgctgacctccaaatatcgttaagctggagcctggtcgacgtgtattcaccactgcggtgcatgcctccctgtacaagttccgtcgacacgtgagcaccgtgctgacctccaaatatcg

SEQ ID NO: 536505 - DNA, 955 bp, Homo sapiens
ggcgaaagcgaagaaggaagctcgctgcccgcgtcctaagagctggtagagccaaagcgaaggcttgaaaggccaagaaggcagtgtggaataggtgtccactaggcacaaagaaagaagaagatccggacgtcacccacgcttcctggcggacgaagacactgcagactccggagacagcccaaatatcctcgtgaagagcgcgtcccaggagaaacacagcttgaccacgtatgctatcatcaagtttgtccggctgaccactgagtctggcatgcaagaagtatcagacagacgaagcaagcacactgggtgtctcatggtggatgttgaagagccaagcaagcaccagattaagacaggctgtggaagaagcttgtatgacattgatgtggccaaggtcgaacaccctgattcggcctgatggagagaagaacggcactatgttcgactggctcctgattactgatgccttgtggatgttggccaacgaaaatgtgggatcgatctaaactgagatccagctggctaattctgaatatatatatatatatctttcacaaccatatatgacagatatggaccctagaaataggaaaaagaaccgggagcgactatctcggggggagtacaacaggtgggcgaagagctggcagcttgggccaccaacgggcgaagccgggcccacactcgtggcgtggacccacaggggagaaaagctgggccgaccgttcccaataggacgagccgagacaggatgatggacaccgccggggataccccggctataaaagacagacggaaaacagagctggcccgatgggccaggcaatcaccactggccaagaacagctccggagtccgaggcccaggaccacaccctaccaccggggaaggacacatgtccgcatcccgaaaccaccctctcaccaacacgaacggtagcactggcatc

SEQ ID NO: 536506 - DNA, 270 bp, Homo sapiens
gcagcctgctgagctgcacttcaccgctgaccttgcctcacctttaactttttcacctgagccccagcttctacctctgacggcaacttctcttagatctctgaatcccctctgactccaacttctctttcaccctctatgaggtccattttacttttacacctgcaagtcctgttttatattggacccctccctccgagctgcaggtcacctttgaccttgccttacctttcaccccccaccccccacagcgtcagctcctacctctga

SEQ ID NO: 536507 - DNA, 491 bp, Homo sapiens
  misc_feature (318)..(318): n is a, c, g, or t
  misc_feature (488)..(488): n is a, c, g, or t
gcacgagcttcattctaaaaaaaaaaaaaaacaaacaaaaaaaaacaacctgttaatatatcttaatattaattttgaagaattatttcctttaggaatcattttaagaaattttattccaggtgttccaaaatttcaggaaaaggtttgagaaaattctcaattataaataataagatacagattatttcattgtacaagtgaatctagtaaggaggttaagaataagaaataacatcccagagcctacagggatatttagatatcttcctatgtgtactacataatatgaattttgcagtttggcattttacttgngaatgccatatgtgagacaaaaatcatcttccagagatttcagtatctctgatactgacaatatctctgatatgacaatatcatcttccagagatttctactctgcataccaacattgtttctttgtgtcttaccaaatgcaacttgttactagaatatggcttactaanatg

SEQ ID NO: 536508 - DNA, 179 bp, Homo sapiens
gggctgataaatagccgacgcacacacacagacgtatatcatccaacaaataaagcctaaatataaatgtactatcttacgtttatttctttctgcatcaacgtgaacatggcttttggcttaattccatcagttagaatggtaaataagagcaagtcattttcccacagtggagttga

SEQ ID NO: 536509 - DNA, 226 bp, Homo sapiens
ccccaagcagtgcagctcaaaccactgaaagagattcctttcctctacttgaggagaggagcggggagagtaaagaggactttgtcttgcaacttggaagccagctcagccacagtaggatatggcaccaggcagagtcctgaagtccccattccaggccctagctcccagatgacatttttcacactttttttagaagggtgacagaataagactccgtctcaca

SEQ ID NO: 536510 - DNA, 427 bp, Homo sapiens
  misc_feature (169)..(169): n is a, c, g, or t
  misc_feature (195)..(195): n is a, c, g, or t
  misc_feature (204)..(204): n is a, c, g, or t
  misc_feature (216)..(216): n is a, c, g, or t
tgaagacagcgtctcggaaggcatgaccctacggagacccggctgtgcaccatctgctcttggggagtcttacagcgtgggggcgggtagctgtccaaactgtgtgggggccgccccgtcccacactcccctgggcattcttggactcaaggccggggctctgcctggnttgctgggaggtgggctgcagcacanaggcctgtnactgcgttccancggccagtcactacgcagtatctctggggcctggaaccagccacgtgccgagctgtcagcaacgtgaggtgtcccttctcgttgagatattaaactttggttttgctctagttctttctttttgaacagagtgactggagcggtaaagaaggaaatgctggaaatgatcctggcgctcacgctgccatccgaagcagatgctgggggatcc

SEQ ID NO: 536511 - DNA, 193 bp, Homo sapiens
tacctacttggtctgactcttcctccggacattttatggtgtcatcatcggtctgctctggacgtgcaccagtagtattgcattgctgctattttcatctttttcttccatgctccttgtgggtcgtgctattagtctcagaactggttttaggtcattcttccaaatctctggagttctcttcctttgtggg

SEQ ID NO: 536512 - DNA, 447 bp, Homo sapiens
gacaaacaaatggaaaaatattccatgctcatggataggaagaatcaatatcgtgaaaatggccatactgctccaagtaatttatagattcaatgctattcccatcaagctaccatttactttcttcacagaattaggaaaaactactttaaatttcataaggaaccaaaaaagaacccatatagccaagacaatcataagcaaaaagaacaaagctagaggcatcacactacctgacttcaaactgtactacaaggctacagtaaccaaaacagcatgatactgtagccttgtagtatcatgctgttttggttactacaaggctacagtatcatgctgttttggttactgtaccaaaacaaatatatagactactgaaacagaacagaggccttagaaataacaccacacatctacaaccatctgatcttcgacaaacctggcaaa

SEQ ID NO: 536513 - DNA, 436 bp, Homo sapiens
  misc_feature (359)..(359): n is a, c, g, or t
  misc_feature (373)..(373): n is a, c, g, or t
  misc_feature (419)..(419): n is a, c, g, or t
  misc_feature (430)..(430): n is a, c, g, or t
cacgagcgcccaagtgggagaggaaggtggctgaggtgagaaaagtgctggtgggacggaagaacaatttacaatatattttggaggaaaattcaacagaagttggtgatatttcaatgtagggattggaagagagggaggagtcaaggacaacttacatttttctggcctgagtgactgatggatgctggtactgagcagcacaggagatgaggctgaagtttaggaactgctaagtttaaggtgcctgagggacctcaccaggaggactgaacaggcagccattgtagctagtagaggttttgatcatcaatacatttttgcccaaatgccatcttcagatagtcaagaagctgaangcaacgggctgtanactaggccagccttaaatatcctgggtgtttgtcttaagaggacanggacacagtgngagagt

SEQ ID NO: 536514 - DNA, 460 bp, Homo sapiens
  misc_feature (14)..(14): n is a, c, g, or t
  misc_feature (91)..(91): n is a, c, g, or t
  misc_feature (100)..(100): n is a, c, g, or t
  misc_feature (118)..(119): n is a, c, g, or t
  misc_feature (121)..(121): n is a, c, g, or t
  misc_feature (123)..(123): n is a, c, g, or t
  misc_feature (125)..(125): n is a, c, g, or t
  misc_feature (127)..(127): n is a, c, g, or t
  misc_feature (137)..(137): n is a, c, g, or t
  misc_feature (139)..(139): n is a, c, g, or t
  misc_feature (142)..(142): n is a, c, g, or t
  misc_feature (151)..(151): n is a, c, g, or t
  misc_feature (163)..(163): n is a, c, g, or t
  misc_feature (167)..(168): n is a, c, g, or t
  misc_feature (171)..(171): n is a, c, g, or t
  misc_feature (174)..(174): n is a, c, g, or t
  misc_feature (186)..(186): n is a, c, g, or t
  misc_feature (188)..(191): n is a, c, g, or t
  misc_feature (193)..(193): n is a, c, g, or t
  misc_feature (195)..(198): n is a, c, g, or t
  misc_feature (200)..(205): n is a, c, g, or t
  misc_feature (211)..(212): n is a, c, g, or t
  misc_feature (218)..(218): n is a, c, g, or t
  misc_feature (220)..(220): n is a, c, g, or t
  misc_feature (224)..(224): n is a, c, g, or t
  misc_feature (228)..(229): n is a, c, g, or t
  misc_feature (237)..(237): n is a, c, g, or t
  misc_feature (239)..(239): n is a, c, g, or t
  misc_feature (242)..(242): n is a, c, g, or t
  misc_feature (255)..(255): n is a, c, g, or t
  misc_feature (262)..(262): n is a, c, g, or t
  misc_feature (270)..(274): n is a, c, g, or t
  misc_feature (287)..(287): n is a, c, g, or t
  misc_feature (298)..(300): n is a, c, g, or t
  misc_feature (303)..(303): n is a, c, g, or t
  misc_feature (309)..(309): n is a, c, g, or t
  misc_feature (337)..(338): n is a, c, g, or t
  misc_feature (348)..(348): n is a, c, g, or t
  misc_feature (351)..(351): n is a, c, g, or t
  misc_feature (354)..(354): n is a, c, g, or t
  misc_feature (359)..(359): n is a, c, g, or t
  misc_feature (362)..(362): n is a, c, g, or t
  misc_feature (369)..(371): n is a, c, g, or t
  misc_feature (394)..(394): n is a, c, g, or t
  misc_feature (419)..(419): n is a, c, g, or t
  misc_feature (427)..(427): n is a, c, g, or t
  misc_feature (429)..(429): n is a, c, g, or t
  misc_feature (434)..(434): n is a, c, g, or t
  misc_feature (446)..(446): n is a, c, g, or t
  misc_feature (454)..(454): n is a, c, g, or t
gttttttaaggaanaaaattgtacaacattcatgtttttcatgacactgaatgatatatcaatttatctcttagaagaaaaagtagcatanttcacatcnctggttctttaatccccnncncncncnccccccctcncnccnccctctttncccaataacccngcannacntantatcccctcccncnnnncngnnnngnnnnnntttgtnncctttntnaaangttnnattttttntnggngttcaacataccnctcatcnctgttttnnnnncttttcccatttngctctggttcnnnagntaaatnatactctataatccagaaatgtatacanncttcttatcncanttnccctnatnctgtaannnaggaaaataggtttaatgtttancagaagcattagtgtgatattattnccgaaacncnctttngccattctcacngctcaaanagtacc

SEQ ID NO: 536515 - DNA, 138 bp, Homo sapiens
acctctagacggactcccccgtgtgccagtctaccagctgacctcgtttgtcctggcagtaggcgttgtatgttgccgcgctgtgtgcggccatctcgtcgccggccagcagcaggggcgtgccttgagcaaggacca

SEQ ID NO: 536516 - DNA, 138 bp, Homo sapiens
aaatggtgctttatttaacagaaaccctgtggaggaaataaagcccccttgatgtaaaaaaaattgttttatttttattgacatgactgattgattgctattctgggcccttaattaaactgattgtgatgactttta

SEQ ID NO: 536517 - DNA, 650 bp, Homo sapiens
  misc_feature (602)..(602): n is a, c, g, or t
  misc_feature (637)..(637): n is a, c, g, or t
acaaaacagtatatgggactttttttggagtgaggaaaaatgttctaaaaattgttatggcgccaggcgcgatggctcatgcctgtaatctcagcactttgggaggccgaggcaggcggatcacgaggtcaggagatcgagaccatcccggctaacacggtgaaaccctgtctctactaaaaaaaaaatacaaaaaattagctaggcatggtggtgggcgcctgtagtcccagctactcgggaggctgaggcagaagaatggcacgaacctgggaggtggagcttgcagtcagccgagatcgcgccactgcactccagcctgggcgacagagcaagactccgtctcaaaaaaaaaaattgttatggttggtcaggtgcagtggctcatgcctgtaatcccaacactttgggaggccgaggcagacagatcacctgaggtcaggagttcaagaccagcctggccaacatgatgaaaccccatctctactaaaaacacaaacattagccgggcgtggtgacacgcgcctgtaatcctggctactcgggaggctggggcaggagaattgcttcaacccgggaagcagaagttgcagtgagccaanatcacatcattgcattccagcctggacaacaagancaaaattccgtct

SEQ ID NO: 536518 - DNA, 247 bp, Homo sapiens
ggccggtacctgtgcagagatatgggggagtagcagcaggcagtaggctggctactgtgtacaaacaaaaaattgaataagattttttttttttccaaagttggtggtgtctatccaggtccctttgccttatcctacaaactttgggaatgggcttcctatttaaaaaaaactctgctggggtttggatatggttggattggaatctatagctcaattggggaaaatttgccttcttaccactttg

SEQ ID NO: 536519 - DNA, 875 bp, Homo sapiens
gcactgaagatggcggctgctgtaggactggttgctccgagcgtcggttgcccgagatgtgaggtgccattccttggggcgattcttgccactgaagtcctcaggctgctgcatgtgagtagagaacagagcttgacaaatttatatgtgtgtctcggttacctagtcgaagctaaattattcagcatccgagttcctcagtgccatgcacctgctgtcaccctagcgatgcaccctgattttagaggggtacaggcgtgtccaaatggacagtcaaaagacctaagccttggtgacttcagcggggagatattggtgcttatcttctatcctgggattatcagcttgtgtggtgtcctacagatgatgtggcttgttatgtgacaaagctaagcgaatttcaggatgtgaactgtgaagttgtacgcagtctcagtggattcccattttagccatcttgactgatattgtacatcaagaaagaatggtggttaggggcaatgaaatcgtagtcttgtcagacttaattaagcagattccggagactacggtgtgcttgtgagaaggtgctggtctgcctaagaggtctcgttcatacttgacccccatggagtcaacagcattgagggtcagacagatcgtcacagtgggccgagggtggaaagaacctcggctgggatgggtccggatggatcaaccatgggagacgcgcgaggaaggacaccgatcctacgaacagccaatcgtggccaaggccgcgaggaaccagagcgcgggtttgctcacggggagacagggacggcacaaaggggaggagcacccaaacaaacgggggggcaacaaagagagcagggacaaaacaatcccaaaacgcg

SEQ ID NO: 536520 - DNA, 305 bp, Homo sapiens
cacctgcgacgttcacacaaatccctcctaacttatgttgaggaggacatggggctgcgggacagcaccttcgcagggcaggtccaggacatgatggtcaacctgcacatgatcctgacggacacggtgaagatgaaggaacaccaggaggaccctgagatgctcatcgacttcatgaacagaactggccggggctaccaggcatctccggaccctcggatgacctggttgcagaacatgcccgggaatcaggcggagctgggcatccacgccgagaccgccacagtgcatggtgcacgcggccg

SEQ ID NO: 536521 - DNA, 144 bp, Homo sapiens
ttcattcgagtggcgggcaacttatgcacgcttactatcttaacaagcttgagtgcagagatgaagagttcaaatctgaccaagatgtagatgttggataagagaattctctgctcaccacatctaagttgcccgccaatcgaa

SEQ ID NO: 536522 - DNA, 158 bp, Homo sapiens
ccatgtggggcattcacttgccatcggggcatcactgtacagtaaaataacgtcatggtagaggaatgagttgggccgggtgcggtggctcacgccagtaattccagcctttggggaggctgaggtgggcagataacttgaggtcaggagttcgaaac

SEQ ID NO: 536523 - DNA, 822 bp, Homo sapiens
gcttctcgcataacgctgcacatggtgtccaggcgcttcgtggaggtgggccgggtgcctatgtctccttgggacctcatgccggaaaatggtcgcgatggtcagatgtatggatcagaacagggcttgggtcgatggacctttgcactcaagtgaggagacaggccatgcctttcaagtgcttgcagctcactgatttcatcctcaagttccgcacagtgcccaccagaagtatgtccgaaaagcctggagaaggcaggacatcaatacaaaatggcacgcacacgatggcccacagagattgaacgcagagacaggaacgcaagatgacagatttgatcgttcacagttatgagggcacagaaatggagggacagaatatcaaggatcgaggttaggaagtcaaagggagtctcttgaaagttctccaaaaaaagacctggtactaggggtactgtggctgttgtgtgatgtgtagttgtagctgttgtgttgttgttgtaatgtcagaaaaagatccgcgcggattaaaggtccagcaaggaggttctgcagaaggccaaggcaaaaaggaggtgtccaaccgtcagacgatcagaaggtcaggccagaaagacctgctcaaaggctctgaagacgttaggtgacataaacgaaagggtctgggcggcaaagacaaccacaacacgacagacacgcacaaccaaaaacaaaaagtggggccgcgaaataaatcggggccgaaagacgagtaagcgggggtgccaaaccggcgacctgttacagcgcccccgggggagagaaggaaagtggcgcacacac

SEQ ID NO: 536524 - DNA, 1090 bp, Homo sapiens
taggttggtattataacatttattaaaataatgctgtgggttaatagaaacagcaaaaaaccaaaagaatttaaaagtgcaacgctattgttaaaatctcccaactaaaacccaaaaggtgctctaagtgtattcattcattagctaactaaaagcccaaaaaagacaagacacccaattattaataagagtacgtgcgaaaacatattggcgcacattttccacgtttatccaaatattggtgggtattttggctatttggtgtatcctttttctccaaaaaaaaaaaaaaaaaaaaaaaaaaaaaaaaaaaaaaaaaaaaaaaaaaaaaaaaaaaaaaaaaaaaaaaaaaaacaaaatataataaaataaataaaataacataaaatcataataaaaaaaaaatatataaaaaaaaaaaacaacagaaaaaaaacaaaaaaaaatacataggaacgcggggcggagaggaatagaagagagagaggaagagagaaaggaagaggttttgttttgtgtttctttgttctggcgagaagaaggagggagagcagggagatggaaatcagaagacaggagagggaaaagagagagtagataagagagatggcgtacagaagacgatgtatctggaccgcgagagataaagagagaaatgaacgaacgaagagacgagagggtgcagagatgagagtatatgagagaggatgatggtgagagagtgcaggcgtgtgtggtggagagcgagatgatgtagagagtggcagagactgtggagataggaggacgggggggagtggagagagtggaggagaggtagagacggatgagagagagggaggagggaaagagaagaaagagagggagacaaacataaaacaggacactaaagcaaacaactaagaaaaaaccaaacacaatacaacataatataataactaaaaacaatacacaacaacacacaagatagcaaaaagcaagtagaagcaaacagaaactaagtacaaactgacagcaaagagacacagcaacaacagtatacataaggatagatagacagtaccaatatacaactatctatacttcataa

SEQ ID NO: 536525 - DNA, 159 bp, Homo sapiens
ggacgatgcctggttggtgatggaccggatgtgtactgagatgacgccatgatatattaaactacgacagatacatgaggaatactagtaaacaacagcagcagaaacatcagtatcagcatgcgtcgccagcagtgagaatatgcatgcgccatgagc

SEQ ID NO: 536526 - DNA, 251 bp, Homo sapiens
taataatcgtgcacccgtgcgtagctggcggtacgctccgcgtcgttaatcatcgacaacgccacgcgatctttaatggagccgccggggttttggttctccagcttcagaaacagcgagcagggaccggtatcaagcttgtgcagctggatcagcggtgtccggccaatcagttcggtgacggagtggtagatcgtcatgatgttttcctttctgggtgtcatgacgggatgatagggcggagaaatttt

SEQ ID NO: 536527 - DNA, 200 bp, Homo sapiens
tattttctccacgtgctcgccgaagtgcaccgcacgcatccggcgcttccgtggcggtttctcgccgccggatccggcgtgctcgaatcggagctgaaacgcatcaccggcgcgctcggcctcaccgaccgcgtgcactggctgggctaccgcgacgacgcctcgaaactcatgcccggcatcaatctgctcgcttttac

SEQ ID NO: 536528 - DNA, 167 bp, Homo sapiens
tactcatgaaacaagaaaagggtgctattaagaaggagcatggaccgggcacggtgcctcacgcctgtaatcccagcactttgggaggcccgaggtgggcagatcacaaggtaaagagatcaagaccatcctggccaacatggtgaaaccccgtctctaataaaaat

SEQ ID NO: 536529 - DNA, 764 bp, Homo sapiens
  misc_feature (14)..(14): n is a, c, g, or t
  misc_feature (89)..(89): n is a, c, g, or t
  misc_feature (191)..(191): n is a, c, g, or t
  misc_feature (220)..(220): n is a, c, g, or t
  misc_feature (236)..(236): n is a, c, g, or t
  misc_feature (281)..(281): n is a, c, g, or t
  misc_feature (297)..(297): n is a, c, g, or t
  misc_feature (341)..(341): n is a, c, g, or t
  misc_feature (348)..(348): n is a, c, g, or t
  misc_feature (452)..(452): n is a, c, g, or t
  misc_feature (515)..(515): n is a, c, g, or t
  misc_feature (551)..(551): n is a, c, g, or t
  misc_feature (602)..(602): n is a, c, g, or t
  misc_feature (610)..(610): n is a, c, g, or t
  misc_feature (616)..(616): n is a, c, g, or t
  misc_feature (618)..(618): n is a, c, g, or t
  misc_feature (669)..(669): n is a, c, g, or t
  misc_feature (684)..(684): n is a, c, g, or t
  misc_feature (698)..(698): n is a, c, g, or t
  misc_feature (754)..(754): n is a, c, g, or t
tcggagtgtgtttnctccaactttgccacagatcgtgtgggcaaactctgctcgggtgtgagcgtccttcagcttctgctccaacagtntgatcttctctgcatatttatcttctttggtggaatactcctcctctgaggccatcagggacttgagggcctggtccatggttcgaagtgcctcctccagcngtgtggctcggctctgggccacctcagcnctctgctccgagcgcnccagccctccttccaggatcaccagcttcctggccacctctccanatttgcggtctgaatnctcagcgatgtgcttggcctccttcagctgcatcttctgcagtnccatctnctcctcaaccttcaaggcccggttttcgatgaacttaattcctctgtggctctgatcagcggccttctcggcctcctccagcttctgcagggctgttgcgaggngctcctgggcccggtccagctcctcctcaaccagctgaatgcggcggttcagggaggccacanctgccttagcatcagttgccttcttctcggcctgcnccagtttctcctgggcctccttcacggattcagaatacttttccacctcancctctgtncccttnancttcttctggagggcctgctgctcctcctccagccgcttgcgcggttcctnagcttgctttttgtnggcttcggcctgcncggcgcggtcgatggcgttctcttgtacagcttcagcatctgcatttcttcttganggcgtcatgg

SEQ ID NO: 536530 - DNA, 103 bp, Homo sapiens
  misc_feature (15)..(16): n is a, c, g, or t
tctagaggatccctnnggagagggagaggatgtcggagacgggagggatgtcggagagggggaggatgtgagagggaggggatgtcggagagggagaggatgt

SEQ ID NO: 536531 - DNA, 917 bp, Homo sapiens
  misc_feature (228)..(228): n is a, c, g, or t
  misc_feature (518)..(518): n is a, c, g, or t
gccggcctgtgtgtgtgcacgccaccgttttgcgtggacaccctgtcttgcggggtgtagtatttcaagccgcggtcttgggtgttatatacctcgggctattttgtgggctagagcccgcagtgtgttccttccgggaataatgcggggtctcctttgctacgaaagtgttgctgtgtccccgccttccgggatacccgcggtggttggcccatccccgtgccgagnggacgcttcttttaatataggcgtcctatgagccccccgtgggccctgtaattttcgatgcggtctcccccctcccgaccttgaacctgtcgtttgtcgtagtagcccccgtcgttcccacgcgagggatcattcttccgacaaaaattcttgggacgaaaatctcgggtcccccctctgatcgaatacatgcccaccttcttaccaaagtcggtgctgcaaacaatagtcctccgtcgcgcccattctaaaactttcgttgacgcccccgaaggttttcatgacgtagnatagcatctttctaaacagatagttccgcggcgatgtgttggaccctccccgaacggtccccacaactcggtgctatactcgaaatcacgcccccgttaaactctagtggctcctgcatgcaaaccgcgttctgttcttgataccagacgctgctggatagaacacacttttctctacacaccgtgcgggctgtgacccgctgcttctacatattgccacgacttctccttctgttgagatcgtctgcaaccaccgagtcatgaacccttcggaattctcgtgcggaacaccacactacatatggggtcgttctatctgtagacacactcaggtttaacatagcccatgggagtttaaaacaaaaaaaaagtttatttcccttttttccccacaaaaca

SEQ ID NO: 536532 - DNA, 325 bp, Homo sapiens
ccccaatggaatctccccaaatggaatcctctaactagcatctcccttttactaggtctggaggaaagctgcctacaatagagcgtaccggcaaatcctgaaggcaagcttgtatgtagctctgattatgtttgtcagcttctacgggggcagcctggtaatgcagttattcggaatatctgttcccggcttagggatactgtttcaaggggcagcgctactgcttgcagctttttctgtcaaactcgtgggaaatttatctcacgcaaggcgtgttaattggattccatttgggggattccatttggggagattccatttgggg

SEQ ID NO: 536533 - DNA, 104 bp, Homo sapiens
tgaccgtcgctactaaatcggaccttcgtgacttttggtttagacctacacgtttcgtgacttaccaactaacacagcttctgttacgccacgggggactcctc

SEQ ID NO: 536534 - DNA, 415 bp, Homo sapiens
  misc_feature (53)..(53): n is a, c, g, or t
cctttctgaaaaaaattgagtacatttatacagtaagtcctcacttgacatcnataggtagagtctttgaaactgtgactttaagcaacgtgtacagcaggtccttgaataacattggttataatatcgatgagggacaaacatcggtttcattatacattgttttgcttaaagttacagtttccaagaacctatctatgacattaaatgaggacttcgtgtatattcaaatggattctctttctgagtctctagatatagactataatgtgaattctaatcatcacgttatttcctgagctcctgtatgctcagttatatgccttagttttgattttgggtatgctaatcctcatgttaagttccccaccatttggaaactgaaacatcggatgctctatcagcagcctaggga

SEQ ID NO: 536535 - DNA, 165 bp, Homo sapiens
ggtccatgtaagcagaggccaccagcgacaccctcaggccacaaaacgcactgaagaatcaacaggaaactcctgaacacaccacttccccatccttccgcctcgcaccgcccctcagaccagctcctggccgcaggcctcccccagcccccaacccttgtcctg

SEQ ID NO: 536536 - DNA, 256 bp, Homo sapiens
gctctagaggacctcaaaagtgcactcttctatatctacgacatttgtctcaaaagcaaaatcttagagtcaatcctacttattttctttggtcagaaatagcacaattcccacctttcagtgagtctagctgcttggtctaacattcagaatctatccaaaagttaggcactctcttagtctcttcccagaaacagatcccagtaaaaaacatttcaaatcaagaaagtaatttggggactggtagatattagaa

SEQ ID NO: 536537 - DNA, 237 bp, Homo sapiens
agcggccgcccgggcaggtacgcgggggaatggaatggaatggaatgcaatggaatggaatcatccggaatggaatggaatggaatggaatggaatggaatggaatggaatggaatcaactacagtgcaatggaatggagtggaatggaatggaatggaatggaacaacacgaatggaatggaatgtaatggagagtaagggagttgaatagaatcaacccgaatgtaatggaatgg

SEQ ID NO: 536538 - DNA, 491 bp, Homo sapiens
cggtcaatcacttctattctttcggatcagtgtacatccttttctttaataaaataattaaacactggcagaaattcacttattcaaaaagtcatactaactacttgtatatgactttttatagaaaaacaaactttatttttttattttttagagatggagtcttgctctgtcacctaggctggagtgcaatggcacgatctcagctcacagtagcctccacctcccaggttcaagcgattcccctgccttagcctcccgagtagctggaattacaggtgtgcgctaccatgcctggctaatttatgtatttttagtagagatggggtatcaccatgtcgggaaggctggtttcgaactcctgacctcaggtgatacacccgcactggactcccaaagtgctgggatcataggcgtgagacacctcacctgctgacaactaaacttaaaacatctcacatcgaaaacatacaaaaaatcggatacctgag

SEQ ID NO: 536539 - DNA, 202 bp, Homo sapiens
ggtggttcacggaatcgcatcttacgggtgactttccatccctgaagcaaggcatattagcactggctcagcatgtgtcaccattccaaccagaaagtggcacaaatgctacggagtcggggttgtagccaattctcttaatgtacagtgcagacttccttaacaatttcctcatatctcttctgactgctaggtggctctg

SEQ ID NO: 536540 - DNA, 796 bp, Homo sapiens
  misc_feature (59)..(59): n is a, c, g, or t
cgctggtccgtccggattccgggtttgtggccccaggttccggaagcccctttggttgngagttgggcgcccctgggccgcgaatggcgagatttcgttcgctccaattcatgggcgccccccgatctcttggccttcccgccgcagtgctggagcagtgcttgttgtcccgcctcttatgtgatcccccccctccccgatatgcttgctcgcacccccggctgtatctccccccccccatggcttatccaacttacctccgcaaccgaatggtgcccgtactcccacccttaagggcgaacctgatctcttatactagtgatccctgatcagttttattgccaccaactaacctcctcggacatcctgcctcactcatgttgacgacccacccccccactatctataaacctagccctggcccatccccttatgagcgggccccagatgattattaggctttcgctctaagattataaaatgccctagcccacttcttaccacaaggcacacctacaccccttatccccatactagttattatcggaaccatcagcctactcattcaacccatagccctggccgtacgcctaaccgctaacatttctgcaggccacctactcatgcacctaattggagagcgccaccctagccatatcaacccttaaccttccctttacacttatcattttcaccattctaattttactgactatcctagaaatccctgtcgccttaatccacagcctacgttttcacccttttagtaagcctttacctgcacgaccacacatta

SEQ ID NO: 536541 - DNA, 396 bp, Homo sapiens
tttaggggaggggggcctgtttatcccgcccaaaaaggttcccaatattttggccccggttttccccttttttaaaccccataattttcccccacggggggtgggggcccccccccctttttttttttttcccccccaatttttttttttgtaaaaaaaccccatttaaaattttccccctcctcccaaaattctcctggaaaaaaccccccaaagggcccctttccccaaggggtttggggggggggaaaaaacccggaaaaaatggtttccccctttttccagggttctcttaaatttaaacaaattccaaagacaggtcttttcccaaatgacttcatccaatccaatagctcggttctttaggtagtacagaatcattagcaatgaaaccag

SEQ ID NO: 536542 - DNA, 107 bp, Homo sapiens
tacaaatacgaaaactgagcatctgagactcaatccttcaagctgcaggtatcccaggaaaaagatatatagcatcctcatagcttcaacatgcagtgtgtcaggca

SEQ ID NO: 536543 - DNA, 100 bp, Homo sapiens
cggccagggggggttttgggtggctcctcccactggcctcaccagccccattttggtcctgtcaccctggccccaactattaaagtgccatttcctgtca

SEQ ID NO: 536544 - DNA, 239 bp, Homo sapiens
  misc_feature (98)..(98): n is a, c, g, or t
  misc_feature (102)..(103): n is a, c, g, or t
  misc_feature (106)..(106): n is a, c, g, or t
  misc_feature (111)..(112): n is a, c, g, or t
  misc_feature (117)..(118): n is a, c, g, or t
  misc_feature (143)..(143): n is a, c, g, or t
  misc_feature (154)..(154): n is a, c, g, or t
  misc_feature (169)..(169): n is a, c, g, or t
  misc_feature (179)..(179): n is a, c, g, or t
  misc_feature (185)..(185): n is a, c, g, or t
  misc_feature (198)..(198): n is a, c, g, or t
  misc_feature (200)..(200): n is a, c, g, or t
  misc_feature (214)..(214): n is a, c, g, or t
  misc_feature (225)..(225): n is a, c, g, or t
gtttttggttggtagttaagcaaactgacattacggaaagtgccttagacactacagtactaagacaatgttgaatatatcattcgcctctataacantttnntgnattcnnttttnnctgtgcttcatatcatgtacctctntagtcaaagtngtattacagacattnagtgacaatnaatcantgttaattctaantncttgatcctctgcnatgtgcttganaacacaaacctttt

SEQ ID NO: 536545 - DNA, 423 bp, Homo sapiens
ccaagagttatatgggacactgttgtgtgcacagactgcaaaggaaagatggcgagaccactctcttcccattcaccacctacaattgcccttcctctggccctcacatactgccttttacataatttcctcttttgaatctgccctggtttcctataaagaagtgaccacaagaccaccgaaaatgattgttctttaggcacagtttctcccaagagataaccctatatccaaagtatagtttggtaatacctgtcattcagagaaattcgtgtccaatagacaaactttgggaaatgttgatcttgtgcaacctcttgttatatattatttggtatgtgtaaaatttagagcaggtacaaagagtttaatctataattggattttaaaactcatctcaaaattgcagaattaaaccataga

SEQ ID NO: 536546 - DNA, 303 bp, Homo sapiens
tttcctgaatgcagcctgctgagatcgtgccattgcactcctgcctgggcaacatgagttaaactccgtctcaaaaaaaaaaaaaaaagggaatattttttcatagggtttttgttaaaataaaaaaaaatggagtgtttggggcggccctgctcccgggccagagaggcccattttttttcggggttctaacatggggaaagggccggggggggttctctgggtcctttttaaaagggcccctatttggggaggcccctgccctaataccctaaccacctccaagagccctcacttgttttc

SEQ ID NO: 536547 - DNA, 113 bp, Homo sapiens
cccctgaccacgatgacggcatcgcggtgaactacgacgacgcgacgtgatcctggtggcggtgtcgcgcgccggcaagacgccgacctgcatctacctggccctgcattacg

SEQ ID NO: 536548 - DNA, 161 bp, Homo sapiens
gggacaaggttggtttttctggaggtggaaagtcaaacttcaattacaatttggaggctgccactgtggctcatgccggtaatcccagcactatgggagggcgaagtgcgttgatcatttaaggccagaagttcgagaccaacctgggcaacattatggag

SEQ ID NO: 536549 - DNA, 271 bp, Homo sapiens
ttagtaagaaggtgctgttccgagaaggagaaggaaaagggcttgacacgtattcactcggccccggacgtgggaaagcaaggccgtcttggcttcgggcctcacatcggtccctgtgctcgggacggcggcgtttgcggacttatccccggcggtaaagaggcgcctctctctggcagaacttgtgtaagacgagacaatccttcccgccggccgagataataaagagtgtttggcccgacccttgagcatacaccgagagagtgaaggg

SEQ ID NO: 536550 - DNA, 133 bp, Homo sapiens
tagccgagtatgtgttcttctttccagctgatgtggcgcgggctggctctcggttacaaagcaggagactaacacgcgtcagagcgcgaagcgtattccagccctggatgagggtctttcttcaccgttacaa

SEQ ID NO: 536551 - DNA, 150 bp, Homo sapiens
tacgagttcatccgtaccatcgcctcctcaatcttcttcttcctcagctcaatgagatcaggggtctccattccagcatggcactgatgaaaagcctccaggagtgataaggccactgtctgcaggggtaataaagcctgtctcatctgg

SEQ ID NO: 536552 - DNA, 181 bp, Homo sapiens
gtagttagtctataaagtctttggcttggtgtctgcttcgttcatgctgtcatgttttaaagcggttaaaagtaactctgtgcgacctttaaaaaacacagtgattaatttaacttgtccaatcgtgatgaatatttcggctttacctttctttaaataaataccctgcataacgatcatg

SEQ ID NO: 536553 - DNA, 165 bp, Homo sapiens
ggccaagggtggcaacttccttcggtcgtcccccaatcccgggtgtcatccgacaccagaccgcctccaccatgccgccgaagttcgaccccaacgagatcaaagtcgtatacctgaggtgcaccgcagtaaggtcggtgccacttctgccctgccccaagatcg

SEQ ID NO: 536554 - DNA, 251 bp, Homo sapiens
agggggggctgtcgcgtgctcttcggtgtggatacaggaagtcgtcatatttgagcacttggagagggatccccagctgctccagcttcacgtgctcgcttcagcttcgctcaggtaattcacatagaagatcttctgcccgaacttgaagctgatgaggggcttgaagaggatgagcagagtttggatgaacatggttggatgcacgatgtacaaggccttgatgtacttcttgtacttgcggtcaaact

SEQ ID NO: 536555 - DNA, 210 bp, Homo sapiens
ttgcttggttaggaaagcttcagtgtgagaatgtacaagagatacctgtatagggaatggtgcctgctatatattcaaactgccatagtcgaggcaccaatatgtgggggtgtggattcccatgctaggatcagatgtcccagatcggtgggatggtaaagcgaaggcacaaagtgtgtggtgctgagaaagatctggtagaacacttcc

SEQ ID NO: 536556 - DNA, 105 bp, Homo sapiens
tggtcctgtcggttcacaggtttagtggctgatgggatcttcaggttccaggtctgggggcttcagttattgcaggctggaccatttccacatgctgggcctggt

SEQ ID NO: 536557 - DNA, 146 bp, Homo sapiens
tcactgccatgtttattgcaagcaaatatgacagaaatgtgccctccagaaatggtgactttgctttgtgactgacaacacttatactaagcaccaaatcagacagcatggaaatgaagattctaagagctttaaactttggtctg

SEQ ID NO: 536558 - DNA, 470 bp, Homo sapiens
gggttcaagcaattctcctgcctcggcctccccagtagctggaactacaagaccgtgccaccacgcccagctaattttttttcgtatttttagtagagacgggtggatcacctgaggtcaggagtttgagaccagcctggccggcatgatgaaactctgtttctactaagaatgcaaaaacttagctgggtgtggtgatgggtgcccataatcccagctactcgggaggctgaggcaggagaatcacttggacccgggaggcagaggttgcagtgagtcaagatttaagtcactgcactccagcctgggctacagagccagagtggctcaataaataaatcaatatttatgttcaactgatccaacgaactgtggatcaaaaatatctgggaagcttgcattgaatctgtagatcactacaaaagaaaaaagaaagttcaagaaaaaattaaaaaaccacataacaatag

SEQ ID NO: 536559 - DNA, 475 bp, Homo sapiens
gatgtagcgaatagataggactttgagtagagaaggaagggcgtacgaatgtccaggtagaaggaagctcagaggtctagcagaatatattacatgtaggggtcctggaagctcagtgtaagaggaggagtaagagggcaggagaggcatcagatgactctggatggggaaacagggactagtgtaatgaagagctataatgaaatataaattccacttttctttacaaaagcagatttattgaggtataaattcacatcatacagtttaccccgtttaaagtgtacatttcattgtttctttagcatattcacagttatacaatcatcagcacagttgattttaaaacatttttgtcacctcaaaaagaaaacctgtaccttttagctagcaaccctccaagtaccctagtcctaagtaactactaatctactttctgtgtcatacagtttacctatttggagatttcatataa

SEQ ID NO: 536560 - DNA, 226 bp, Homo sapiens
  misc_feature (120)..(120): n is a, c, g, or t
cctgggaggcgcagtgcacagaagtcaatatttcagaggatgtatgaaaacgcctggatattcaggcagaagtttgctgcaggggtggggctctcatggagaacctctgactaggtgctnagtgcagaaaatgaagatgtggagttcggacgcccacacacgagagtcccgtacgtggggcactgcgctcatggaccgtgtgagaatgagggccacacatccttca

SEQ ID NO: 536561 - DNA, 285 bp, Homo sapiens
gagaagcgacagaagggcctaaaagagtgatacagggtttcaccacattggccaggctggtctcgaattctggcctcaagtgatccacctgcctcgggccaacatggcaaaaccccgtctccacttaaaaatagcaaaaaaattagccaggcatagtgtcacatgcccgtagtcccagctactcaggaggctgaggcacaagaatcatttgaatctgggaggtggaggttgcagtgagcggagaccacgctgttgcactccagactgggtgagagataccgcctc

SEQ ID NO: 536562 - DNA, 338 bp, Homo sapiens
tttttttggcctaaaaaggggttgggcccccccccccccccaaggagggggaaaaacccccttcaaaaaaaaggggcccccccacccctggggtttcacccctttttttttttaaaaaggaggtcccttttttttttccccccaaccccctgacctaaaaaccctggggcttgggggcaattttaccccccctcccctttttgggggggcccccaaaaccatggcccttgggaaaaaaaaaatttttttttcttttgggcctggggggattttttttttaagttccccccccaaaccctgccctttttaaaaaaaaaaaatccccttttttgggccca

SEQ ID NO: 536563 - DNA, 697 bp, Homo sapiens
cataaccctcaacacccactccctcttagccaatattgtgcaaaaaaaaaaaaaaacaacaaaacacaaacaaacacacaatgcggcggcgcgcgcgcacggggcccttccgaaaacgtttccataacaacacacatcgcggtagggggcgcgcggggcgccccagacgggaaacgggcgaacatgggcgcctaaagaggtgttcatcaaaaaggagaggaactccggggaaacaggagaaaagcgggcgggggagcctccacccacacacatcaaacaaaaccgccggggggggcacaccagaaagcgagtaaaggagacaaaaaaccaccagaggggaagtacgctggaggacaccaaaaacgggggaacctcataactaaaaccaggggagagagccaaaagcgcgagagagaagacaaaaatacaccaacatccagagccccacgagagagcgggcaacaaacaaacaagaagaaaaaagacaacgaagaaacaaaaaaaaaggagaggaagaaagagggggagacggacacgcgagagggaaaacagcaggagagcgaaggcgagaagggaggaaaggacaaggacggagagaacgagaagaacaacgagaaagaagaaaaaaaaagagaagcagcagcaaaaagcgaaaagatggaaacagagaggaaaacaaaaaaaagggcaaaagaag

SEQ ID NO: 536564 - DNA, 150 bp, Homo sapiens
cgctgtataattcaagagcaagccccttatacaaggacacagacactacgggagcttggaagcaggctggctgcccttgccccagcttggctctgggcaaaccagccaggcaccaaaagcgacttccctgacatcgcaatgagagatttt

SEQ ID NO: 536565 - DNA, 388 bp, Homo sapiens
catgatgttgccatatatattacagttgtatctagggttaatgggctgtagtataggtgaggaaaagatttctggaataagacgttgctcttttacctggaggaaaggatctggggccgggcaccgtggctcagccatgtaatcccagcactttgggaggccaaggtgggcagatcatgaggtcaggagtttgagaccagcctggccaatgtggcgaaaccacatctctactaaaaatacaaaaattagctgggcgtggtggcacacacctgtagtcccagctactcaggaggctgaggcaggagaattgcttgaacccaagaggtggaggttgcagtgagccaagatggtgccactgcccatcacagcctgggcacacattatggag

SEQ ID NO: 536566 - DNA, 325 bp, Homo sapiens
gtcatttatgatttgaaagttggaagtttgtaccatctgtttgagtatatgcacatttaaaaaatatcatatagtaaatgcaaacatgccaagtattttataaagattaataacagacctactcttacctggcagtttacttaacttactgttttgagtcctaaacttagagttgttaatgcttatatatatctacccaagagttaccagtagggtttagttttgactatatttctagtgatataatccgatttggatcatgcgcaaagagttcatttggtactagaccagacacttataaatcctattctccagccgcaacgat

SEQ ID NO: 536567 - DNA, 1206 bp, Homo sapiens
ggcacgagggtctccgcctgcaggtgcagacatctggaggagagagtcggagagcagaaaccacttggctcccagacaattcccctacaggctttgggcctggaattgaggagaaagtgagctaagttggggtggggtgagtccaaagaagcacgggctgggccaagctaagctgctctgggctgggctgatccctccccactcaggggcgggaccccaggaggagggagaggacagagccactgcagaggaccagactgggaaaacaacgatatggcaggagccagtcttggggcccgcttctaccggcagatcaaaagacatccggggatcatcccgatgatcggcttaatctgcctgggcatgggcagcgctgcgctttacttgctgcgactcgcccttcgcagccccgacgtctgctgggacagaaagaacaacccggagccctggaaccgcctgagccccaatgaccaatacaagttccttgcagtttccactgactataagaagctgaagaaggaccggccagacttctaagccaggctgggctgccagtgccatgcaagccacagccagccagcccatccacttcttccactcctccccgcaggccccaaggcatcactccggccaccctgtcccgctactgcttacacaggccgggttcccacgcagaggggaggctgctccacccctactctcctcccttgctcccagcagcggaagcgcctctgacccttggcttgagtcccacgtgggggaggaggaggcaggcagcaccagcaggggtccaccaagagcccagaccagcccctctgccctcctacccgggcctcgaagggtgtggcacaggctacgtgttgagcgtggcctacgtgagccaacaagaagcaggggcctctgagtgccaagcgacgtggcgggctccacgttagcccaggctctgagagccagcccaggggcggcgctgctcagcttgggctggtccagggcctgcccaggctggggcacctttgcctcctgaggcgcagcgcactcctcccctgcccaagcctactgcctcccgctgccgccagtaccccctccagccccacacctgggcctccccctgccactcccctcccttgctcccctctgtccccagggatcaaacagaagcagccgtgggcaaaatacaatttcatttaacaaattgaaaaaaaaaaa

SEQ ID NO: 536568 - DNA, 789 bp, Homo sapiens
ggcacgagggtctccgcctgcaggtgcagacatctggaggagagagtcggagagcagaaaccacttggctcccagacaattcccctacaggctttgggcctggaattgaggagaaagtgagctaagttggggtggggtgagtccaaagaagcacgggctgggccaagctaagctgctctgggctgggctgatccctccccactcaggggcgggaccccaggaggagggagaggacagagccactgcagaggaccagactgggaaaacaacgatatggcaggagccagtcttggggcccgcttctaccggcagatcaaaagacatccggggatcatcccgatgatcggcttaatctgcctgggcatgggcagcgctgcgctttacttgctgcgactcgcccttcgcagccccgacgtctgctgggacagaaagaacaacccggagccctggaaccgcctgagccccaatgaccaatacaagttccttgcagtttccactgactataagaagctgaagaaggaccggccagacttctaagccaggctgggctgccagtgccatgcaagccacagccagccagcccatccacttcttccactcctccccgcaggccccaaggcatcactccggccaccctgtcccgctactgcttacacaggccgggttcccacgcagaggggaggctgctccacccctactctcctcccttgctcccctctgtccccagggatcaaacagaagcagccgtgggcaaaatacaatttcatttaacaaattgaaaaaaaaaaa

SEQ ID NO: 536569 - DNA, 250 bp, Homo sapiens
  misc_feature (176)..(176): n is a, c, g, or t
  misc_feature (223)..(223): n is a, c, g, or t
atgcagtaaatcttcgcaatttatttcctctgcgtggtccagctggtcctccatttggggtcctgacttcccgcaacatgcgacatgcccagctaatttttttaatttttagtagagacagggtttcaccatgtttggccagtgttggtctcgatctcgttgacgcttgtgatccnactcacctcatgcctgccaatagttgctgggatcacacggcgtgagnacaccacgccaaagatttactcaatcg

SEQ ID NO: 536570 - DNA, 218 bp, Homo sapiens
acctggacgaacaacacaagcatgtaagatgaacaatgataagtcagaagcaggagcagagcagcagctccgtgaacgaacgatgagcactaatgtgacagatggagctctgagcgggggtgcacgcatgactcctgctgagcgagcggcgcgaccctacctggcactcgcactgcactgcactacactgaacgacaccggggcgcgactgaacccag

SEQ ID NO: 536571 - DNA, 1471 bp, Homo sapiens
  misc_feature (421)..(421): n is a, c, g, or t
  misc_feature (426)..(426): n is a, c, g, or t
  misc_feature (438)..(438): n is a, c, g, or t
  misc_feature (455)..(455): n is a, c, g, or t
  misc_feature (457)..(457): n is a, c, g, or t
  misc_feature (475)..(475): n is a, c, g, or t
  misc_feature (492)..(492): n is a, c, g, or t
  misc_feature (505)..(505): n is a, c, g, or t
  misc_feature (537)..(537): n is a, c, g, or t
  misc_feature (561)..(561): n is a, c, g, or t
  misc_feature (599)..(599): n is a, c, g, or t
  misc_feature (601)..(601): n is a, c, g, or t
  misc_feature (634)..(634): n is a, c, g, or t
ggcacgagggtctccgcctgcaggtgcagacatctggaggagagagtcggagagcagaaaccacttggctcccagacaattcccctacaggctttgggcctggaattgaggagaaagtgagctaagttggggtggggtgagtccaaagaagcacgggctgggccaagctaagctgctctgggctgggctgatccctccccactcaggggcgggaccccaggaggagggagaggacagagccactgcagaggaccagactgggaaaacaacgatatggcaggagccagtcttggggcccgcttctaccggcagatcaaaagacatccggggatcatcccgatgatcggcttaatctgcctgggcatgggcagcgctgcgctttacttgctgcgactcgcccttcgcagccccgacgtctggnaaagncacggcttggangctcacgggggcctggntnaggcaagatggggtgganatagcggccctagtggngatcccgtgcccngctgcatgcaccttcgactgtaccgaccggcntctcaggctggagcccactgctgncctgggagacccccgtatcccctccagcccacctggcngntcactcctcagcttggcccgccctgaaatgcgnacccgcgcctctcccggcctggttgccatgacgacgccgctcagccagcgctgggacagaaagaacaacccggagccctggaaccgcctgagccccaatgaccaatacaagttccttgcagtttccactgactataagaagctgaagaaggaccggccagacttctaagccaggctgggctgccagtgccatgcaagccacagccagccagcccatccacttcttccactcctccccgcaggccccaaggcatcactccggccaccctgtcccgctactgcttacacaggccgggttcccacgcagaggggaggctgctccacccctactctcctcccttgctcccagcagcggaagcgcctctgacccttggcttgagtcccacgtgggggaggaggaggcaggcagcaccagcaggggtccaccaagagcccagaccagcccctctgccctcctacccgggcctcgaagggtgtggcacaggctacgtgttgagcgtggcctacgtgagccaacaagaagcaggggcctctgagtgccaagcgacgtggcgggctccacgttagcccaggctctgagagccagcccaggggcggcgctgctcagcttgggctggtccagggcctgcccaggctggggcacctttgcctcctgaggcgcagcgcactcctcccctgcccaagcctactgcctcccgctgccgccagtaccccctccagccccacacctgggcctccccctgccactcccctcccttgctcccctctgtccccagggatcaaacagaagcagccgtgggcaaaatacaatttcatttaacaaattgaaaaaaaaaaa

SEQ ID NO: 536572 - DNA, 848 bp, Homo sapiens
cgatggcgctcggtgatacgaacaggaccccacagtcttcgcctgaatcaggcgaagactgctgggacagaaagaacaacccggagccctggaaccgcctgagccccaatgaccaatacaagttccttgcagtttccactgactataagaagctgaagaaggaccggccagacttctaagccaggctgggctgccagtgccatgcaagccacagccagccagcccatccacttcttccactcctccccgcaggccccaaggcatcactccggccaccctgtcccgctactgcttacacaggccgggttcccacgcagaggggaggctgctccacccctactctcctcccttgctcccagcagcggaagcgcctctgacccttggcttgagtcccacgtgggggaggaggaggcaggcagcaccagcaggggtccaccaagagcccagaccagcccctctgccctcctacccgggcctcgaagggtgtggcacaggctacgtgttgagcgtggcctacgtgagccaacaagaagcaggggcctctgagtgccaagcgacgtggcgggctccacgttagcccaggctctgagagccagcccaggggcggcgctgctcagcttgggctggtccagggcctgcccaggctggggcacctttgcctcctgaggcgcagcgcactcctcccctgcccaagcctactgcctcccgctgccgccagtaccccctccagccccacacctgggcctccccctgccactcccctcccttgctcccctctgtccccagggatcaaacagaagcagccgtgggcaaaatacaatttcatttaacaaattgaaaaaaaaaaa

SEQ ID NO: 536573 - DNA, 115 bp, Homo sapiens
gtgcaggcggcgaggatcccccgtctaactgacttcgtcttatcccggactacatctgcgtggtggggggctggactggggccggggtaccgacgctcgacacttcgtaactcac

SEQ ID NO: 536574 - DNA, 1335 bp, Homo sapiens
ggcacgagggtctccgcctgcaggtgcagacatctggaggagagagtcggagagcagaaaccacttggctcccagacaattcccctacaggctttgggcctggaattgaggagaaagtgagctaagttggggtggggtgagtccaaagaagcacgggctgggccaagctaagctgctctgggctgggctgatccctccccactcaggggcgggaccccaggaggagggagaggacagagccactgcagaggaccagactgggaaaacaacgatatggcaggagccagtcttggggcccgcttctaccggcagatcaaaagacatccggggatcatcccgatgatcggcttaatctgcctgggcatgggcagcgctgcgctttacttgctgcgactcgcccttcgcagccccgacgtctgctgggacagaaagaacaacccggagccctggaaccgcctgagccccaatgaccaatacaaggtacctctcgatggctctagggttgccccccatcctcttatctcctggtcctggcacccacaactcccgtactagaagcaaagggaggcttggggtactcagcgcaaccccctttccctctcctcttagttccttgcagtttccactgactataagaagctgaagaaggaccggccagacttctaagccaggctgggctgccagtgccatgcaagccacagccagccagcccatccacttcttccactcctccccgcaggccccaaggcatcactccggccaccctgtcccgctactgcttacacaggccgggttcccacgcagaggggaggctgctccacccctactctcctcccttgctcccagcagcggaagcgcctctgacccttggcttgagtcccacgtgggggaggaggaggcaggcagcaccagcaggggtccaccaagagcccagaccagcccctctgccctcctacccgggcctcgaagggtgtggcacaggctacgtgttgagcgtggcctacgtgagccaacaagaagcaggggcctctgagtgccaagcgacgtggcgggctccacgttagcccaggctctgagagccagcccaggggcggcgctgctcagcttgggctggtccagggcctgcccaggctggggcacctttgcctcctgaggcgcagcgcactcctcccctgcccaagcctactgcctcccgctgccgccagtaccccctccagccccacacctgggcctccccctgccactcccctcccttgctcccctctgtccccagggatcaaacagaagcagccgtgggcaaaatacaatttcatttaacaaattgaaaaaaaaaaa

SEQ ID NO: 536575 - DNA, 1019 bp, Homo sapiens
aaaaaaaaataagcaaaatacaaaatctgatcaaacaaagctgaataatagaataaagaaatccaaaaaatgataataaacataacagatgaaggaaaaatataagacaaattgatatacagccatgcagtatgtggctgatagaacatgagaaacatgccacggtatcttcaaatcatgactttgaagaaaatggctcaatggacaatgtcatgcacatctttatcgaacttggctaatgacccaaccattgagcgaattatcacatcctcgactggcatctaaccacagctgaatttcatggccgtaccactgtgcagaaacatgtcttgccttattctaaccagacatgagttcttatgctgaagcacgttcgacgaggtttcatgccagccacgggcaagaggtacctggctcgaccgacgcttttccaggttacctgtatacagatttagccacgatatatgaacgcgctgggcgagtggcagggagaaacggctcgattactcaaatccctattctaaccatgcctaatgatgatatcactcaccccatcccaggacttgactggctacattacagaggggcagatctatgtggacagacagctgcacaacagacagcattatccacctatcaatgtgctgccctcaactatcaccgtttatcgaatctgctattggaccacggatgaccaagaacgatcatgcccatgtatctacccagctatactcctgctatgcattggcaacgatgtcaagccatacagctcgccccgcgccacacacccccttaccacccgcactcccccctatccacactttgcaaagttacactgccccaacatcgcaacacacaacctacagcgggcatccgccggccccagcaatatacacgcaacgagctactcgaacttggacacatctagctcaacacactcccaaatcattgccccaacgcgtctccgacaaaacctgccacaaccaccccaggcaccttacaccccgaccctgtccaat

SEQ ID NO: 536576 - DNA, 1039 bp, Homo sapiens
ggcacgagggtctccgcctgcaggtgcagacatctggaggagagagtcggagagcagaaaccacttggctcccagacaattcccctacaggctttgggcctggaattgaggagaaagtgagctaagttggggtggggtgagtccaaagaagcacgggctgggccaagctaagctgctctgggctgggctgatccctccccactcaggggcgggaccccaggaggagggagaggacagagccactgcagaggaccagactgggaaaacaacgatatggcaggagccagtcttggggcccgcttctaccggcagatcaaaagacatccggggatcatcccgatgatcggcttaatctgcctgggcatgggcagcgctgcgctttacttgctgcgactcgcccttcgcagccccgacgtctgctgggacagaaagaacaacccggagccctggaaccgcctgagccccaatgaccaatacaagttccttgcagtttccactgactataagaagctgaagaaggaccggccagacttctaagccaggctgggctgccagtgccatgcaagccacagccagccagcccatccacttcttccactcctccccgcaggccccaaggcatcactccggccaccctgtcccgctactgcttacacaggccgggttcccacgcagaggggaggctgctccacccctactctcctcccttgctcccagcagcggaagcgcctctgacccttggcttgagtcccacgtgggggaggaggaggcaggctctgagagccagcccaggggcggcgctgctcagcttgggctggtccagggcctgcccaggctggggcacctttgcctcctgaggcgcagcgcactcctcccctgcccaagcctactgcctcccgctgccgccagtaccccctccagccccacacctgggcctccccctgccactcccctcccttgctcccctctgtccccagggatcaaacagaagcagccgtgggcaaaatacaatttcatttaacaaattgaaaaaaaaaaa

SEQ ID NO: 536577 - DNA, 1334 bp, Homo sapiens
gatgcagtctgggaacatgccgccttctctccagcctctgtgcctttgttccaggtaggtctcaccctcctgtaccctggctgatgctaggtggtacctagatccaggctcctgcagcgcccccctcactttgacactggactagagatagcagcctcccttctgtgtccccttgagggtaccctgggtcccctcatcatggggctgaggcttgatatgagtcgggggcttggatggccgtggggtcttctgggtcccgacgcctagttgcaggcccctggggtcgtggtttgacagtttgatactatgccgtgatgagcaaacaagagagatccttgcctatttaagtggtagacagtgccctccagcagtggcttccgagacttgacggtggacgtctgcgttgtcctgacatagaaagacgaaagccaaacagcttagtggaggtcaaagcccagacactgtaaagtaggaaccccggcgtcacaacatcgccgcgcgtccgtcctagtcatccgtaccctggatctgctggtgcatcacgagggccctacggggcccttttgctgctgctgctccgccgcggactggcgagtgaggtggtgccgattgtgaggagcgtgtggtttctgggtgctgaggagtccgatgatggcgacgtgagatggagaaaccgtgggcgtggaaagctgcgccaagcgaggtcagagccatggggagtcgcggggaggcaaagccaacaaagcaaagagtgaagtaaagagcgacccaaagaagtaaccacatctcaagaacagaaagcaaagaatcaaccaatcgacccaaccaacgaacacaaaaccgctatcgaatatccagcacacgaccaccaaaacaaacaaatagaggcgagtctcccgccgaactccaaacaaaatagcagcccagtgtgctgtagatcgatcttcctgtcgctgttgtgtggttgcaggtgatgactgcatcccgacgccccctactctcctgctggctgctgggtgtctcccctgcctggctggttcctggacggatcgcgccctcgctgcttacggccttctgcttgtcgactattggctccttcgtggtgttttgtacagctttacgcgcagcccctcctaacgttgcactcttggctgtggtcggactcccaagacaatgcccacctggcagccgacatgagcccacgcgcacatgaaccccacgcgcccacaccacttgcccgtcacacgctgcgcattccgtgaagcacacgcacctgcgccgaacgagcgactgctaaaccaagcatacagcccactgcagcgcacctcccactg

SEQ ID NO: 536578 - DNA, 114 bp, Homo sapiens
  misc_feature (4)..(4): n is a, c, g, or t
tacnacgtacgggtcgtggtgctggacgtttaccgttgacgtacgtaccgaactgcgagtactacgttacggactacctactaccctacgttacaacttaacgacactggttac

SEQ ID NO: 536579 - DNA, 871 bp, Homo sapiens
ggcacgagggtctccgcctgcaggtgcagacatctggaggagagagtcggagagcagaaaccacttggctcccagacaattcccctacaggctttgggcctggaattgaggagaaagtgagctaagttggggtggggtgagtccaaagaagcacgggctgggccaagctaagctgctctgggctgggctgatccctccccactcaggggcgggaccccaggaggagggagaggacagagccactgcagaggaccagactgggaaaacaacgatatggcaggagccagtcttggggcccgcttctaccggcagatcaaaagacatccggggatcatcccgatgatcggcttaatctgcctgggcatgggcagcgctgcgctttacttgctgcgactcgcccttcgcagccccgacgtctgctgggacagaaagaacaacccggagccctggaaccgcctgagccccaatgaccaatacaagttccttgcagtttccactgactataagaagctgaagaaggaccggccagacttctaagccaggctgggctgccagtgccatgcaagccacagccagccagcccatccacttcttccactcctccccgcaggccccaaggcatcactccggccaccctgtcccgctactgcttacacaggccgggttcccacgcagaggggaggctgctccacccctactcttcctcccctgcccaagcctactgcctcccgctgccgccagtaccccctccagccccacacctgggcctccccctgccactcccctcccttgctcccctctgtccccagggatcaaacagaagcagccgtgggcaaaatacaatttcatttaacaaattgaaaaaaaaaaa

SEQ ID NO: 536580 - DNA, 342 bp, Homo sapiens
ttttctctgctgcggtgactctagacggactccccctaggtggacacgcgaccgtggcggtgctccactagcccaggctctgagagccagcccaggggcggcgctgctcagcttgggctggtccagggcctgcccaggctggggcacctttgcctcctgaggcgcagcgcactcctcccctgcccaagcctactgcctcccgctgccgccagtaccccctccagccccacacctgggcctccccctgccactcccctcccttgctcccctctgtccccagggatcaaacagaagcagccgtgggcaaaatacaatttcatttaacaaattgaaaaaaaaaaa

SEQ ID NO: 536581 - DNA, 216 bp, Homo sapiens
ttcctgaagacacagtagaagaaagggaaaagagaaaaggggaggaaagaaagaaaagataaaaggacacaggtcatggtgccaggaatttggaaactggccacctcggcaattttgagatgccggtgggctggggagagggtgtcctgggggactggcccggctgaaccaccaggccagcttctctgcctggtggagctaacccgaccaccgcct

SEQ ID NO: 536582 - DNA, 124 bp, Homo sapiens
gctgttaccctggtgttgtctctcctcatctgtctcctccttgcgcaacgccgtgtggtacggggctgttggagactctgcctacagcatggggtgtgtgtccatggctgaacccgctgagtgt

SEQ ID NO: 536583 - DNA, 427 bp, Homo sapiens
gtagatgctgcatgatcatcttctgcctcgacagacagtataacgttgtcttgttttcttaagattccttaccactcagttactttgggccaagtatccacgtccccttgcgtatagcatgtgggataagagtgttggatgcaaagtggttattatggtgcaagtagctcgatggttaaaaggacaaacacctatctatcttagagcttaagcctgtatatgcttagttcccatagataatccacttagcagtcatcatctgtacttaactcttcataattaatctggtcattctccattcgatgtcagcctcccttatcatctcatccatctcctcatcggtcagtttctcccccaggttcgtccttacgtgacgcaattcttcggcgctgatgtatcctttcccatccttgtcaaagacaaggaa

SEQ ID NO: 536584 - DNA, 139 bp, Homo sapiens
  misc_feature (49)..(49): n is a, c, g, or t
  misc_feature (55)..(55): n is a, c, g, or t
  misc_feature (134)..(134): n is a, c, g, or t
cgatgttagaaatggttccagaaaaacgagcctcagctggcgagatctntgctgntcgctgtggttgaattcttagcaaattctaccaatattgcattctgagctagcaaatgttcccagtacattggacctanacggt

SEQ ID NO: 536585 - DNA, 1056 bp, Homo sapiens
ggacgcgtggggtggggcaaatattgggtccccaggctgtggaaagatggacagaggtccaagtgggtgaaggctttagaaggagcacacaatgaagcccctggacccccacgatagctggagagccatgtatatggcttcaaaagccacactacgggaatgggacactagctcgtggagctatgtgtggcctgtcagtttcagggtgagtacatttaccagatgttacttgtttagtcgtggggtagccagagtaacattgagttatctggaacacataagttgaaatgaactaacttaagaggtgatatgtcgagggctatctacctttttaattccaaaagggagtctatatttatgtctaggcttgttctctggatatccatattctattggtttataacgaaataaacggcaatcttgtataaatcaggttaacggaagatttcttggacttatgaaaggatgaacaagctccacgtgtgctattggcattggcatgtcaggtgagtcaaattatcacccagtgatcttctgcgcgtcccatctgcgttgggtatctgcctataatccgcaggtccaaccaccattccgagagactgaaacatggactggcgtggactgcagacttcctacggaactaccctccctcacctgacagaggcacgtcactcttctctgtgtacccaccgactgtctggtcttcagaatgctccccaggtaaaattagaacaactctttcttcggttgggggtctaggaggccgaccttgacactaattactatacccatcgggcgggccgtagccaaaaaaaccccatccggggacactcaaacagcgaagcctagttttcgccacgaggcccccaatggaaggacacataaacggagaacacgggcggctacttgaacggcggacggcgaggaagggtccttgtggcgacttggggcaggccccccggcggggcccacagccaacccacagagaatccccgggcaaaacactggcgaaaggaacacgaaagcggggcaatgccgaggaaacgcagagacaag

SEQ ID NO: 536586 - DNA, 740 bp, Homo sapiens
  misc_feature (225)..(225): n is a, c, g, or t
gcgggagactcacgttgccggcgaagtgggagagagaaaagtggtaacctgtggtgctggggtgcctggcgctggcgtgagctcgtgagtagatagagctggagtgaagacacaggggtgagtgatagcagactgtgcattccgtttgtgtgcctgtgtggtgactttggctgtgtgatgtctgttgcttgtgtgttgctcttcagcctagtgtttgatgtgtcnccatgttgatgtgtgtgaatgtgatgaacgctggacagatgtgtgtcatctatgtctgtgtgtgccttagtgtgcacaatgtgtgaactacaacaaatgtgattgcatgattgactattaagaaattgatgtgactgactgatggatgattgcttgttggatgtgagcatgtagatggtgaagacagatgattgcaaaagaaacttgttgtcagtgaaggaacttgtattagaggggtcattagaaggtgaagtgttgtgctggacgatgaaaactacaactacactgtgaccattaacgacgtgttgtggtgtgacgccatttgtcagcaatgggactgtcgggactgcgaaaatggtgtcagtggtagattgtggcaatattgttgttgaaaggcagcaaagggtaagatggggggttggaagaagggagaagattcaatggacggatgaaaatgaaattggcgaccttagaaagtcgaggctctgcaagaagttggttgaaggtgggtgata

SEQ ID NO: 536587 - DNA, 241 bp, Homo sapiens
cccccacgaataggaggcatcaggagtgactgagctggcctctccatggctacagaatatagagaggccatgagcagtctctcccatgagtacaaggacggagcatgtacgcttggcaggttggctagttccttgatagcatcttattctcaccttctttgtgtctggtgatgaaaggaacagtctgtgcatgggttttacttacacttcactgttcaacctatagagcaatctaccgtgg

SEQ ID NO: 536588 - DNA, 109 bp, Homo sapiens
tgactagtgcattgactccagcctgggcacaagagcgagacctgtctcaaaaaaaaaaacataaaaccccacaaaaactaggagcctggaaggcctggacttgggtctc

SEQ ID NO: 536589 - DNA, 197 bp, Homo sapiens
ggggaggatctaggcaggtgggcaatagagcaagactccgtctcaaaaagaaaagaaaagaaaaatactatgagaatacagagaaggaatagctaacttagtctggaaggtatggtagaaagatgagtaatgaatatgacttgtggccagtgtgtggtacgttcacgctctgtatatcccaggtgcttcagacgtcc

SEQ ID NO: 536590 - DNA, 829 bp, Homo sapiens
ccttcccgcggggtgcacctgggccccaatttcctcagagagggtctctggtgttagccatttctctcgatgggcctaaccgtcttcgtcgagcttctgcaatttgcccgtgttccccgtttggagcgcccacctcctccgtgccgctcgccgcccctgggctcgtgcctgggtgtccccccggcttgtgccagcagtgtcgcagcgcgacacaacgggctacccttgtcccaggggcggcgccccccggtgggctcccaatccgtgttgatcctcccgctcggggacaccccacgagtctgggccccccaacttgttttcgcagcccgtgcggtaccccgtgtcttcgctgcccccggtgggagcataaaagggctcctgcccccccgtcttgggggcacaggagtcccggcacaccatagaactggtgctgctcgtcgcggtaatatttagtgctgactgttttcccccgcgcagtcgatgaaatgtctcagcggcggccctctctccccacccgcgctgtgtggcgtcctctctccgggcgatgttgactccgacaggcggcattcttggggcgttccccgggggtgcgtcactagtattgggtgagccacgcgggtcccgcccccttttcgctcgaggcttgggcgcccactcccgaggtgtcttgggggcactaccttgggcaccccgatgtcatcttctgttgcccccgactcccctcggggcggaagttcttgctccccctcccgcccccgtcaggcgaggtgtccgttttctgccccggtctctttaaaaaaaattttgggcaaacccctcaacaaaaaca

SEQ ID NO: 536591 - DNA, 577 bp, Homo sapiens
  misc_feature (213)..(213): n is a, c, g, or t
  misc_feature (284)..(284): n is a, c, g, or t
  misc_feature (300)..(300): n is a, c, g, or t
ccgagatggcgccactgcactccagccggggcgacagacactccgtttcaaaaaaaaaaaggtgagtacaaggaggttcattaaagccttatatagaaaaggttagacatagcttaaatgccactagatgtgacattcttttcaaattgtcagcggatgtccctcaaatatcttcccatctcacagaataaaacccagagttttcatgtcttncaagccctatgagacctggttccccacagcctctggaacctaagttcttacagctctctccctcaggcacngtgctgtggccttgancaagcccagcccacaaatgcttcactcctttcacctgcctttccctcagctccagtgctgaatgacctgttcccttctttcatttaggtctctactcagttgtcacctcagaaagtctgtctctgactttgccacctaaaaaccacccctgatgatcctgtagcccctttcccttctttttttttttttgagacagagtctcactctgtcacccaggctggaatgcggtggcgtgatcttggctcattgcagccttgacctcctgggcgcaggtaat

SEQ ID NO: 536592 - DNA, 224 bp, Homo sapiens
  misc_feature (110)..(110): n is a, c, g, or t
  misc_feature (150)..(150): n is a, c, g, or t
gcaaccagtgtcctcgtctgaagagagaaagggaggcgtgcctgagagggtagcctgtgcatctggtgagtgtgtcacgagctttgttactgccaaactcactccttttnagaaaaaccaaaaaaaagggccagaaagtcattccttccntcttccttgcagaaccacgagacaagccagttccctgtcagtgcaggcttcttgtaatttatggtatgtgcctt

SEQ ID NO: 536593 - DNA, 264 bp, Homo sapiens
cgtcctctacagtactagggagcaatgggaacaggagcccagacgcctctctcagcagcccaataacgctagaacactcgtcaaggaagagaaatatcccataactgtccatcctttgggttcaaaaagtcaactccccttcataaggtgagagacgcatctgttcagagcagcagtattcacaatagcaaagacgtggaatcaacccatgtgtccatcagcggtagaatggattaagaagatgtggtacatgcacaccatgga

SEQ ID NO: 536594 - DNA, 259 bp, Homo sapiens
tgtttgctgcatgctgagggctcacaggcagagggacgtttagagtgagcaagcagctgactacagagctgctcagtaatccaggaatagctgagggcctggcgtcagaagggctcacagtgagacccactgtctctaaacttcccagggttcccagcactgaggctcatttaatgggaactctaggtacatgagggaggtctccagcgacaccaagcatctctggacttaggacctggtgaacacaaacagaggaccc

SEQ ID NO: 536595 - DNA, 429 bp, Homo sapiens
aaaatagcaaatgatattgtcttattttacctcttggacatccttgaatgaaactgctactaaagggatactcggatcaaaattcagatctaatgttttgaacagtatagtttgtgaatgtccagtgatcatgagcccttgatggggaaatgacctttcgagtttcacttttgcattttttgctcttttcgttgacttgtcttgaaagcttaaattcaactattttatttttacagaaaccaggaatataacttttaaaatatatgtctgtcctgtctcacggtgttgtgtactcttcagatcttgtatgaacatagacttatatgggaacaattaggttttttgtttgtttgtttgtgtttttgaggcagagtcttgctctgtcaccaaggctggagtgcagtggctcagtcttggttcattaccacc

SEQ ID NO: 536596 - DNA, 144 bp, Homo sapiens
gacagctgaccatggaagctaatgggttgggaccttacggttttccggagctgaataatgacacattcgtgctagcagcctggggagaggaaacagactactctcccgtctggtgcatgcgccaggcaagccgttacttaccag

SEQ ID NO: 536597 - DNA, 1232 bp, Homo sapiens
  misc_feature (800)..(800): n is a, c, g, or t
gaaacaaatgatatagagactcccatttaaatgaatcttatctttataagaaacagccaaactgttttccagactggctataccatcttacattcccaccaggaatgtatgagtgatccagtttctctgcatgctcgccagcattggtgttgtcactatttcttatttcaaccattctgtttatccttttcagtgaaatatctgttcatatcttttgcccatttgccaattgaggcaggaggatcacttgagcccaggagttcgaggctgcagtgagatatgatcactaaatgtttgcttaatgagccatatctttaaatatcttttttaaagtttttaaaagtcagtccagtggtttatgtgattatgtgggattttttaaatctttccaggcaaaatgtgtatagcattttgaacatatttacactgtactgagcccaagagttctcatattctttctttgctcattatagagtatggtactaatactgtataatagtaaattttcaaagatacctttatttagaatgttagagtatacagatatatactttgtacatagttatcataatgtttctaacctttttatttaaagcaggctgatttgtgtaaaggtttcagaatgattttgttaactaagttattagaaactttcctatttgtacaagatggtaaatgtagattccaatttgtatgcctcagtaaattcataatcttatttctctgatgtgagccactgtgcctggccttctgtgatgctcttaatgaattttgcagttttattaaattgtcattgagancctcataaatcattgttaagatctatacaaaaaatcaaggatccacagtaatagaatatttttcatctgcatatgaatttttcccttccctttttgtctacttttagatttaaaaaaaattaccaggacattcttattaaatactattacctgttttggtttctgcacattaagaaagtcacagagaagccagacacagtggcatgctcttctattcccagctactcaggaggctgaggctggagaatcacttgagcccaggagtttgaggatatcctgggcaacatggtgaaacttggcaaaaacaaaaacaaggccgggcatggtggctcacacgtgtagtcccagcactttgggaggccacggctggcggatcacgaggtcaggagatcgagaccatcctggctaacatggtgaaaccctgtctctact

SEQ ID NO: 536598 - DNA, 1158 bp, Homo sapiens
ggattggcctgaataaaaatgccttgagttggtgagtagcatggtatggtttcgtagagtaggaggacgcagggaaaactgcgtcgccatgtgaagatccataggtcaagcgagctggtgaggaacgacctcataatgctggcaccctttactctatcggaatgagctccgggccacggggtctggcaaggtgctacagaactgattccccacacagtacaccagttaccattctttggactccacgtggtaccatatgtctttgttaggaacgacgagtggctatcgggtcaatgggtcatgcggctatgggacgaatatcgttcgctggataatgcgtgtccatgcagccagaagatcgtgcgctgtgcgtgcctgggcatctcagctggtctacatcatgcgtagagagcacgcgcacgaggccataatcatagtgacccataggctaccctgagtgtatacggtgaaactgcaagcaagtgacatgggtaactgaagcacgtggagtcgtgagcgacagtcactccaccgataacgagaaagcgattcattgctgactagtgaatctgatggatattgccgaggactgggaacgggcgccgtggatccacacgctagtgaattaactcgtgggaattcagcgccaagtgctacccgtaggactggaggggccgcatgtgagggggggcgcgcggtccagctaacaggagggtcgttggcactagccgagagtcctccttacaaggaccatcaagaacagttgtgaccggcctcctagtttggaggtgactgcggatgcaccacatgacacacatcagcgccctaaagaagggcagcatgctggagccatgagcagggttgaagagacaggagcccttcttcatgggtccagggcgaggcggctggggatgcttactgaaaaggcggaacgtcgtggtgcttaaacagaacacaggcaagatcggtcactggacagttgatgcgtcagacctggcgactcccttcacttgagtagcaggcaacaccgacaatcacaaaagtgatgagagaacacaaataaagttcgctgcgtagccattcacagggaattctagacaacgagcaccgaagttgaaacgagacgagcaataagatacgatatacactacaatcatg

SEQ ID NO: 536599 - DNA, 148 bp, Homo sapiens
atcctgattgcccctattctcaggctacacccgtagaccagaccgtacgccaaaatccatttcactatcatattctcggcgtaatctactttcttcccacaacgctttctcggcctatccggaatgccccgacgttactcagactacc

SEQ ID NO: 536600 - DNA, 276 bp, Homo sapiens
agccctggaaccactgtctattctgtttctgtgagttgtgacagttttagatccacatatgagtgacatgcagtatctgtctttctgtgcctgggtcgtttcacttaacataatgactttgggttcatccacgttgtcacacatgacaggatttccttcgttttcatagctgaataatattcagttgtgtacacacaaccacattgtcattaaacaccaaaaatttttaggttgtttccatatctcgggtattgtgaataacgctgcaatgaacat

SEQ ID NO: 536601 - DNA, 176 bp, Homo sapiens
  misc_feature (18)..(18): n is a, c, g, or t
  misc_feature (25)..(25): n is a, c, g, or t
atttttttttttgggggntaaaaantttaaaaaaccccccacaataaaatcccttttcaaaaaaaaaaaggtatttttttttaaaaaattaaaactttttttaaaattttttaaaaaaaatttggggttttttttttttttttttttttttttttagattttttttaaaaccctta

SEQ ID NO: 536602 - DNA, 559 bp, Homo sapiens
gtagggactggaaaattggcaaaggaaatagaaattggaaaacaaaacaaaatggcaaaagccttagtggctttttccacctaagaagtggatcaagggagaaaaggtccacgggagttggaataatgaacttggagttggggtgcaagcaaatgactcagagaagggtccagctctcaagctgaatgacaaacatgcggtggtaaatttagtctcaggtgtaaatacccaagccctcgggtacccagggagcgggctgggtctgggggggcatgtgtgtcccggtgagggcaatcatggtagtggctggccttcagaagaatggaggatcggagggagttttgtaatgtatttattttcggttcacctggtgacccggtgtcaaaatttataaagatacaaaaggcattactggaaagggtactttctggtaattggatactattgggctaaatcatcttcactggactatttgtaatactgttgtaatgttaactctgttaagtacccaagtggtgtgtcttccaccaaagagtgtttattaacaagaatctgtgaa

SEQ ID NO: 536603 - DNA, 513 bp, Homo sapiens
  misc_feature (435)..(435): n is a, c, g, or t
  misc_feature (452)..(452): n is a, c, g, or t
aagaaaagtatatggagtatctggatgcagtaacttatagtggtgatcctgcaccgggaccagatccattttcacttatgggagagagcacgattaattggtgggtgacaattcagggtggagtcgtgctgctccagagggtaaaggggtcaaatgtcgatttccagtagtcgaaaagggaaaacagatatcaggattgggaaaaaaattttactacaaagcaacagttatgttggaatgcgataggggttttacctcgatggcagcgacacaatggtctgtgacagtaacagtactggggatcccccagttccaaagtgtcttaagggtcctaggcctacttacaagcctccagtctcaaataatccaggatatcctaaacctgaggaaggaatactggacagttgggatgtcggggtcatggctgtgatggtnatggccatagtggtggnagtggcagtaatttgtgttgtcccgtacagatatcttcaaaggaggaagaagaaagggaaa

SEQ ID NO: 536604 - DNA, 172 bp, Homo sapiens
agacaacctagcaaccattaccaataagtatagcgatagaattgaacctggcgcatagatatagtaccgcaggaaagatgaaaattataccagcatattatagcaggcctacccctatactctgcatatgattaactagattacttgcaggggagcaagctagacccgaaca

SEQ ID NO: 536605 - DNA, 223 bp, Homo sapiens
tatccacgcccactgtgggtcctgcattgagcagggctgggagtgagggtttctggggcctcatgattctgggaaagcaacagctatcagatagacgagaagggccagaccccctagcctcttagattcctggagtcactcctctgtgactggcagcaccatcttccctggggggaccaacaggaagaggccggggtccagttagagaagtgcgcctaggtgc

SEQ ID NO: 536606 - DNA, 819 bp, Homo sapiens
  misc_feature (683)..(683): n is a, c, g, or t
  misc_feature (708)..(708): n is a, c, g, or t
  misc_feature (787)..(787): n is a, c, g, or t
  misc_feature (789)..(789): n is a, c, g, or t
  misc_feature (814)..(814): n is a, c, g, or t
ttggaactgacatgaatgaacgttggccactcttacccctccaggggtcacaatctataacgcctaggacccaagaatatcagaaataagtaagcaataaaactaattctggcaggaatcagggtggcaataggactagcagcaccctggggtggctttgcctaccatgagttaacgctaaagaacttggctcaaatcctagaatccttagccaccaacggagatcaggcattaaagagaattcaagagttccccagactctggaaaatgtagttgttgataacagactagcattggattatttactagctgaacaaggtggggtcttgtgcagttattaataaaacctgctgcacatatattaactctggacaggttgaggttaacattcaaaagatctatgagcaagctacctagttacatagatataaccagggcactgcccccaactatatctggtcaaccatcaaaagtgccttcccaagtctcacctgtttttcacctcttctaggacctttgacaactgtcttgttacaaatgtttggtccttgcttctttaacctcttagtaaagtttgtgtattctagattaccacagttccagagacaatgctggcacaaggcttccagcccatcctgtccactgacacggagaatgaaatcgtcctgctctgggctccttanatcaggtatccagagatttttactnctccagtgccaggcagggcctacgtccataaactcagcagggaagtagttccggaaaacagatcttcacccctttttgnancccccttaagattaaggggggagtntctaa

SEQ ID NO: 536607 - DNA, 132 bp, Homo sapiens
tatctaatcttcaacgcagataagtcgcttctacggcataatactataaggaataaaaggacccataccacccactggctttatctagagtgagagatagtagtaggggaactgtttatcatgtaatttgtc

SEQ ID NO: 536608 - DNA, 737 bp, Homo sapiens
  misc_feature (724)..(724): n is a, c, g, or t
attgggacgggggggtttatgtgtaaccggagggggcccccacccccccaaagacccgtttgtggaaggaggaccggccggctttcccttgcttctgggccggtttggctttgcaaaggcgggacaaaaagaagtggaggatgacctgccaggggggataagggcaccaattacgagacgggggccccaacactggggggggggggacataccccttaaacaggaagcgggaaatacaaccgcttttcaaaggggcagctatgaagcctggcggggccacgaccactgtaactggatgcactacaaggaagagcaggccccaaatgggcgtgggggaatatgaggcgtttccctgcaaaccaaatctgggaaaacagggacccaggagagaaactcaaaagaaaaccttccctcaccttctaaggaaaagtcccgaccacggggggtggggtttggcccctaaaattacaacgaattttgtgaaaagggggatggcgcatggtgagggaaagaagaccaaaaaatttccacctcttcctaaaggaaaaacaccgggctccccacccctcgggggctcctggggtacaaatctgaccgcgcttttattggggaaacacagaaagggggcaaaccactccgcttggggaatatttagaagaactccctcgtgggggccccgaggggataacaccaaggcgccggggacccaacggggccactgggnaagatttaacatg

SEQ ID NO: 536609 - DNA, 304 bp, Homo sapiens
  misc_feature (16)..(16): n is a, c, g, or t
  misc_feature (99)..(99): n is a, c, g, or t
  misc_feature (111)..(111): n is a, c, g, or t
  misc_feature (121)..(121): n is a, c, g, or t
  misc_feature (138)..(138): n is a, c, g, or t
  misc_feature (167)..(167): n is a, c, g, or t
  misc_feature (217)..(217): n is a, c, g, or t
  misc_feature (241)..(241): n is a, c, g, or t
  misc_feature (258)..(258): n is a, c, g, or t
agaataataatattanatgatagattaacttatttctattgcttttaccagtgaaaaaaggaatgggcatgcttacaaagggaaacaatatagaaatanacaaagcagacnattaaaggcnctccaatcccattaccntatacccacctgcagacagaatgggaagntttagtcataaatacaaagacaatacatggaaaaaaaatagacaattatnaactcgtaggaaaaaacgtaatcntagcatattccttggcncagaaatgaaaaggaattacttgggtatcaaaaaagagaaatatgg

SEQ ID NO: 536610 - DNA, 195 bp, Homo sapiens
cggctcatgtaccccggtttccggcgctgccgggtctcgtgttcgggttcgttgccccggtgccgtggaccgtggccgtgtctctccgcgcctgccccatgccgggtcgcagcagccggaggtgtctaggaccctctggacccatccctagcgggccccgtccggcggtcggcctccggtccgggctcccagtct

SEQ ID NO: 536611 - DNA, 394 bp, Homo sapiens
taagagtatccccccagttcctgcttcttgaaatgtctgttttgacatcatagtctcagctaaattttgacagtggcatatctactgttactaaaagcttctgtgtattgaatagtttcatccttcttgcgtaaaagtgagtggcttcttctgtttcaagaagcaggaactggccagttcctgcttcttgaaaccgttcctgcttctccttttgtttatctttgtggtccactctctctgactattgttcgctgtgacccgcgttgctccgtttgatgtatggaggtgcatcacgccactgcatgtttccctctgggcacacgagtaactacgggcactctgtcctctctgggcgttcacggctctaccctctgcgatcggctggcttctattc

SEQ ID NO: 536612 - DNA, 287 bp, Homo sapiens
atcccagcccataccgacggacatttcatcggagtcaccgggcccgctcgttttacaactccaggcaagcacccttaggatagccagagaccctgtctcccttcggcggataaatcgtaggtgatggagcacctcacgctattcctcatcagaagacccacaaacatgaccctcagcctgaggaccccaactccaggccctccagccccaaacctgcccagccagccctgaaaatgcaagtcttgtacgagtttgaagctaggaacccacggggacgtggcgtctgt

SEQ ID NO: 536613 - DNA, 256 bp, Homo sapiens
aatgtaactacaatctgaggaactccacgaggggctggtggaattccaatcaaagtaaactgtccaaggagtttgttgtctccagaccatctcatcattcaccctgaacacacttatacatttccagcttgcgtattgaccatacagacggcagtgagagaatacctggtctcttcttggcttggaagtagtggtattccctattaatatagtttggtaacagacaccgtcctcagagtttcaactacccgagaga

SEQ ID NO: 536614 - DNA, 253 bp, Homo sapiens
gataaggtaagcctaggtgttgacagcaggaagggatgggggagggcagtgttgtgggattcatgatgggactaagagggctcacgaggggcatccgcaatgtggggttcactgagagctgcctccgggtctcttcaccactgtagttctctcatttccaaaccatcagctgattttaaaataagatctctttgttgccatcctgtgaaatttgtaagcaatctaattaaatgggatcagcacttgaaccaga

SEQ ID NO: 536615 - DNA, 179 bp, Homo sapiens
cttaacgatccgttcacgtcagtctgtagtttaccaccacacatacacacacaagaaaccaatcgaacatcacacacatacgtacccaaccaaaaccaccagacaagagtacatacaacaaccataacaacacataatgttaccccacccccaaccacaatagggcgtgtgtctcggta

SEQ ID NO: 536616 - DNA, 1392 bp, Homo sapiens
ccatcccttgacgaatccaagaatttctccgtgccagccgtatcacacccctagtcctaaagtaacggtcatgctaaataatgctatcgtggcccaattacacccgcacaacactgttgagctatcataccctctataaaacaacacaaaaaataacaacaaaacaacacacacacaacaacgagtgtcgcgcgccagcccccacaaccacgccaccccaaaccaaaaccatctctccacacccaccacccaccacgagacagcacacgcatcatcccaccagactcattcacaagaagtccacaaacgtggcagtcacacgcggatttgcctcctcactaccactctctctgggccctacacctaacacaacagtcctgattgtgttgtttactacccacctatacacacaatatactgacggaggtgctcacccaccacgaaaggagctagacgcctgcacaacaccagccgaaagaaagagaacaatcaaaacgagagacacttactccactacaggggcggctactcttctacacaacaacaacaggatactttccctatagactacaacgtaccacacagacaactatcaaccacaacactcaccgcaccgccggccatcacccagacgcgcgtccccactatcatattatactaaccacacaatagtataatagtaatacaacaactacacaatacacctcacctaaccataaatcttctctcttgtcttctcacctccactacccacattcctattcattccgcatctctccttcactaccccctctccccacacacaacagactacacacactataattaactacaaaaatcccatacacaatcaagaccactatccacaaccccacaccacatccttcgatccaaagcaaccagagtgacataaccatcacctccccgacatcacatcacaaactcaatcatcaccaataaccgaacagacatttaaattaaaactcccacctcttatccagtaaaaactcccaaaacacactccacaacaaacacaaatcacacatcactccctcacacacacaattaacatatcaacattacaatacatacataacaaacacacaccataccaacatcagcctcacaattaaacactacacccacacaccacaacacgcccaccacctcaactaccccactcataaagcccccattaccacctatatcacaatccaactacattaccatcaataagaccaacccacaaaaaccacaatcacactcacaaacaacacaaacaatacaaccacaatcacacacaacataaattctccgaaatatctattcaacactacacccaaaataacacacaaaacccacaaagcaaacattcatcaatacatacaccat

SEQ ID NO: 536617 - DNA, 797 bp, Homo sapiens
ggcacacggagcacaggtctctgcggctgatgaaggctgtgaccagacgcacccaacccttggtaggccatctgtccctgcagactatagcccacattcctcatgacctccctctgtcttgtcgtgggagaccagtgtctgtacagttctctagggccccagcgccctggttatggtgaattgcgcattgccattgatttcatggtgtgctccagtggcaatccccatgcctagctccctaattccctaggtttggaacgaatgttagctcgacacgatgctccatcaaggcaaacacggttcatgtgcgtctccggtgtcactgacttacgcgatccgtacccaaccgcccctgttcacttgcgtggagtcattacaggctatggttggccttgagcttggaccgggcattcccactcttcatatcagtcgcgtaggcaccttcctggggtcattcgcgtatgcggcgcggtcgtggacgactgctagcaacgtacagcgttgtggtggatggcgtccgtaccattggtcgttaaactccttggcccgggcccaagctgagcacttggacgtcattctagcacacattcctcggcatagctcggcgtctcggtctgcttctcgtacttgactgcaacttagcatcccatcattggcccacgtatcacgcgcgacacatctcatgtgcgcgagaacggacggggtgccgcgcatctttcacatgcatgaaacattgtacgggcaagaccgtgctatctttcctgaatgctcgatcaagcgatggacccgatagcgcc

SEQ ID NO: 536618 - DNA, 567 bp, Homo sapiens
ggctcactgcagcctccacatcctgggttcaagcattctcccgcctcggctcccgagtagctgggactacaggtgcaagccaccatgcccagctaattttttgtattttagtggagacggggtttcactgtgttgcccaggctggtctcgaactcctgaaactcctgagctcaggcggtctgcctgcttcgtcctcccaaagtgctgggattacaggcttgagctactgtgcctggcccagtaaagctatttttcaaacacaaaggaaggataaagacatttccagacacacaaaagttgagggaatacatcaatgccagacctgttttacaagaactgtgtattagtctgttctcatgctgctaataaagacatacccgacactggataatttataaaggaaggagatttaattggactcacagttccacatggctcaggaggccttacaatcatggcagaaggtgcacctgcaggcagcaaagtcatattttacatagcggcaggcaagacagcttgtgcagtggaaccttccatttataaaactatcagagacttattcatacc

SEQ ID NO: 536619 - DNA, 397 bp, Homo sapiens
  misc_feature (143)..(143): n is a, c, g, or t
cgagcgatccgacacatagaatgacaacatagaatgcaggagtaatgaataacacgtgaagcaatttagaaaagcatgttaccgtaacagactagcaagccacacttcctcaggcctcgtattcatgagcccacttaacaggnagccacatttacacatacacaaaacatatgcagtcagtatgcacaatacaaccactagatagggtacccacaaatagaaagaacaatttccacatcgcctgggaacaggtctggtttatgccttttgatctgttgtaattaatagcatcccctttctctctcaatagtcccaatttgggcaacgaattatatggtgattcttctacctcaaacaaacatggtttatgataaagacatgatagtaaatgccaaca

SEQ ID NO: 536620 - DNA, 912 bp, Homo sapiens
tcattttgattaacaggactagcttatcatgagagccctcaggggaaagggtttaagaaaaacaactcctctttcccatagtcagagttgaatttttcaggcgtgcctgacaaattcaactctgactatgggaaagaggagttgaatttgtcaggcacgcctgaaatgtgctcatagccaaaacattttactctctcctcctagaatgctgcccttgacatttcccattgctgtatgttatttcttgctctgtgatcttttgccctcttagaatgtccctctcttgggacttgcttagatgatgggatatgaatattattagacagtaattttgctttccatccagtactgctagttcttattcgagaactatggtcagagcgtacttcgcgatatcagtatcctttgcttatctttgtagtactgccaaattccgccgaagtacactggctgtgcagaatgctaatagaagcttctcttattcttcgtcttcttacgatcagtactctcctaccagtattctctctacaatgatccctcttgttcgtaacagttccacaagaaatatctgactcactattcacacacaagcacttgcctgaatcatctgcctaactcaaatctcaacgggggtccttcccacgttaacgtaaccaaccataccctcgctaagctaaggacagaaagccattggttcccttaaacatatagacatattcccttctaatcaccccacgcagaaaccaccatgcaactattctagcctctcactcaattgctccaacacacgagctcacatgtctacaacgccgcagtcatcaattctctctacatctgacgctgtgccagaacacttgcaaagagtccccacaatcaccgatcgagacgacataggtcacatttcagtcccta

SEQ ID NO: 536621 - DNA, 295 bp, Homo sapiens
ggacctctacactggtcgagtcttgagtgtctgtacagtgatctgctgtgaatttagttcagctgaagacagtcttctcagatttcactgactgtgaagtgtgaaacacgggacgcatacttgatacttaggtgctgctgaactactttcgcaaaggcaaatgtgttaaaattcaaggccatctggaacgggggactatttccaaacttccttaggcagcacttttcagtgacttccccgcacgctgctttccctgccacgaagcgcttggtctgcttactaaagccacgtatcc

SEQ ID NO: 536622 - DNA, 283 bp, Homo sapiens
  misc_feature (49)..(49): n is a, c, g, or t
  misc_feature (91)..(91): n is a, c, g, or t
  misc_feature (204)..(204): n is a, c, g, or t
  misc_feature (208)..(208): n is a, c, g, or t
tccgagacatgtaccggtggccgccattcaccaaggccaagttgaccanctatccttatgtcaaggtgtacatgtaccagctcttccgcanttggcctacatccctcccagggcgtgtgtcaccgcgacatcaagccccagacctgctggtggactgacactgctgtcctcaagtctggattttggcagtgaaagagttggtcngggngccaatgtctcctacattgttctcgctactaccgggcccagagctcattttggagccatgattacactcatcacg

SEQ ID NO: 536623 - DNA, 206 bp, Homo sapiens
ctcccaggtatgatggattacaggtactcaccaccaggtcagctacttttgtatttttagtagagacagggtttcagcatgttggccaggctggtctctaactcctgacctcagatggtctgcccgcctccgcctcccaaagtgctgggattgcaggcgtgagccactgcgcccggccactttcacactttttacagtgagcggtg

SEQ ID NO: 536624 - DNA, 1040 bp, Homo sapiens
tacgagcccgtgctgatcgagatctggtggaggtgagatccttccttcgtgtgcttgaaagttggagcctgcccctcgtgcccataagcccttgtggggaactgaagaagtgtatattggagtgcccaagactagctggtgcgcataacacagcagagagcagcccagtgtcaatgctgtcgagcattgcacaaactgccatgtgtggtaagactaggaacggaggaatatgtccatctggcgtaggaagaaccagaagtattcgcgctctactttgtctactctgtgtgtcctggggagaatgaaccgcaacagtatctagtattgacttatgtataatagaaaatagggctcctcgcacaccgtccccccatcttctgtagtcctttgtattgtagcattgcctgtctgtcacatgcggagccccgtagccccttggcgagacgatagctgcttctagtggccccttttctctctgctacatggatgtttgatgcgcttggaggtcttttccgacctgcccttgcctggtgcctgctgtgtggatggtcggagagcgtctgctgtgcgatgcagcctacagtatcttgactggagaggcccatcgtttctcttggttcgaggccttgttcttgagcgcctgtacatgtgcttgggcactgtgtgggcctgtgcttctgaggtgtctcctggcctgatcgagggaccctccccgctatctggggggctctcagcgtgtacatacgcagcaaccaggaaaggcagttttatatttgaaagattaggaaagcctgggaataaatccaagttttaaatgatgttattccccctgtaatagccataggattttggaacgcagctgccggtggctgggacatcagggggcccggtcctgacccgggtcaactggattgggcttcccggtctctgggcccccgttgggggctgaggtttgggggaaagggcccgcaaaaacgtacccaaggccgggccgtttaaggtaggggcgtccccgaaaccgggggggacccccctattat

SEQ ID NO: 536625 - DNA, 123 bp, Homo sapiens
tccctttgcctcattgttctgtagttgcgtggccttctcttggctgttatgaagcaagtgggtgagtaaaactattttgacgtgggagcgttttcagataggagtttagtcttgttgggagct

SEQ ID NO: 536626 - DNA, 256 bp, Homo sapiens
aggccagctcacggagaccactgaggcagcctgcagatcggagccttcgcgctgcccttcaccgtggcccatgtggatcgccaaacccacatgtaatctggctctgaccggatggagctgctggcgcacctgctgggcagagaagtgcgctgggtgcgcacccaggcgcacttctgtacccttgcgtttccggcacaccaagctggcagctgtgatgagctggatggcgtagcgcagtgacgtctccagcccgatg

SEQ ID NO: 536627 - DNA, 949 bp, Homo sapiens
cccgcgctccaggtggtaagtgtgcgcaagcgttttgtgtccggttaaattaaaacgggggtatcaaaggaacccggggagctttgaattccggacttaaacatcctggggctccaactcactgaccagtcgtcagttttctttgagttaagattcacagcctttcttgtcttaaatcgggctgcaactagtaacgactgtgggcttcacctgtcacgcccatggacttgctgaggctgctcccagaccagcggtagaactgtaagttccaataaacctctttcgtaacagtcccagcgaaaatcactatttaagatactaggatggacttgtgactgttgaggagtacttacagtatcctacatttgactacattatttccaaagccaagtacttgccatccaaaggaacatatctgctatcatagagaccaaggagggaactgctttaaggttgccaaggtgaagcgacgctgagaggcttggtcctcgtgccagtaactctgaaatctctctctaattcctgctgtccaggcagcagaactgccatggtttccccaagtaggtagctgctttagcagttaaagcccaaagtgtcatgttcatgttgatcagaggtcgtctgaatttctgaagtggtgttttacgtattctggtgaactgattgcttaatccattgtacaatcccatccttgataacagtgtgctaataacgagaagaatccaccttatcaaagctgcagaagccagagccgtgccactaaattgagccaacgtccaagctcgatgtgccatgcaggaagtctctggccagctgtccctgtgaagaccccctcactcccccccagctgctgccttgcacactgaagcatctcagaactgtgcaaagccgtgtagtcatcaagaccagtaaatcccagggcttggttaagtgtatctgtgataacttg

SEQ ID NO: 536628 - DNA, 256 bp, Homo sapiens
cactgtcagtatacgagaagatgttagtctaccgaggccctagtggactaattaactgctagtggggggtaacagctcaacctgttcctgctccggcctccactattgcagatgcgagcatgagtaagagagaaggaggtaagagtcagaagcttgtgttgtttatgcggggaaacgccatatcgggggcaccgattattaggggaaacagtcagtagtcaaagccttcgattttgatggtttttactatgactaa

SEQ ID NO: 536629 - DNA, 968 bp, Homo sapiens
gttttttatttggttttttaaaccttcccttataagcatgcctgtgtaggggttgacagtgagggtaataatgactggtgggtggatggtaaattatggggctgtaaatttgtcagatctcaggtggtttaaatctctgtgacgcaggcttataatgcgtgaggagaaagtgttatcacaggtgttatgactataatagcatagccatttagtttctttcataataggggtgaatagaatgggtctccaaggtgggtgtgatagaggagtttcagttatagtattgtttgggggaatttatcataggatagtagtgggtgtgttgaagagcactatgtgaaagcagcaattatcttataaattcgaggcgtgggactgtgcttatattgaagcgccccataaccatatgtggtgtgtgttacaacaattatttcataaacactcatcaatctataacaagagggttatatatacttcactataagtgtgtctcccaaaagagaggcgtgggtacacactctatgtgggggcactctaaaaaccagtgtatacacaaagtatttaacgaaagggggggagaatgtatattcaaggaacgggagtttctctcgtgtgttgggacgccaacaaaatgtcattatacaagagcggattttggacaagcttataagagagaatatgatctataatctctatggtgggcacccaatcacgacgaggctattatactccaagcacagaagggacactccgtcagaagagaggatttagattgaatacgacgccccaatcaataggcccgattatattagaaattgtcgtgttatcccccacacactcataaagtattgtgtggcgcacattaacaatgataatagagccgggtgtgtgtatggatggccctccctttaaacataggccgtgtatgtcaccattcagaagggaataaacccactcagacaacgtgg

SEQ ID NO: 536630 - DNA, 1622 bp, Homo sapiens
  misc_feature (1412)..(1412): n is a, c, g, or t
  misc_feature (1622)..(1622): n is a, c, g, or t
ggagagagagagagaactagtctcgagtttttattttttttattttggaaataaataacaaaggatattttatttttattttatataaaacatgtgcagtttacaacaaatttttaaaaaaagtggaacaaaacttggggacaaggcaagtgtgggagtggaagacagagtgctctcctcagcccactcagcgaggaattaaagtgaagccggcgagcacaagcttgtgtgctccagggatcatccaaagggccctttgtgggacaatgtggatattgggcaaccacggtggtttgtgcttgtggcgccacacaacacctctctatactgtgtgcggtggcccctctcacagggatattccctgtagaagcatgtgtggtgtgagatctatggtgcgctaaaatgtctcttgagaatactaactgagtgggtaatcactctctctggtcacatctggtccacagaggatctatacaaaatactctctaaaagccacgtctaaagagaatcttcacacaggttatatggggtcgcccccagggaagtctattctctctggctcgggggatatattaaagtcacaccccagggatatatttaagagatatacacccaattatatcttttccacatttctggggggtccacatttctaaaagatctctcctatgtgtttctgggtgaccccatctgtgtgtttgtgggcgaaaagatatgcgacacagacaggggatatgcgaacatcttggggcgtcccctaaagaacacccttttggcaaccaaaattatcctgcgctggtgggtctcccaggtgtcaatttactaaattaggccacccattctggggtgggaccctctaaaaaaccctctggagccacgtgttcccagtcactctggggacactgggcgcccacgcgcgtacattacgacccaaaatctataagagggaaaaggctcattctaccccccaggtcctcagggggggggtctaaactaaagcacacaccacgtctacaaacagcgcggcgcaacgacagggggcctccgggagaggcatcccttagtgggggcaacacggcgcgtcaaccacccaagaaagtcacgcccaagcgactcctgcgacagggagacacaacacaccgcgcgtgacactcaccgtaggagggacactctgaagggtagtgggaggccccaacagcaggggcacaccgaggggccaccacttccacagaggcgcaacatgacatatcagcggcccgctgtccacacagcataaaggagcaccccccgtagatgaaccactcgttatgtgcgggctcaaagaagcattcacaacggtcacacgaggccaccaaattaagcgtaatagcaccaaataacaaccggtctcacgactaccagcatacaggggncagcgggaggcgccactccaccacgtgggtacgaggggtacctccgaagagaatgaatcaggcgccagaagagcacagccagcgaacgcaggcggagcaacacaatccctagaggagccatgaaaacagaaaatagttcacgactgtccttacgcccatcggtagctgcccagctctggacgtcacacaaatacctgcatggaagacaan

SEQ ID NO: 536631 - DNA, 884 bp, Homo sapiens
  misc_feature (523)..(523): n is a, c, g, or t
tcgcacgggatggggagacccgtgggtcgccccgagaattgcgccccgcagaggacaagcgaaaagtggggggcccgcccagaggacacccagatcgggggtagaatccccccccccgggtggggtcccacatagtaacaaaccgcgaatgtatgttcttcaaacagcggcccaagaaactgaattacgggcgttctccccgccgcagcgataatagagtgctcgtgggcgcgacccgtgacgacaatgtcgacgaagttcgccgtaggccccttcgctgaaaaaaagataaatgggacagagagcctaaagacggtggtggaatggacagcgattgttgacctccggtctaccagacgttggttgtcgcaccagaaggagcgctccgagtccaaatagtggggtaaagggaaagaatcgtggagaaattctttacaagaggggctgatcaagggaaccacagaagtgttgttttcccttccgggaactctgaccccaaaagccgtgctgtgtgggagttganaagagcattatgcctgttctctggtgaagataatatgcgtccacatgtggctgtgtacgagcgcaaaagatgggttgccacgccgattagttgtcatgccagaaatcttttagttgtgtcttcgtgcgaaaaattgcgcacgctgcaatacattttggagtcctaaaaatgatcaagcggtgcctccttgaagcgctatgttagggacgaacacattgtggtttgtccgtccgacgcgtgtgtagtcgcactatcacaccccataagaagtagcggggcgcgaacatgtgcaatctcgccacaatgtcactccttcccaaaaaaccctgcggaacaaaaaatttctgaacaaacaaaaaca

SEQ ID NO: 536632 - DNA, 297 bp, Homo sapiens
ttcttcatccaaaaaagtttatttctcccacgtaattaaatattaggtgtgggtataaaaaagcgttataaattttttctttcgcgaaggcaggttcacagttttgtttaaataatattgctttctggatgtgaggtatagcaccagagctaggtgtttaatggttaatatgatgcacatcagtttaatgaatgtgttgagcagtttttcatgtgaatcctgtcttaaagggctcagttttccactgtgttatccattgatgtaacgctgtatttagttatgtttttatgaaataaa

SEQ ID NO: 536633 - DNA, 304 bp, Homo sapiens
gccacaggttgagtcataggggaacagtaggaaacaggatcagcacagaatccaacctagagctcaaagtttaaaacagaacggaggtggggaagagctggagcttccagggcgggccccctgagaagcaagcactcctctttaaacattcttgtggtcatgggtctacttctagcgatacaccagaaaaactatatgagtcacacccgccaagaaaaatgcacgtgatgctcacattaattctgcttttcacttctggggattcacaggtccctgaaagccaagccacagactggagattatg

SEQ ID NO: 536634 - DNA, 359 bp, Homo sapiens
gagagagagagatacaaaagaacagaaaggctaaaaccaacataaatttaaaaaacaattcaggatatgaatgaaaattttctaaattgatattttaaagaaaaaccaaccagaacttctggaagcgaaagacatatttagggaactacaacatgcagtggcaagctttaacaatagactagaccaagtaggaaaaagaatttcagaactcaaagacaagacttttgaatcagcccagtcagacaaaaattatgacagaagaattaaaagaaatgaacaaagtcatccggaaatagggaattatacaaaatggcccttaacaattataggtgttcctaagaggagaggagatttagact

SEQ ID NO: 536635 - DNA, 651 bp, Homo sapiens
cctttcatagagcgtatcaccttcatgtcacccctcataatcatggtcctatctgcttcctagtcctgtatgccctttcctgacactccgaccaacttactgatactacatctcagacgctcaggaatagaaaccctctgactatcctgccccccatcatcctagtcctcatcgccctcccatccctacgcatcctttacataacagacgaggtccacgatccctcccttacccatccaatccattggccccccatggtgactgaacctacgagtacaccgactacggcggactaatctttccactcctacatacttccccccttattcctagacccggcgacctgcgactccttgacgttgaccatcgagtagtactcccgattggagcccccccattcgtataataattacatcaccagacgtcttgcactcatgagctgtccccaccttaggcttaaaaacccgatgccattccccggacgtttaaacccaaccactttcaccctacacaccgggggtatactacggtcaatctctgaatcttggaccaaccacagtttcatcccatctcctagaattaattcccctaaaatctttgaaatagggccctatttaccctatagcaccccctctaccccctttagagcca

SEQ ID NO: 536636 - DNA, 296 bp, Homo sapiens
cagtgtgtctgggcccaccgacagcgcatacggaaaagtgattcctgactaagttattgtactggactgagtctccggggaatcgtaggggactttaccataacattgaatttaacagcagaaaatatgtatgagtttcaggcggtggtttggaatcttaactttatccccttctaacctattctcttttggtgatcttagcagctcagtcagaggggcagaccctgttgaaatataactccaggcatctaaccagaacgggggacaggttcccagcccaaactggtaacacatcc

SEQ ID NO: 536637 - DNA, 114 bp, Homo sapiens
atcccccgggctgtaggacttcggcacgagggagttttaaccctacgaattcagttacaaggttgaagttagtgagcagtctcctgttctgccctcttgcgcactcttgaactt

SEQ ID NO: 536638 - DNA, 326 bp, Homo sapiens
ttgtatcccctgataacggcacgacgggtgaacgcaagtaacaccccactaacggcagtgacttcgccagcggatgctcataatcactacgattaacatcgccccaggtcgtatggcctgctgccatcgcctgccaggcaatatccagcgaatggcgcgtaaagtcttcccaactgctattcccttctggcacccattttcccgcattcatcagtgagaataaggtttcatcccagcgagggttggcacgccggtaaattgcctgcggccattggcttgccagctggctgtccagctcactgaaaagcgttgagtagagatcatca

SEQ ID NO: 536639 - DNA, 321 bp, Homo sapiens
  misc_feature (282)..(282): n is a, c, g, or t
aataaggaagattaagataaatgaactagacatataactctagaatgtagaaaaagaacagtaaatgaatcttaaggaaatagaaggaaggaagaaataaagataagaaaaaaagaaagcaagaagaaaaaaatcacaatacaattgattagatacaagattatttagagaaaatttttttaggcaattctagatcaaacgaaaaaagacagagacaataacacaacattgaggaattatatattaaacgatataaacaggcaataggacaaaatataaganaaatacacagtcagcaattttataactactcaacattga

SEQ ID NO: 536640 - DNA, 240 bp, Homo sapiens
gatgtggacaaggcatcaacctcgcaagaaggcttgtcacaatgccttagtgctatgctcacacccccatggtaaacagcagtgattaacctttagcaataaacgaaagtttaactatgctatactaaccccagggttggtcaatttcgtgcctgccagcgcgctcacgcgattaacccaagtcaatagaagccggcgtaaagagtgttttagatcaccccctcccccggtacatgcaag

SEQ ID NO: 536641 - DNA, 130 bp, Homo sapiens
tgataagaggggctcaaacaggtagaagacgtccaggtgctggttgaatgagctggccacgaaggaggagccactgcgcgtggtgcgcaggatagaggatgtgggtcttgcgaggagaggttgtagggcg

SEQ ID NO: 536642 - DNA, 244 bp, Homo sapiens
ggatgcctcgagtcgacttctgctctccagcagctcacaaggacttctccgcgctggagtccagctgcaggacactcaggagctgctgagggaggagaaaccgggagaagctgaacctgaggaacaaagctcaaggcaggtgggaggacgagaaagaaatcccttccggggagcaagctggagggagggaggagtgagtgcccattgcgctttcagacattcttgggggccactgtacattcca

SEQ ID NO: 536643 - DNA, 675 bp, Homo sapiens
ggagatgcgggctgatcatcgcagcagtcctggaccctgtacttcggacttggagaagaaacgccgaggaggaacgggagttagtggggttagcagtcttgcgcgcgctggtgagccggccaaccctggtctccaggacttcacttcccaggatggcctctgcgcagctgactggaagtgctgcgacgcctataagaaggctaagcaggacccgtcggctctgctctggggcggcattggcagcacggcttgtaggcattcagggcatgtgtcttctgcatctactaggaacctcgggagcggtagctccggcgcctggtagcgagaggcgaggttcctggagatcccgggctcactttcgtcccactgtggttaggggtgagtcctgcaaatgtcaagtgatttggctcaagggtgcccatattcgcaggaattggagcccaggccagttctctgagcctatcattagcggctaaacggagtgcgtgatcagaatggtgtctggacggttctacctgtcctgcctgctgctggggtccctgggcatctatgtgcatcctcttcactatctactggatgccagtactggcgtggtggcctttgcctggaatggcagcatctacatgtccaacctggcacccagtgcttatggttgctggcataggtggtatccta

SEQ ID NO: 536644 - DNA, 250 bp, Homo sapiens
  misc_feature (6)..(6): n is a, c, g, or t
  misc_feature (64)..(65): n is a, c, g, or t
  misc_feature (190)..(191): n is a, c, g, or t
gacgangagaaggggagagagaaggctaacgggagtcgtttctagggtgacacttccaattagnngggggagtttgtggcctgcagtaatgtccccggttaggcgtacggccagagatattgattggatgagtaggctgatggtttcgataataactagtatggggataaggggtgtaggtgtgcctagnnggaagaagtgggctagggcatttttaatcttagagcgaaagcctataatcactgcgccc

SEQ ID NO: 536645 - DNA, 176 bp, Homo sapiens
tgcatatgcagtggatggtcgtgcggaactgctccagtttctgcatcagaggataagcagactaagcatgagccaatattgaaggccgaattcctaccgtacaatggattgattcaccgcatgactgtgtgcgtgaagctggaagctgaaggcaaaggtgtcgtggtggtcattaa

SEQ ID NO: 536646 - DNA, 723 bp, Homo sapiens
tgcggcgcacatttacaggaaaacatagctcctttgcatgctccttgagttcctctgctgcttctccccccagtgttcgtgttgttattgagagagtgacaaggactgccaaaaatggggattgccacagaatctggcctgctgccattaacggcattaaagcactcttactgtccaagagataggctgtgggtaaatagtgtagtgcctataaaacattttcccccaaatcttttaacttaaaaagttagtactggggacaaaattgacacagatagctcagaggttccccagtggcactcaagcatgtgttggtgtggcattgcctgcaaaacaccttcacattcctatggagttctttgtgggcctctctctttgaaagatgtctgtagagatgagcttggccagtgctcagtaactgtactagccagtttggggatgtgctagttcaagctagtccctttcccactagattaagctgcatagaattatgatagagtggtttggccagcactgggatacgtcacattgtaaataagtgaaaatattcataatattgtgttctgttttatgtgctaaagtgtgaactgccatcctctccttcaaaagcaatgtgagaaatgggaagctgtattgcattgtcatggaataagtttcacagagattgcgttttgcatgtggaattataacctagatacagaataaacctgagtctctggtcca

SEQ ID NO: 536647 - DNA, 1321 bp, Homo sapiens
  misc_feature (785)..(785): n is a, c, g, or t
ggaacgaatggtacatacagcatcatcgtagagacattggcagagcactagtcgtggagcactggcgcataccttatgcagtgattattcagagagccaaatatagggcatgagactcaatcacaagatgaagtaggacatgaacgactagagatagcaagagcttgctagacatagtcatatacccagatggaaagacgtagagtagacgcgccgactggcttgtatattgcagctgttgaacatggtcatgaagagggtgaacgttaacctgtacaagactcatagtctatgtgatctgttgtagccacgacatctgtctccacgctaggtactgtttggacgacatatgtgatgctacacgaagagcgactcttagcatttaaagggttcgtactggttggccagcgcgttgattagttccatttctcactagaacctggactttttccaatggaatggtgaataaggcccgttagaagatcagcgcgttcgacaggtgttgggttccaaaagggcgctggttgggatggcgcaccattccaaggcaatggagtgcgtacgcgccctatggagactaggtgtatcgcactcgcggaatggacaatcctctttcaaggtcaagaagctacataaagaacctaggcggtctaaagggggctagacctctatcgagaatagaagaaacgccctttgtttccctcgttagacaccaacgagccatagggatcgaatttgattccaataggatataggactcttggcggtcgggattgaggtacaanacgtaaaccacaagcttcggatgtatcggtatcccaccaagggcaaaaagccggaaagcgtgggcaggggggccactccgaaaagcgatattcgaggaaggcgaatatcgaagtgtgtaagtatggcccttggacagcgagaacccgaggtgcctccgagaagaggttctgcgcaaacgaaacgagggtcctctagagtaggcgatataaaggcatgttttcggtgcatgtaggcggatctcccccacaggggtaccctagttgcgttccaagtccaagttggacgaaacgcagttggagacccaccttttaagctttaagaccccataaaggagaacccaaagagattcacttggtttgcgcgacaacaagcaagacattggcacaaggcggaataagaggcaccactggaagaaggaaagtgtcaacataacattcgtgactcttctcccaaatgggctctttgggagaacaccaaaggcggagcgaaaaaatagtgcagtggtacgtggaaaacatcctttctccgtacccaa

SEQ ID NO: 536648 - DNA, 325 bp, Homo sapiens
cggtaccccaagggtcattaagccgatatagttattaacccattttttatcacatctgaagtgccagcaccgtttactgagatcacagatctttacatagtacttaactttttactcttttattttgagatggagtcttgctcgtgtggctcaggctggagcgcagtggtgcaatctcagctcactgcaaactctgcctcccgagtagttgaaattacaggtgcgtgccaccacatctggctaatttttgtatttttagtagagactgggtttcaccatgttggccaggctggtctcgaactcctgggcttaagggacccttggg

SEQ ID NO: 536649 - DNA, 298 bp, Homo sapiens
gacgcacgcaaactatggcacacactacctacccagccactctctgttcttcattcactagttaacagacatacatttatcacaaaaaaacagttttttttaagacaagtcagggtttttatctttgtgggcctctgtgtagagttcacctctttacaccatggggttatatcaaatgacagactgaaggactcttagaaaggctgataggctaaaaagaaaccagacagaaggacttggatatgtatcttcctacctcaccaattgagaaacgggtatgggttttatttacatatcg

SEQ ID NO: 536650 - DNA, 472 bp, Homo sapiens
tttttttatttattcccaggtttgtcttgttttttttttcccaggcctctctccctctttttttgctttctttttttctttttttcggataaacatcccccaggtgaccattaaatactggaattttttaaggcttattcccaagcttcctttttttatgccactttcccccatgggtgactcatccatgcaaaaattgtaatccctccctatttcaagaggatttttccgttggtaaagggagcccaggtctcacaagaaaaatccagagccatgggcccattttccttcttgtgggctacactgggatataattgctatctgggtcgctgcctgggttagaggcatcctcattaatataataccaaaccaaacctcaggggttactcgggacatctttcactttctcacttagaaataggacccgccaggtttattccctaaatcaaataatccacctaaatcaaataat

SEQ ID NO: 536651 - DNA, 101 bp, Homo sapiens
tcctagtatcataccacaataccaatatagagatgtcaccagtcccggtcttccatgctcatgcaaaccaccctccatcccattcttctaacaatgcccta

SEQ ID NO: 536652 - DNA, 3137 bp, Homo sapiens
tgatgcctcccgtcagtacaaccggacgctgaacagaaacagatgaattgttatcttgatgccagaaatgcccataactgttgtatggtttgtggttccctcgacaacaaccctgatacggtgaacttaatgttttcagaatacccggatggatctgtatgtgctgactacacggccgatcacagacatcaggggtatacgggtcttttacatggcggaatgacgagtaccttgctggatgccgcaatgactcactgcttgtttatgcagggagtgcaggccctgacggctgaactgactgtcagattcatttcacccgtttgtaccggtgacaagctgatggtctgtgccagactgcttgggcaacgcaggggggtttaccagctcgaagcatggctggcaaagggacagcagaaagtggctcgtgccacggcgaaattcattgtcccgtcgcaggatattgctctggcgcatggctagtgtggcagacgccaggtgtaactggttattataaaaatatgaagcgtgttttgctcagaccggaaagaataatggcatatcgtatatcccacttaaacagtgtaagaggtagttatgagtaaacaaataattgatattggtattcctgaatcatcccgggtggagattgcagacggtctgtcccggcttcttgctgacacctataccctgtatataaaaacacattactatcactggaatgtaactggccccatgtttaacagcttacatttaatgtttgaaaatcaatacaatgagctggccactgctgttgatgatatcgctgaacgtatacgctcgctcggatgcttcgcgcccggcacatatcatgaattttcacgtttaacagcggttaatgaagacaaggatattccggcagcaaaaaacatgattgagaatcttgtccagggccaggagactgtggttaaaactgcgcgctccctgttccctgttgttaataatgcgaatgatgaagccacagcagatctgcttacacaacgtatccagttacatgagaaaactgcctggatgttgcgcagcctgcttgaataatgtaaaccggtggcagcagaaaaaacggtttgtcagccacaggccattgctgtcagtgcagtaccatccgtgctgccgtggctgttttttctgaccgtaatagtataaaaaccgataaatcaataagttaaacagtgaacgcgtgagcgataaatacagtccggacaggcattaccgatgggtatatccggaccactgtcgctttcccgttataatatcgcagataccggccaggctcttcacaacctgacagggttaatgctgcaatgataaaacggtttgcgtggaaagcaggatcacattattcgttgttatggcttcctttacctgtgcctgcctgcgggcagtagagatcatacaaggtatttaacaacgtcatgatacggttatcctcaatacggtaatataccattttacctgcccgtcgggtctcgacaagcttcaggcggcgcattacacccagttgctgagacagggtcggctgagtgataccgactgcagcttccagctcggccacattcgcttccccatggcttaactggcacatcaacagcaaccggtcgctgttagccagtccccgtaagacatctgctgcccccagggctgcatttttcatatcggtctgacgttttgtgtcttcattcatgggcattgctggtttctcacattctgtatttttatataatgttatttagtatactgatggtgccataattttgccaccgtgttcgccaggtctgcagcgtccagctggcctgggtaactaattatatctggcagacattttgccccgagtgaacagagaggatgtaatgaaaatagtgattgttggtggtgttgccggcggtgcgtccgctgcagccagagctcgccggttgtcagaagatgtcagtattgttgtgtttgaacggggaagcgatgtctctttcgccaactgtggattgccttatcatataggcggaaaaattccgttacggcagtcacttattcttaagactccggaggattttaaatcccgctttaacatagacgtccgtacctgccatgaagtgacgtcagtggatccggttaataaaacagtgacagttaaaaatttgacctcaggtgagatccataccgaagtatgggatcgtctactcctcagtaccggagccgcgccggttgtccctcctttgcccgggctacagcaagagggcgtctttacgctccgaaatcttactgacatggatgctatcctggcgtggattgagcaacataacgtcgctcacaccacgcttgtcggggggggattcatcggacttgaagtgatggaggctctgagcgaacgggggatccgtgttaccctgctggagatggaggaacaggttatggctccggttgatcctgaaatggcatcagccctgcatcaggaaatccggaatcatggcgtggatctgcgtctcagaacggcactcaccgaggtgctgcggacagaaacgggattccgcgttgcactgtctgacggtggctttgtgcagaccgacatggttattctcgccatcggggtaaaacctgagaacagccttgccacagtagccgggctcgaagtgggtaaacggggaggtataagcgtcaatgcctgtatgcagaccagtattcctgacatctacgccgtgggggatgcagttgaaacacctgaccttgtctttcaggaacccgctaatattcctctggctgggcccgccaaccgccagggacgcattgctgctgataacatgcttgatcaccacagcctttaccatggcagtcaggggacatccatttgtaaggtattttcgctgagtattggcagcgtcggtgcgaatgaaaagcaactgaaagcccatggtacccgatacgagaaggtttacgtccatgctgctgatcatgccggttactaccctggggctacgatgatcagtctgaaactgctgttcagccccgataccggtaaaattctgggggcccaggcgtcagggaaaaaaggggttgataaacgcatcgatgttctgtctgtcgcgcagcgcgcgggacttaccgtcaacgat

SEQ ID NO: 536653 - DNA, 664 bp, Homo sapiens
  misc_feature (10)..(10): n is a, c, g, or t
  misc_feature (79)..(79): n is a, c, g, or t
  misc_feature (87)..(87): n is a, c, g, or t
  misc_feature (121)..(121): n is a, c, g, or t
  misc_feature (124)..(124): n is a, c, g, or t
  misc_feature (133)..(133): n is a, c, g, or t
  misc_feature (142)..(142): n is a, c, g, or t
  misc_feature (152)..(152): n is a, c, g, or t
  misc_feature (159)..(159): n is a, c, g, or t
  misc_feature (168)..(169): n is a, c, g, or t
  misc_feature (178)..(178): n is a, c, g, or t
  misc_feature (201)..(201): n is a, c, g, or t
  misc_feature (222)..(222): n is a, c, g, or t
  misc_feature (224)..(224): n is a, c, g, or t
  misc_feature (238)..(238): n is a, c, g, or t
  misc_feature (242)..(242): n is a, c, g, or t
  misc_feature (244)..(244): n is a, c, g, or t
  misc_feature (246)..(246): n is a, c, g, or t
  misc_feature (249)..(249): n is a, c, g, or t
  misc_feature (253)..(253): n is a, c, g, or t
  misc_feature (260)..(260): n is a, c, g, or t
  misc_feature (271)..(271): n is a, c, g, or t
  misc_feature (274)..(274): n is a, c, g, or t
  misc_feature (278)..(278): n is a, c, g, or t
  misc_feature (284)..(284): n is a, c, g, or t
  misc_feature (308)..(308): n is a, c, g, or t
  misc_feature (316)..(318): n is a, c, g, or t
  misc_feature (328)..(328): n is a, c, g, or t
  misc_feature (345)..(345): n is a, c, g, or t
  misc_feature (348)..(349): n is a, c, g, or t
  misc_feature (357)..(357): n is a, c, g, or t
  misc_feature (359)..(359): n is a, c, g, or t
  misc_feature (366)..(366): n is a, c, g, or t
  misc_feature (373)..(374): n is a, c, g, or t
  misc_feature (382)..(383): n is a, c, g, or t
  misc_feature (388)..(388): n is a, c, g, or t
  misc_feature (393)..(393): n is a, c, g, or t
  misc_feature (471)..(471): n is a, c, g, or t
  misc_feature (476)..(476): n is a, c, g, or t
  misc_feature (478)..(478): n is a, c, g, or t
  misc_feature (513)..(513): n is a, c, g, or t
  misc_feature (521)..(522): n is a, c, g, or t
  misc_feature (543)..(543): n is a, c, g, or t
  misc_feature (569)..(569): n is a, c, g, or t
  misc_feature (574)..(574): n is a, c, g, or t
  misc_feature (578)..(578): n is a, c, g, or t
  misc_feature (637)..(637): n is a, c, g, or t
cacattaggnaaagcaaaaaacccagataagtgtacataatgataaaatctaaagtgatgagaaaacataaaatatttncatttggncctgtcacctaacaaaactatcgataaatatganaanatagtaatnactaaagcnggttaaaggnacatganaacataatnnctttatacncatccagttattttatacaaggnactgctatcccttaaatgggngngtgaacgacttgtntaananantanccgngcactangtacctacaanganaccncttccnccaaagactcaaacagattaacantgcaaaannntacttctgtngcactgacttctgacanccnncctaattnangcatatnccagtcnnatataatnnattcnggttncaacaacagtaatacaaagtcgacaattttccgccaggaagaccattcacttcatagctgcaaaaacacactgtagcntttcngnaagggtctgccaggcttgcagcgtgagccgggtgnttaaccanncacttcaaatttacatcgatncacgccaggcacggtggcgtgggccngttgncccnactacttcgaaggctgaggcagggggatcactctgatcccaggagtgcaaagacagccngggcaacaaagaagaacctgtctctta

SEQ ID NO: 536654 - DNA, 111 bp, Homo sapiens
tcaacataggcatagccccctttcacttctgagtcccagaggttacccaaggtacccctctgacatccggcctgcttctactcacatgacaaaaactagcccctagaggtg

SEQ ID NO: 536655 - DNA, 898 bp, Homo sapiens
gcaccacaccacaaaatcacacaaaacacccttcagtaactgaagtatggaatacatagcccacgctcttgatcggatgtttctgcggacttttcttttcgtttcaattgtgggatctcttgggctttttgttcctgttatttataaatgggcacatatattaataccagatcatattggaaatgcaaataactgaagcctcccaagggactgatagatacatttaattaacacacatatatctgatggcacctataaaattatgaaaatgtaagtcaatgtgttaaatttacctgcaagctttatcaagactaacctgctaacctctacccatgctaacaaattatccatttcgaacagtttggatgtattaactcgactcaacaacctgatcaagatacatttgatcttcgtccataataacacaaccgtccctccgacctgacactacacaaaattctgatctctccgttctcacgtttatacgactcacttatgagtccacaactactttcatcccttttacctaccaaaaacaacacaaacacaaatatacacacaaacccataaactcatccacataactaatcatacataacaaaacatcaacgcctcccatcgcctcacgctatatcttagctctctctcctcgccaaacaccactaaatccacaccctctacatacttctacaccctatcacaccccaattctcccccacatctcattacttataaaatccatcataactaaccttcaatcccccaatcactaaaacccctccaacctattcattattcactacaattaatcaactactaatattttacacggcctccaccaccaacctaatatacacctccttctcgccttcatcgctcttacacctccaaatcttat

SEQ ID NO: 536656 - DNA, 436 bp, Homo sapiens
gtcgattaaaacatccattctgtgagctcagcggtgaccttgggttatggttagcggtcattcacagctctgagtgccaggcgttaaactgtctcctcacctcccatggtctggttccactgacttggtatgaatagtagatataatctgtagagacccaaagtgcttggcagtgacccctgtcatagctcttccctgtcttgaaaaacggagctgatcattccagggcccattctagctcactcaaggaagcgtcacttttccagaacattccttatttcctacaagagtacatgaagctcatttcacacagtctagacacactcaggtggagctcagcgacaggctggcatttgtctttaaaataaaaggaggtacccagatgactgaaagagaagtataaggcagaagctcaccaagaatgaaaggaggtggg

SEQ ID NO: 536657 - DNA, 108 bp, Homo sapiens
aacgcaaaaaagaaaaccaaagggtcacaaaacattctcctttccttctgaaggttttacgcatgccatgttcattattcaacccagtcttttcactactcaaactta

SEQ ID NO: 536658 - DNA, 300 bp, Homo sapiens
aaaaaaaaaaaaaccaacaaaacacagactcacgccaccccgttggagcaggcactaggcgaggggctccatcggactcactagccgcactcacgaagcggcaccacctgcaggatcactttctggaaatagacaagaagaaccgctgagtgccccgagacgacttcattgccaaggcgtcgccgccggagccggggccggagcgcacctccgggctcctgggcaacggccttgccccgcggatctaccgcgcccacctcaagccctggaaatccagccggatcgtcccggccaacctgg

SEQ ID NO: 536659 - DNA, 128 bp, Homo sapiens
aagactcacacaggccagtgcagtggctcatgcctgtaaactcagcaactttgggaggccaaggcaggtggatcacctgaaggatgacaaggaggctagaaccttaaaaagcctgagtcaggctggtg

SEQ ID NO: 536660 - DNA, 376 bp, Homo sapiens
atgcagcagcttgacgattacaggtagttgtgatggacggccactctgcagggggatcaggccatttaatccggcagcattcgggtgtgcgtcccgctccagcagaagctctgccacccgcaccttcccgtacttggccgccacgtgcagagtgataaatcctttcttggtcatgcaggcctgggatgcttccttttccagaagggccaggactgtctccacatagccctcacgggctgcaatgtgcaggggggtgtgcccggcgttcgtggccaggttggggttggcgttcttttccagcaggagcttcaccatgtttgtgtggccgatgcgagctgcacagtgaagtggggtctggtcatccttggcctttgct

SEQ ID NO: 536661 - DNA, 197 bp, Homo sapiens
ctgaggatccctttcttgccacgactcgaagtactggcttcctggccgtggacctctgtgcgctatgagcggcttgccctgctgctctgctggaccggacgcggggagtgctggagaacatcttcggcgtgggctgagcagccttgtggccttcctgggctacctgctgctgctcaagggcttcttcacaggttcca

SEQ ID NO: 536662 - DNA, 588 bp, Homo sapiens
agtctcaagtgcgccatgattggaaaggaactgccgcagagagaagaaggtggtcatagaacagccacaggagatgacgaaaaacttcaggttctccttattagaagtcaggggtaaacaatatctctggtatctgaatgaggtgaatatgtttacaaaccaaggaacagtgatccactgtgacaaccctaaagttcaggctatctctggcatgcgaacactttcaccattacaggccatgctgagacacagcagctgagagaaatgctacccagtcatgttaaatcagcttggtgcggatagtctgactagttataagggagactgtgcctgtagcttttgcacaaaaaagatctgtgggatgggaaagcaccagttgctactggagaggatgatgatgatgcagttccagatcttgtggagaattttgatgaggcttccaagaatgaggcaaactgaattgagtcaattctgaagataaaacctgaagaagttaatgggagctgctattttatattatgactgctttttaagaaatttttgtttatggatctgataaaatctagatctctatatttttaagccagc

SEQ ID NO: 536663 - DNA, 81 bp, Homo sapiens
tttgttaaaatgaaaagtttattgctgagtcaccaaataggatgcaagcactgtcatgacaatatacagaatatgcagatc

SEQ ID NO: 536664 - DNA, 839 bp, Homo sapiens
cagtcatacttacctttgaggtttgatttaaagtttggataccactagctatattttgcatttagtcgccctcacattgaatcttttaattccatctcttgaatgtaagaaactttcagattctcataaaactacatgtcacatgtttttaatcctagaacatgttgctgtcagaaggcaaaggaaatgttaccagtgttttcggtatcgttgtacttttaacatattccattatagaaattatgccattctgtttaccattaataataggtgaaatacaggaaaactacattatgtgattcctcagtttgtaatgaccttttcagacatcaattgttaatcagattatttcaggttttcgtaaataattttgttgcctctttcaaaaggttaacaattaagcatacgttgcatgcagttggttgattggattttgatctgaggtacagcattaatactagtgcaaaagaatgtcataaactgagactaaaatgatgaactattttatgtagacattgaggagtggatcggaatacttctgctttctgggtaaaatttaaaagttgactatttcttatctggtaaatagattttaagccaattctagtcaagcaaattacataaaactaccttatttgtatttcacttacaggtggaggagcttaactaaaggaccatatctaattcattcatttgtaagtatcataaggggaaagtaagaaaaaggtgagggtatagtctaaatgggtgcatattagggagatattggcagtgatataacaaacatggcagccctttgggaatttcgtgtcgtaatggattagtttggctaacgatgg

SEQ ID NO: 536665 - DNA, 1047 bp, Homo sapiens
agattgtggataaatctggtgtggtgagggttcgaggtggacaggtgataatgacaagaagaaccccaggtaggagggaatggttcccttcattctagtggcacccgagagaacatcagcaatgcccaggcttgtgctggtacgtatcactctcctacctgtcaggagcgtacagcagcttcgcttggagaaggctacaaattgatgagcatcgttctgtgcagattgtggctcgcgtgctttcaccctcctcgggaataggactggggcaagcgggtggtcaagcggacgaaggctgggatatacgcacatgatgatgaggctcgctcctccgtccctccatgcgactcgaacttctatggggggcagctatggggggccggtgcgtccgtaggcctgtagggacatggcggtccttgcctatggatccccagctcaatatagtgtctacaggcttcagaagactgagtcagataggatatgatgagcccagaacagaatcgtgagtcgtggcatacagggaatctcctcaaacacaggaaggggaagaatagcccggagtgcaggccgattggcgtggcctggggtagggggaccgcaaactgaccccccgtggtccatcttcgagatacaattcttcgatctagttagctcagtgctcggagggttcagtaagtatcattccttacatgctattggacacgtactgaacagagcctccgggtgatctcagaacctggtgaagcctcgcctagacatgtgccaggtgccggtcgatccgcagcgcggctgattgaagacggaccgatgtctggagggctgaataatggccacgtgaaagatggcggaaatgatctactgagtgagattcgagcgcgcgcgaacgggatcggatgtgccattaggacacgcaccgatggggggaatacaaagaagtaaaccaaggccggagcaaccaaacttatggaaagaaacacagggcaaaaaggaaaggcttaaagcaagataaagggcacaaaagtgtgagcggaacaaatttgcgaaaac

SEQ ID NO: 536666 - DNA, 305 bp, Homo sapiens
ggcaagacggaaacgacaaaggacctggggtaaggccttagccatacagacagttgtgttcaactgttctgacctgctcgacttcatggccatgggaaagttcttcaagggtctggccagcgcgggggcctgggcctgctttgatgagtttaatcggatcgacattgaggtgctatcggtggtggcacagcagatcactaccatccagaaggcacagcaacagagggtggaacgcttcatgtttgagggtgttgaaatcccccttgtaccatcctacgctgtatttattactatgaatcctggga

SEQ ID NO: 536667 - DNA, 642 bp, Homo sapiens
tactccccggaacttttcatgggggggccccgctgggacaccaaggcgggaaccttttttgaagcccgttctcagggagctgccatcccctatcccggtcatctttgcaaaagccacccccgtggacagacaagaaaccaaacagacctacgagtgccctgtgtatagaaccaaactgagaggccccagctacatctggaccttcaggctgaagagcgaagagaagactgcaacctctcgtcccggcttcaagaaatcctcctgcctccgcctcccgagtagcttggattacaggtgcccgccaccacgcccggctaatttttgtattttgaggagagatggggtttcaccgtgtcggtcaggctggtcttgaactcctgacctcaggtccacccgcctcggcctcccaaagtgctgggattacaggtatgagccaccgtgcctggccaagagagataaattctttgagaaggacaataaaggacgcctgggacacatccccaaaaaccccctaaggcacgaggagaagatgaatggattttctctaagagaataatggactggtggaccagggattagccttccaggagcaatttttttaggttatggtaattgcttgtaagataaatatgtaagaaaaat

SEQ ID NO: 536668 - DNA, 413 bp, Homo sapiens
ctagaggacccgcgtggttcttgcagactgccacctcagccttaggaaaggctaagggccaagcctcaaggcctgggaaatctacttctctgggattgacttctctttgtctaattctctccacattaaggcttaacggggccatttctctccatttaaaccaccaaagtatactcctcagctgtcccattgctcttgggatcagaaccaagattcttaacttctttttgtaacctgtaagggcatcattcagctctcacctttcagagattgccctgcttcccatctggttccgtgtgtgtgtgtgtgtgtgtgtgtgtgtgtgcgtgtgtgtgtgtgtgtgtgtgtgtctatagattaacaccctctgaggccatgagctgcacattcaagttctctgcaaggaacccacg

SEQ ID NO: 536669 - DNA, 345 bp, Homo sapiens
tttcttcagttgatcatgcggccagaagcagtctcatttcacctgaatatgatacacctactatatacatatctgtcagggctctcgcgtgcctgtcgttcccgatagaggttgtatgtgctgactatgtagttgacaatgcctatagtctgcgactgcttgatcccatcattctctcccactggcataatttatggatctctattccaattattgtactgctacagacagaagcctccaggtgcgttccattctactccgtgagttgtagtaatcgatcgtaggcatctttagcatgatagcagtatcatgatggtttctgatagctatgttagacgatgtcac

SEQ ID NO: 536670 - DNA, 792 bp, Homo sapiens
gttttacagaaaaatccccaaaatgggccaggcatggtggctcaagcccataatcccaacacattgggtggctgaggtaagaggattgcttgagcccaggaggtcgagaccagcctggacaacacgtgagactccatttctacaaaaaatttaaaaactagccaggcgtggtggcatgcctgtggttctagctactcaggaggctgaggcaggaggatcgcttgagcccaggaggtggaggctgcagtgagctctgatagttccactttactccagcctggaagagcaagaccttgtcacccaaaaaaataaataaataaaaataaacaagtatgcacagaacccaagagaaaacacaaagacacacaaccaacaacgaagacaacaatgggaggcggcgcgcgccgcgggccctaggagaagagggggaacacaccaagtggaagagggcccgccggggccacaagagagagagcgcagcaaacgggggcaaacagggcggggcaccaacgaaagaggagacgacggggagacacaacgacaacagacgggccgcacacgagactcacccaaccagcagaaagagcaagaaaagaagccaccacccgggcaggtgaacacagcccagaaagcgtgccatgcaacgacgacaccaagcaccgagcgaagaggagcactacagaaaagggccaagaacaacaacaacaggacacagacaaaaaaacagacggagaggaggtgaccagacgcgcagaaagacagaacacagaccagagcaaagaaaagcacccg

SEQ ID NO: 536671 - DNA, 146 bp, Homo sapiens
ctattttttacttttttaaacgttcttctgtagttgctctctctttttttaaaaataaatagaaatgaggtgtcactacattgcctcaggcggtcttgaactcataggctcaagtgatcctcctgccttggccttgccatatgcaa

SEQ ID NO: 536672 - DNA, 150 bp, Homo sapiens
gccgaatggcagcctccagaaagccaccgcgagtaagggtgaatcaccaggattttcaactgagaaatttaaggataattgaaccctaacgaagggtgacaaaattaagagacacaaggtgttggaacagacggcagaattcctccaagg

SEQ ID NO: 536673 - DNA, 645 bp, Homo sapiens
agcggataacagagactaaagaagaaagacgcttactgaataaggtgggatccaacaagagtgtagtatggaatgcaatagctttatggaaattacttttttctgagggagctcaacagaagacactaagaaagggaaagtcttgacactggtacgttgtgatttggtcatactgaaaataataagttgaaatcactactctagaaggaagaaaggatgactctatcagctatctcagcgtgtaggcagaatcgaagagaagatgacagaaacaaggtaggcaaatcccaaaacgatgtatagagaaaagaaacacatggcataccaaaatcatctagccccaaagctacccatcgtatggtaatacttcggaagcaaaggcagtactctgcaaagcctatgagtctattagagtatttctgagcttcagcaaagtggacaaagagaaagaggacaggaaatgatagtagttctccagaagaacatgtagaagagaaaaagagtcagtagtgaggaaagcgggtactgaagaaaagtcagctgatgtagagaagtggtatgaatgccgagagtgttcaggatgtgaaatccacaaaatacttcagtcaataagaaggacagatctcagggagaccagcgtacagg

SEQ ID NO: 536674 - DNA, 436 bp, Homo sapiens
tagacctggctgaagtaagtaatatcaacacagacacacacacacacatacaacacacacacatactacacacacatacacacacaaaacgatagatctatagggctgagtgcagtggccagggaggccgaggccgacagattgcttgaggccacgagtcagataccaacctgcgacatatgtcaacccccatctctccacaaaaattacaaaaattagctacatggtggtgcatgcctgtagtagcagctactcagaaggctgagctcgagaggataacttgcccccagtgaaggcggaggttgcagtgagctgatatcgcaccactgcactctaccctggtgtgacagatcaagaccctgtctcaaaaaaacacaagaacccatagatagatagatagctagatcgatagatcgccagtgcttctaccatggac

SEQ ID NO: 536675 - DNA, 306 bp, Homo sapiens
  misc_feature (77)..(77): n is a, c, g, or t
  misc_feature (88)..(88): n is a, c, g, or t
  misc_feature (97)..(97): n is a, c, g, or t
  misc_feature (110)..(110): n is a, c, g, or t
gggaacccccccccccggtttttttccccccaaaaaaaacccgggggccgtccccccccccggttttttccttgggnggggggggggntactttttnccccggggacccnttttcccccttggccctttttgggggcccctttaaaccagttttttccaaaaaaaggggggggggcggggcgggttttcccgggtttttttccccccccgggcccggggggggggttttttttggggggccccccccccccttggggggcccggggggtttggccaaaaaaaaaaaatcttttttttcccctttta

SEQ ID NO: 536676 - DNA, 288 bp, Homo sapiens
  misc_feature (28)..(28): n is a, c, g, or t
  misc_feature (51)..(51): n is a, c, g, or t
  misc_feature (281)..(281): n is a, c, g, or t
ccctgttataaaggggcaaactccctcnggtccctatagcatcctttaccnactgatttttttttgtttaatttgaaaatgcaaagaattgttaaatgttccctaaatgttctcacctacaaaaaaagaaaaaagataactacgtgaggtgatggatatgttaattagctggattgtggtaatcattttggaatgtatatgtatatcaaaacatgtagtacaccctaaatatatataatttttatttgtcaaatatacctcaataaagatggaaaaaaatnttaaaaa

SEQ ID NO: 536677 - DNA, 158 bp, Homo sapiens
  misc_feature (99)..(99): n is a, c, g, or t
  misc_feature (150)..(150): n is a, c, g, or t
agggtggccagaggaaaatggaaaagaagcagggaggacagggagggagacacaagaggtttaaagagtcaagagccaaaaaaaaacccagcagaaggnaattcagcaatgaaaaaggcgttaaagacagaaggttgaaaataaagaaangaaaggga

SEQ ID NO: 536678 - DNA, 3180 bp, Homo sapiens
ggtggtggcggcggcgcaagggtgagggcggccccagaaccccaggtaggtagagcaagaagatggtgtttctgcccctcaaatggtcccttgcaatcatgtcatttctactttcctcactgttggctctcttaactgtgtccactccttcatggtgtcagagcactgaagcatctccaaaacgtagtgatgggacaccatttccttggaataaaatacgacttcctgagtacgtcatcccagttcattatgatctcttgatccatgcaaaccttaccacgctgaccttctggggaaccacgaaagtagaaatcacagccagtcagcccaccagcaccatcatcctgcatagtcaccacctgcagatatctagggccaccctcaggaagggagctggagagaggctatcggaagaacccctgcaggtcctggaacacccccctcaggagcaaattgcactgctggctcccgagcccctccttgtcgggctcccgtacacagttgtcattcactatgctggcaatctttcggagactttccacggattttacaaaagcacctacagaaccaaggaaggggaactgaggatactagcatcaacacaatttgaacccactgcagctagaatggcctttccctgctttgatgaacctgccttcaaagcaagtttctcaatcaaaattagaagagagccaaggcacctagccatctccaatatgccattggtgaaatctgtgactgttgctgaaggactcatagaagaccattttgatgtcactgtgaagatgagcacctatctggtggccttcatcatttcagattttgagtctgtcagcaagataaccaagagtggagtcaaggtttctgtttatgctgtgccagacaagataaatcaagcagattatgcactggatgctgcggtgactcttctagaattttatgaggattatttcagcataccgtatcccctacccaaacaagatcttgctgctattcccgactttcagtctggtgctatggaaaactggggactgacaacatatagagaatctgctctgttgtttgatgcagaaaagtcttctgcatcaagtaagcttggcatcacaatgactgtggcccatgaactggcccaccagtggtttgggaacctggtcactatggaatggtggaatgatctttggctaaatgaaggatttgccaaatttatggagtttgtgtctgtcagtgtgacccatcctgaactgaaagttggagattatttctttggcaaatgttttgacgcaatggaggtagatgctttaaattcctcacatcctgtgtctacacctgtggaaaatcctgctcagatccgggagatgtttgatgatgtttcttatgataagggagcttgtattctgaatatgctaagggagtatcttagtgctgacgcatttaaaagtggtattgtacagtatctccagaagcatagctataaaaatacaaaaaacgaggacctgtgggatagtatggcaagtatttgccctacagatggtgtaaaagggatggatggcttttgctctagaagtcaacattcatcttcatcctcacattggcatcaggaaggggtggatgtgaaaaccatgatgaacacttggacactgcagaagggttttcccctaataaccatcacagtgagggggaggaatgtacacatgaagcaagagcactacatgaagggctctgacggcgccccggacactgggtacctgtggcatgttccattgacattcatcaccagcaaatccgacatggtccatcgatttttgctaaaaacaaaaacagatgtgctcatcctcccagaagaggtggaatggatcaaatttaatgtgggcatgaatggctattacattgtgcattacgaggatgatggatgggactctttgactggccttttaaaaggaacacacacagcagtcagcagtaatgatcgggcgagtctcattaacaatgcatttcagctcgtcagcattgggaagctgtccattgaaaaggccttggatttatccctgtacttgaaacatgaaactgaaattatgcccgtgtttcaaggtttgaatgagctgattcctatgtataagttaatggagaaaagagatatgaatgaagtggaaactcaattcaaggccttcctcatcaggctgctaagggacctcattgataagcagacatggacagacgagggctcagtctcagagcgaatgctgcggagtcaactactactcctcgcctgtgtgcacaactatcagccgtgcgtacagagggcagaaggctatttcagaaagtggaaggaatccaatggaaacttgagcctgcctgtcgacgtgaccttggcagtgtttgctgtgggggcccagagcacagaaggctgggattttctttatagtaaatatcagttttctttgtccagtactgagaaaagccaaattgaatttgccctctgcagaacccaaaataaggaaaagcttcaatggctactagatgaaagctttaagggagataaaataaaaactcaggagtttccacaaattcttacactcattggcaggaacccagtaggatacccactggcctggcaatttctgaggaaaaactggaacaaacttgtacaaaagtttgaacttggctcatcttccatagcccacatggtaatgggtacaacaaatcaattctccacaagaacacggcttgaagaggtaaaaggattcttcagctctttgaaagaaaatggttctcagctccgttgtgtccaacagacaattgaaaccattgaagaaaacatcggttggatggataagaattttgataaaatcagagtgtggctgcaaagtgaaaagcttgaacgtatgtaaaaattcctcccttgcccggttcctgttatctctaatcaccaacattttgttgagtgtattttcaaactagagatggctgttttggctccaactggagatacttttttcccttcaactcattttttgactatccctgtgaaaagaatagctgttagtttttcatgaatgggctttttcatgaatgggctatcgctaccatgtgttttgttcatcacaggtgttgccctgcaacgtaaacccaagtgttgggttccctgccacagaagaataaagtaccttattcttctcaaaa

SEQ ID NO: 536679 - DNA, 144 bp, Homo sapiens
tcaagcttctaacgatgtacggggacatgctggcccttgatgcttttttttattattatcatttttaagacggagtcttgctctgttgcccaggctggagtgcagtagcatgagttgtaaatataaaagttgtgtaccacgata

SEQ ID NO: 536680 - DNA, 633 bp, Homo sapiens
ccaaaattctttaccacctccaaggggcagggaacccccagttgggaataccccccgggccctggcaatttctgaggaaaaactggaacaaacttgtacaaaagtttgaacttggctcatcttccatagcccacatggtaatgggtacaacaaatcaattctccacaagaacacggcttgaagaggtaaaaggattcttcagctctttgaaagaaaatggttctcagctccgttgtgtccaacagacaattgaaaccattgaagaaaacatcggttggatggataagaattttgataaaatcagagtgtggctgcaaagtgaaaagcttgaacgtatgtaaaaattcctcccttgcccggttcctgttatctctaatcaccaacattttgttgagtgtattttcaaactagagatggctgttttggctccaactggagatacttttttcccttcaactcattttttgactatccctgtgaaaagaatagctgttagtttttcatgaatgggctttttcatgaatgggctatcgctaccatgtgttttgttcatcacaggtgttgccctgcaacgtaaacccaagtgttgggttccctgccacagaagaataaagtaccttattcttctcaaaa

SEQ ID NO: 536681 - DNA, 197 bp, Homo sapiens
gatgaacatttaactatttaaagcttattgttcagtagtgttaggtatattcacattgggaccaggtgcagtggtcatacttgtaaccccagcactttggcgagactgagcgtgggagcgcgtattacgttgagcctacggagttcgatgaccacgcctggagcagtcgctactacagatcactgtcgtctataaga

SEQ ID NO: 536682 - DNA, 336 bp, Homo sapiens
gcagctcgaaatactcctcttcttatcctttaaatataggtgtgtcttggcaggtgtggtggctcacgcctgtaataccagcactttgtgaggctgaggcgggcagatcacctgaggtcatgagttctgggtcatgctggccaacatagtgaaaccccacttctactaaaaatacaaaaattagccaggcatggtggcaggcgcctgtagtcccagctagttgggaggctgaggcaggagagtcggttggaacctgggaggcggagtttgcagtgagctgattatcccgccattgcattcccacctgggggaccagaagcaagacttggccttttt

SEQ ID NO: 536683 - DNA, 194 bp, Homo sapiens
ggactgtcgtggtctgtggatgtggaggttgtgctgaggcaggagaaattgcttgacctgggaggctgaggttgcagtgagctgagatcgtaccactgcacttcagcctgggtgacagagtgagactccatctaaaaaataaattaaaaaaaaaagatagatggaacctgggtccttatcaccacgacacagtg

SEQ ID NO: 536684 - DNA, 404 bp, Homo sapiens
  misc_feature (105)..(105): n is a, c, g, or t
  misc_feature (115)..(115): n is a, c, g, or t
  misc_feature (123)..(123): n is a, c, g, or t
  misc_feature (133)..(133): n is a, c, g, or t
  misc_feature (161)..(161): n is a, c, g, or t
  misc_feature (164)..(164): n is a, c, g, or t
  misc_feature (286)..(286): n is a, c, g, or t
aagtcctattcttaaacacattggtattatttgtattaggaggatcaatcattgaggtttcttatagtttaatagaacctaactgaaatcaaataatttaagtantggttattanaattttantgggttttanttttaccctcttacaagcctaagagtanttngagtctcccttcaccatttccgagggcatttaggggtcaacattttttgtagccacaggtttccacgggatttaaggtcattattgggtcaactttcctcactatttgcttcatccgccaantaatatttcactttacatccaaacaccactttggctttgaagcccccccctgatactggcattttgtaaatgtggtttgactatttctgtatgtccccatctattgatgagggtttta

SEQ ID NO: 536685 - DNA, 1171 bp, Homo sapiens
gttctaactgggcgtgtgcttctgggtcttggccgttctagtgtgcgtttcaccggcgtgttgggcctctaagcctattcctgtgcgtccagacgtgttccctgtatccaacttgtgtcttcggcctaattgccgggatgctcgcttaaggtatgtacggcgttgcaatgtttgcttggacccttggagtatccgtttggaaggttcatcctcgtctgtgcttcttaagtatgctttggggcaaactggagaaacctcctcaatgggaggacttgtgccttacccatggacctatgggcactcatgtggtcctggacaatcagacttcttgttttggggagacgttccgccaaggatcgaatcatcaatgttagttgttggcacgcttaacatccttatgtgattctagtaatcgctgataatgtgcttcttgttcttccgctcaactagcgctccatagaaccgtgtgaagatatgttctcttgctagtctgacatcttctcttgtagtgagtacttacgtgcgctgcactactttattctacttggtatgctgacgaacggacgactctagtaaccggaagattctaggaaacgcctagatcttacctatcatcactacttttcgtgatctactcaagtgtttgtcgctataactgctgcataactctggtgactatcgcactgatcgtgcggtatgtgtgatggcgtgctcaagtgagaacgtgactatatccagcgacttcttgcaacaagtgactacatgtagcgacacgtgatgtaatattcttggaataagagtatcgctagagagaatcgtcactgcatgaatgtctcgatagcactgatttgtcatgtataattgtcaaagtgttaattaccctgcttgtcaaggtgagatcatatccgtagatcatctattgcttttctactttaagcgagcaatgatagttgcacgctaaacatgtccgacgccttaaagctaataactagcacgaaagaaaagtgtgcacgttcttgaaagtgaaacatgtcttataatatgtagtggcaaaaggcatactgtaagaaacaaattcttagcatccttaagacaaatattctttaatttctgtgtaaactgaatatacaattgttccctaaggcaaccaacttttgcttataactacaat

SEQ ID NO: 536686 - DNA, 149 bp, Homo sapiens
gtgctgggctattacaggatcttacgtaatattaacgcattgctgatctagcagcgtgtggagatggcctcaggatccaagaacaagctggaagggctggagtgataccctgacagaaggcaatgcagtgactggccctggctgctgaa

SEQ ID NO: 536687 - DNA, 1388 bp, Homo sapiens
tggtttcgcctctgttgtcttcgttgcttgtcttgttttcgtcctgttttctcttgttctccgtggttctttggtgtcgttcttgcctgtgtcttctctttttgtttgtctgtgtgtggtcgctgttggttcttttcttgtttctctgtctctgcttcgctcgtctctgttgtgttcttcttctcctgctctttttcgtgtgcgtgctgggccttcctgttggtcctcttctggcgtgttactcgtctcgtgtcgttcgttccttgcttccccctcttcttttgtgttatttgttttttttatttttttttttagagagagacaagcagagaataaaacaaggggagagagagaggaggagggtgatggagcagttatggtcgctcttacttctgcttttgtgactcggctctgatgagcgtctcgggcctggtgggctcgtccgatttgcccgttgttgcgcgtgtttcgcgagtcttggtgccctaaaaggggttttctggcctttttgacgtctttcgccactgtttttgtgtgggggccccccctccctttctgcctgcgctcgtctctggtccctctttggaggggtcttgacctgtgtggtgtttcctgtgtaccccgagtcttttgggcgtccccccccgccgagtggctggcgcctgtggggagcgcaatgggtgaccctggtgcttctttcgaccgccaattttttcgggttgttttctccgcgctggtccgccgccctgttatgtttcgcggtgagtcatttcttgggcgcgagtcttttgggacagtccccccccgctgggtctgttcccaataactgtgggcggcgcgattgaagatgtctcgccacccccggggtcatgtttttcggcccccacgaggcccccccgccagtggggcttcttgtcccacccacgggcgcctccccctggccgtttgttattatctcccatccgacctttatagaggcggccccgccgctcatcattttggcccgcgccaccgcgttgcggttactccccacaagcggcgaacatttttctcttgtgttctatattaaccacaccccgccctcgcccacaagcggcgtgctgtatactatgtccttgtgagccacttcctcctttatttggataagtgccgcgccgcttgcgtacaatatagttgaaatgctggataactgggtgtttgataaccagagcttctgcgcactcactcattctactaccgcacagttattaatcttttgcccttcaccacagagaagtcatcttgttattatctttttcaacccccgtgagaaaatcttagctccacaaataatatataaaaatctgtttctgttcttgtttttaaaaaaatcaatagatccaaacaaa

SEQ ID NO: 536688 - DNA, 158 bp, Homo sapiens
gtaatctgctgattgtgtactctgcccgtgtaggtagcgctcactctgcctggggcgggcgggccgccaggagtgacaccgggttcccatgtctctgcagacagtgcttcggatctgggactgtttgtttaacgaaggctcgaagattatcttccggg

SEQ ID NO: 536689 - DNA, 148 bp, Homo sapiens
gcgagaggaccccggtgacaggagctcagtcagagcgaatcggacatataatttcacccaggatagagtcagtgaccacaggatagcatatgaagtacgtgatataaagggaattgtaatggtggtggggaaggggccgggaatcagc

SEQ ID NO: 536690 - DNA, 159 bp, Homo sapiens
atggctgttctgaggatcccactgttgtcatacctgcactgttgtcatacctgcactgttgttcatacctgcactgttgttcatacctgcactgttgttcatacatgcactgttgttcatacccccccccgtatacagcgaccaggtgtaccgagctcg

SEQ ID NO: 536691 - DNA, 415 bp, Homo sapiens
gacgctgctccagcaacagaggggccatgcagtcccgggcactccttgctgttgccctcctgtcgctcctggcctgtgcccgagcttcatacgcccaggatgcctgccttctaagcttcatgcaaggctacatgaagcacgccaccaggaccggcgaggatgcactgagcagagtgcatgagtcccaggtcgtccaacaagcctggggctgtatgaccggtggcttcagatccctgaaagactactggagcaccggtaacgacaagttctctgagacactggaacttggaccctgagggcagaccaactttacacagggctgactgagacctcaatacctgaagtccacctgcctatgcatgctgacagctgcttgtgtcctgcgatccatggctgcacctggatgcttacccgg

SEQ ID NO: 536692 - DNA, 138 bp, Homo sapiens
cctcacaagaccctggcagaagcaggaagcaaggagaagaacgagaaaggagcgttgaagaggagagcaggcgacttgctggaggactctcctaaacgtcccaaggaggcagaaaaccctgaaggcagaagcaggaag

SEQ ID NO: 536693 - DNA, 137 bp, Homo sapiens
  misc_feature (35)..(35): n is a, c, g, or t
tcgcattccaggctgagtgcagtggcataccccanagatacagtcccagttagcaggctcaggtaaagtctgcaggatctggcacactaagaattagtggagcttgtctatagtagttctgcagagctaccacatgt

SEQ ID NO: 536694 - DNA, 973 bp, Homo sapiens
cctgtcagctctttctcccaatatgattgctgcccccccctcctctaccctcccccgtgggttttaccaccacaaagtcataaacttgtcacccaaacaaactggcttgcgcccatagtaaccttccttcccgtgtatcagatatctccgtctaatatccccaggccctttaaccatggaccaaggatccccaccaaaaaacaacgttgcatgtcccccctaaacgtccgaatggcacaactactggctaaagcaaacctttacaaataccttttcgaaaccctgaggtaatattacgcccaggcctgtcgtggtaaaaccgccttatgggcggacacccgaggcatgtctcccctccggttttacgcggtgtctccaagcgtcctttgatcacattccccgatccggtgcccccccgccccccctgttggtcaacacgccgcgtctttatccccaactctgtgggccgaccctcggccgtccgcgaccaggtcctcttgtgtggatacccacgcgcttggcgataccctgccgatgtgccccaaggtaggtcaacaacacgcgtgggcgtgggtctaccccacacagactcgtgttccttactcccgccgcgccgctgtggtggagtacaaccctccaggacccccgccacccttagggggcaagtgaaatacccggcaccgccacctccgccacatagtcggtctaactatcccccccgccccacacacctgatggtgaactcccctttcttatcaactataacatgccccaaacacattccaccccgtccttctatgagaaaacctccctaattatgccacatactcctggcagagacctatgcccagccaatcactcgcttctaaacacaccgatgcaccagacccctcactcctcggctcatcaccctactacctcgtaacccccccccgggcccaacaagcgaattccccaccaaaaccacaaaaca

SEQ ID NO: 536695 - DNA, 478 bp, Homo sapiens
cacgaggatggcgggctgaaaaagacagcgcgcagccgtcagggaagctgaatgctgcgcgctgcacaacggtgcctgcaaggcaccaacgaggtcgatcagaaggtacgtttcacgtagagcagccacttgctgtcgccggtgtccttgcagcggatgccgttgtcgcagatcgtgtataagttcctgtccgcattggtgtcgacatacgccaccgccgcctgccagcccccttcgaagttcttcgtcacgcccaccttccagtccgtgaagtcgtaatcgtcgtagttcttcaccttctggtgaccgacgtgaacgttggcgatccacgacggcatgaactcgtagttcgcgttctgttgatttccacgcagaagtgacccactaacccccaggatttccatccaaacctgacccacgtactaaccctaacctgctgctttgttgagtagcaagagaccaggagtgatagacgtgg

SEQ ID NO: 536696 - DNA, 135 bp, Homo sapiens
atgtgcgatccgggatccaatgattgtgcgatgataacatttgctcaattgatatgagatacttggtacgctcagttttccatgcgagatgcgagctcgagtaggtctctgtttggcatggtgcatctgccctgt

SEQ ID NO: 536697 - DNA, 745 bp, Homo sapiens
  misc_feature (321)..(321): n is a, c, g, or t
  misc_feature (423)..(423): n is a, c, g, or t
  misc_feature (498)..(498): n is a, c, g, or t
gtgggcaaactgtaactttaaaatgattcaggatcataacttcagttatttttctgtgctgttacgtagcagctttccagttttcttcctaactctcaagctaccagctctagttttattgttagggtgtttaatatttgaattcttcaacatagaataccatgtgtttaggaaaaataaaagtgtgactgtatttggtatgttgtatttttagttacctggtaggagatgaattgtttgtggtcatggaataccttgctggggggtcactcactgatgtggtaacagaaacgtgcatggatgaagcacagattgctgctntatgcagagaggtaggtttgcctccttcttgatatgttatggtgatatgtggttagcaagaagtgaacaaaaggaaatttttctgcacaggtaattgttatngtgggaggtgctttctctgtatacattctctgcaaattactccatctccatgccatttcatcctacacaggagtntcagccctttccttcaggtataagataattggggaatgaatggtggacctttgaagatccagattcacaaggaaattctggtagagtgatgatgatcatttaccatccaaacaggacacttttgagagtaaagggtatatatcattagaaatacaccactcaagctggcgcggtggctcacgcctgtaatcccagcactttggggaggccgagcggggtggatcacaaggtccggagatcgagacca

SEQ ID NO: 536698 - DNA, 301 bp, Homo sapiens
ttcggagggaccctccagctgtgatgaaggcccagagccccatggaaacagtgacggcatagatgggcagcaggctggcctcataccagggtgttcagtgattgtcagtcccgattgtcatgtaggtgactcccataccaccagtgcccaaatgcccagttaccggtctccttctcacagtgcttcaaaggaacacaatctcccgcaaagggtatggacgcaggataatgggctgcgtgtcagagaaggctgacagtcagtgaagtagtacgggtgaagtctccatgtggatcccaaacca

SEQ ID NO: 536699 - DNA, 157 bp, Homo sapiens
tcaaagaaaagcccaagacggcacttttctgtttctattaaacatttaaagaattaataccaatcctcacattcttcccaaaaatgaagagcaaggaatactgtcctcgtaagatgagtttggaagtattccttgctcttcatttttgggaagaatg

SEQ ID NO: 536700 - DNA, 135 bp, Homo sapiens
ttcatttttctaaagtaacaaattgggtttttttttaacccattaaaatctatgggggggcgggggtatgtatgtgaccagttggtcttcccagaatcattgttgaactccctgaaacaagtctttagaatccta

SEQ ID NO: 536701 - DNA, 409 bp, Homo sapiens
  misc_feature (50)..(50): n is a, c, g, or t
  misc_feature (56)..(56): n is a, c, g, or t
  misc_feature (90)..(91): n is a, c, g, or t
  misc_feature (243)..(243): n is a, c, g, or t
taggtttttaattgttagacacttggatgataaatgcagtcattttattntcaagngcttaaaattaatgtaattaaaagcttagctgannacagaataggtgagggttttttaaaaatgagatttaagggctgggcacggtggctcatgcctgtaatcccagcactttgggaggccgaggcgggcggatcacttgaggttgggagttcatgaccagcttgaccaacatgaagaaaccctgtnttattaaaaatacaaaagtagccaggcatggtggcgcatgcgtgtaatcccagctacttgggaggctgaggcaggagaattgcttgaacctgggaggcagaggttgcagtgagtcgagatggtgccattgctctcgtttgggcaacaagagtgaaactcttgtctc

SEQ ID NO: 536702 - DNA, 428 bp, Homo sapiens
gtcgacgccatgaaggctttgggcctggtctctcaaagacacctcagatggagctggtaggggaacccccataggtcccatgaacagaacatgccaaagtcttttgcagtacaaggagaggtcagggttttaatacgagccttggtccagggctttgaagtcagggagggtttaggcttgaggaaggccagtgtctcaatctctagcagctttttctttcttctgctccgctttgcgcacaaccagcatgcccagggtccaagcagccctgctctgtgaccgtggcctgtcacttctgaagattgtcttctcacccatgaactggcttcactattcttggctgtgtacccaaagctctctctgtttttacatagagacacatgctcacctgtgcttactgctcctctattcacaataaatggtcgacg

SEQ ID NO: 536703 - DNA, 2938 bp, Homo sapiens
  misc_feature (2922)..(2922): n is a, c, g, or t
  misc_feature (2924)..(2924): n is a, c, g, or t
ggtcccaggcgtgcggctggccatggcgctgttctacgtcgcgcggtacccgggccccgatgcggcagctgcggcggggccggagggcgcggaggccggggcgcacggcagggcccgcgcgctgctcgagcggctgcagagccgggcccgcgaacggcagcagcagcgggagcccgcgcagaccgaggcggctgcatcgaccgagccggcgaccaggaggcgacggcggccccggcggcggcggcgggtgaacgacgcggagccggggagcccggaggcgccgcagggaaaagcgacggaaggcggacggcgaggacgctgggcgcagaaagcaacgaggaggcgccaggggagcccagcgcagggagcagcgaggaggcgccaggggagcccagcgcagggagcagcgaggaggcgccgggggagcgcagcaccagcgccagcgccgaggcggccccagatggaccggccctggaggaggcggccggacccctggtccccggcctggtgctgggggggttcgggaagaggaaggcgccgaaggtccagcctttcctgccaaggtggctggctgagcctaactgtgtcagaaggaatgtcaccgaagacctggttcctatcgaggacatccctgacgtccatcctgacctgcagaagcagctgcgggcacacggcatctcgtcctactttccagtccaggcagctgtgattcctgccctcctggagagcgcagcctgtgggtttctggtgggcagaggtggctaccggcctagcgacctctgtgtttctgccccaacaggcagtgggaagacactggccttcgtcatccctgtggtgcaggccctgctttcgagagtggtctgccacatccgtgccctggttgtgctgcccaccaaggagctggcccggcaggtatgtggaccctagacctggagcgtggcaccgcccgcctcagcttccctgctgagtgcacagcgatcagcccctgggggacccagattagatctggggtcctttttgctgcagtaggtggacaccagctacctccaggccagtgacagacttctcctagcaggtgagcaaagttttcaacatctacacagatgccacacctctgagagtctccctggttacgggacagaagtctctggccaaggagcaggagagcctcgtccagaaaacgtaggttgtgtcagggtgcgggtttttcagggggtccctgctcagccctgcaggtggcctgaggcaccgtgggagcagaggaggggccaccatctttaaccacctgttcccgtgaagaggaggagctcccaccggcccccttcccatgtggggtggagtcggggctgtggggtgaggcagcgtcttgctatccggaagcccttgagaaagcttccttctctcgagctgctctctggtctgtagagctgatgggtaccgctgcttggctgacatcgtggtagccacccccggccgcctggtggaccacatcgaccagaccccaggattcagcctccagcagctccgcttcctgattatcgacgaggctgaccggatgattgacagcatgcatcagtcctggctgccgcgggtggtggcggccgccttccagagcgaggaccccgcggacccctgtgccctgctccagcgaaggcaggcccaggctgtgacagccgccagcacctgctgtccccagatgcccctgcagaagctgctcttctcagctactctgacccagaaccctgaaaagctgcagcagctgggcctccaccagccccggcttttctccacagggctagcacacaggggcctggaagatacagatggggacggggattcggggaagtatgcctttcctgttgggctcacgcaccactacgtgccctgcagcctcagctctaagccgctggtcgtcctgcacctggtcctggagatgggcttctcgagggttctctgcttcactaactcccgagagaactcccacaggctcttcctgctggtgcaagcttttgggggtgtggacgtggctgagttctcctcgcgctacgggcctggccagaggaggatgatcctgaagcagtttgaacaggggaagatccagctgctcatcagcacggacgccaccgcgcgaggcatcgacgtgcagggtgtggagctggtggtgaactacgacgccccccagtacctgagaacctacgtgcaccgggttgggaggacagctcgcgctgggaaaactggacaggccttcacactgctcctgaaagtgcaggagaggagattcctccgaatgctaactgaagctggggcacctgagttgcagcggcacgagctctccagcaagctgctgcagccgctggttcctcggtacgaggaggccctgtcccagctggaggagtctgtcaaggaagagcgcaagcagagggcggcctaggctggggctcagagggccggagggactgaacgctcaccaccctgaccctccttccagagcagtgctgatcactggatcctgtatgtgaggaaaggaatcccccagtggacacagccttcctccccaagcacgtggtctctgcgccaggcagcccgggcgtcagagctcaagcacctgccccgactggagacttcagggcttgtcactttcagagtgtggaggtcaggatggctgcgggcaatgaagccttagtaaaacggtgaaaagtactcccagacggacgcgggcacccgtcatgcttttgctgagagttgggggcattaaccttgagctaatgttaaaaatcaagctcttggccaggcatggtggctcatgcctgtaattccagcactttgggaggccaaggcgggtggatcacctgaggtcacgagttcgagaccagcctgaccaacatggagaaaccctgtctctactaaaaatacaaaattagncnggccagtctgtgag

SEQ ID NO: 536704 - DNA, 208 bp, Homo sapiens
cagtatttcaatttgagaattttttaacacattataactccctactttgaccaggcaccttaaaagagatttttttaaagcatattaccctgtcatataatttatgaggagttgcctatccctattacaagattaagggcaagctcccgaaaggaacgccagaggagggcttatcatcggcccccattgttgactcacagattagctt

SEQ ID NO: 536705 - DNA, 527 bp, Homo sapiens
gttgagcgcggagccctgcatgtaccctgccgtcctgggctcagaggacgtgactccccgaccctgcgcccggcagtccccggggtgcctgtgctgccctgtgcccatggtgctcgtgagtgtccagcccagcttggctggctcagtgctgctgctgcctgtgctcccagcctcagtttccccatttggtaaagcatttgactggtgtgtttgctggactggcttctgctggacagagccttgtggctccgactgtctgcgctgtgtgtacctggcatgcacccccgacccctgaatgtggatgtggcgtgtgaccttggatcatcaggcggatccctgaagtgcgcccccaagtgatcatgaggcaaggacaagaaacatggtaaaacagaggagttgtgaaaagataagagaaaaaacgaaaagagagcacatagttcaaaaaaaaagaaaggatcacgaatgcaaaaagaagagaagaaaaagaaagaggataaacaacaaacactgagagcagaaagtaaagg

SEQ ID NO: 536706 - DNA, 356 bp, Homo sapiens
catatttacttgagctcggtaccccaggcatgcgagctggtagctcgcatgacgatgtggcttgagccctctgttgcaatggcccctgctctgtacacctggttaggctgttgctggttcacgcctcattggtgtacgtgtagttgggggtggcggaatactgagtctgaggctgattcatggcgccctgggctgccgccctatggctggcgattctgggctcgcctgctgcacatttggattcttccatgcccgttgtgtaattttttctcgcaaattgctgaaactccccccacttccccggtaaaatttatgaaccatgctgagggcgatgaaggaaaagacggccatcactg

SEQ ID NO: 536707 - DNA, 2532 bp, Homo sapiens
  misc_feature (2516)..(2516): n is a, c, g, or t
  misc_feature (2518)..(2518): n is a, c, g, or t
ggtcccaggcgtgcggctggccatggcgctgttctacgtcgcgcggtacccgggccccgatgcggcagctgcggcggggccggagggcgcggaggccggggcgcacggcagggcccgcgcgctgctcgagcggctgcagagccgggcccgcgaacggcagcagcagcgggagcccgcgcagaccgaggcggctgcatcgaccgagccggcgaccaggaggcgacggcggccccggcggcggcggcgggtgaacgacgcggagccggggagcccggaggcgccgcagggaaaagcgacggaaggcggacggcgaggacgctgggcgcagaaagcaacgaggaggcgccaggggagcccagcgcagggagcagcgaggaggcgccaggggagcccagcgcagggagcagcgaggaggcgccgggggagcgcagcaccagcgccagcgccgaggcggccccagatggaccggccctggaggaggcggccggacccctggtccccggcctggtgctgggggggttcgggaagaggaaggcgccgaaggtccagcctttcctgccaaggtggctggctgagcctaactgtgtcagaaggaatgtcaccgaagacctggttcctatcgaggacatccctgacgtccatcctgacctgcagaagcagctgcgggcacacggcatctcgtcctactttccagtccaggcagctgtgattcctgccctcctggagagcgcagcctgtgggtttctggtgggcagaggtggctaccggcctagcgacctctgtgtttctgccccaacaggcagtgggaagacactggccttcgtcatccctgtggtgcaggccctgctttcgagagtggtctgccacatccgtgccctggttgtgctgcccaccaaggagctggcccagcaggtgagcaaagttttcaacatctacacagatgccacacctctgagagtctccctggttacgggacagaagtctctggccaaggagcaggagagcctcgtccagaaaacagctgatgggtaccgctgcttggctgacatcgtggtagccacccccggccgcctggtggaccacatcgaccagaccccaggattcagcctccagcagctccgcttcctgattatcgacgaggctgaccggatgattgacagcatgcatcagtcctggctgccgcgggtggtggcggccgccttccagagcgaggaccccgcggacccctgtgccctgctccagcgaaggcaggcccaggctgtgacagccgccagcacctgctgtccccagatgcccctgcagaagctgctcttctcagctactctgacccagaaccctgaaaagctgcagcagctgggcctccaccagccccggcttttctccacagggctagcacacaggggcctggaagatacagatggggacggggattcggggaagtatgcctttcctgttgggctcacgcaccactacgtgccctgcagcctcagctctaagccgctggtcgtcctgcacctggtcctggagatgggcttctcgagggttctctgcttcactaactcccgagagaactcccacaggctcttcctgctggtgcaagcttttgggggtgtggacgtggctgagttctcctcgcgctacgggcctggccagaggaggatgatcctgaagcagtttgaacaggggaagatccagctgctcatcagcacggacgccaccgcgcgaggcatcgacgtgcagggtgtggagctggtggtgaactacgacgccccccagtacctgagaacctacgtgcaccgggttgggaggacagctcgcgctgggaaaactggacaggccttcacactgctcctgaaagtgcaggagaggagattcctccgaatgctaactgaagctggggcacctgagttgcagcggcacgagctctccagcaagctgctgcagccgctggttcctcggtacgaggaggccctgtcccagctggaggagtctgtcaaggaagagcgcaagcagagggcggcctaggctggggctcagagggccggagggactgaacgctcaccaccctgaccctccttccagagcagtgctgatcactggatcctgtatgtgaggaaaggaatcccccagtggacacagccttcctccccaagcacgtggtctctgcgccaggcagcccgggcgtcagagctcaagcacctgccccgactggagacttcagggcttgtcactttcagagtgtggaggtcaggatggctgcgggcaatgaagccttagtaaaacggtgaaaagtactcccagacggacgcgggcacccgtcatgcttttgctgagagttgggggcattaaccttgagctaatgttaaaaatcaagctcttggccaggcatggtggctcatgcctgtaattccagcactttgggaggccaaggcgggtggatcacctgaggtcacgagttcgagaccagcctgaccaacatggagaaaccctgtctctactaaaaatacaaaattagncnggccagtctgtgag

SEQ ID NO: 536708 - DNA, 1115 bp, Homo sapiens
gttgtcactgtctgctctgggctgcgtctgtttttgtgctcgcagtgtcgttcagggtgtcatcttcggggcgaggtatcgtatcggttagggtcgtcctgtgctcttgtccggtacgtttgttcgggtgtcgttgacccttgtgcttttgtttgatcatttgacttgtgaacgttgtcctccgcctgggagtggcgtgctcaatcgtcctccacagggcttgtttctctcctcactgtgtggctatccctcggttattcctcgtaccgtttctcccctttttggttaatcccctcgtgtcttctttgttgtgtgtcccttctgttggtgggcctctatgccatttgcccccacgctggtgtgtgactgagtgtgggctgctctcttgtcctttcctcttcttgctgtcctcattatgtgatagcttactctgccataaccttttcgttcctcactagtggattacaatgatttgtcgatgtgactcctgtggtgtctgtagtcaccaacgcctcatctcctagtcactgctgctttggtacgccctgacccaactcttatcctctttcatcttcttctgtctttggcctgtccttttgttgcaattgccactgtctgacgatttgatcctgatatgcatctaccatctcgtcaaccgcctgacacctgggaccttggcccctctcctgctttatagcatcatcgctcatcttgctcccatttgctctgccatgccaagctttaggtgggacatgtagagtccaggactgctcagatcctcctctccctctcgctcttgagtccacaaaagtagagcgagcgagatgatctggaaagcacaccctgacagcaggatgcactatctcttagtgctccagaggcgttgaatagggcgctttgcatcagctccaggcccagcgggaaggaaggagctgcatgggatggtgagagggagaaggggtagcagaagcaaattatggaggcgttgaacctagtaaatagcaactgtctgacagcaataatcttcaatgcatgctaagccatccccggccatattttgtatgagcgcttggcgctcatcctccgtcctatcccaactcaccccccaaccctaa

SEQ ID NO: 536709 - DNA, 1970 bp, Homo sapiens
  misc_feature (1954)..(1954): n is a, c, g, or t
  misc_feature (1956)..(1956): n is a, c, g, or t
agcttacggctaggtacgaggctgggtgttggaatgtcaccgaagacctggttcctatcgaggacatccctgacgtccatcctgacctgcagaagcagctgcgggcacacggcatctcgtcctactttccagtccaggcagctgtgattcctgccctcctggagagcgcagcctgtgggtttctggtgggcagaggtggctaccggcctagcgacctctgtgtttctgccccaacaggcagtgggaagacactggccttcgtcatccctgtggtgcaggccctgctttcgagagtggtctgccacatccgtgccctggttgtgctgcccaccaaggagctggcccagcaggtgagcaaagttttcaacatctacacagatgccacacctctgagagtctccctggttacgggacagaagtctctggccaaggagcaggagagcctcgtccagaaaacagctgatgggtaccgctgcttggctgacatcgtggtagccacccccggccgcctggtggaccacatcgaccagaccccaggattcagcctccagcagctccgcttcctgattatcgacgaggctgaccggatgattgacagcatgcatcagtcctggctgccgcgggtggtggcggccgccttccagagcgaggaccccgcggacccctgtgccctgctccagcgaaggcaggcccaggctgtgacagccgccagcacctgctgtccccagatgcccctgcagaagctgctcttctcagctactctgacccagaaccctgaaaagctgcagcagctgggcctccaccagccccggcttttctccacagggctagcacacaggggcctggaagatacagatggggacggggattcggggaagtatgcctttcctgttgggctcacgcaccactacgtgccctgcagcctcagctctaagccgctggtcgtcctgcacctggtcctggagatgggcttctcgagggttctctgcttcactaactcccgagagaactcccacaggctcttcctgctggtgcaagcttttgggggtgtggacgtggctgagttctcctcgcgctacgggcctggccagaggaggatgatcctgaagcagtttgaacaggggaagatccagctgctcatcagcacggacgccaccgcgcgaggcatcgacgtgcagggtgtggagctggtggtgaactacgacgccccccagtacctgagaacctacgtgcaccgggttgggaggacagctcgcgctgggaaaactggacaggccttcacactgctcctgaaagtgcaggagaggagattcctccgaatgctaactgaagctggggcacctgagttgcagcggcacgagctctccagcaagctgctgcagccgctggttcctcggtacgaggaggccctgtcccagctggaggagtctgtcaaggaagagcgcaagcagagggcggcctaggctggggctcagagggccggagggactgaacgctcaccaccctgaccctccttccagagcagtgctgatcactggatcctgtatgtgaggaaaggaatcccccagtggacacagccttcctccccaagcacgtggtctctgcgccaggcagcccgggcgtcagagctcaagcacctgccccgactggagacttcagggcttgtcactttcagagtgtggaggtcaggatggctgcgggcaatgaagccttagtaaaacggtgaaaagtactcccagacggacgcgggcacccgtcatgcttttgctgagagttgggggcattaaccttgagctaatgttaaaaatcaagctcttggccaggcatggtggctcatgcctgtaattccagcactttgggaggccaaggcgggtggatcacctgaggtcacgagttcgagaccagcctgaccaacatggagaaaccctgtctctactaaaaatacaaaattagncnggccagtctgtgag

SEQ ID NO: 536710 - DNA, 104 bp, Homo sapiens
ctgctacgtgacgcgccgcaggacccagcggaggaagtcaccatcactgctctgctcttcggggaggatgacctggaggcactcaatggccaatgaacatcaat

SEQ ID NO: 536711 - DNA, 555 bp, Homo sapiens
agagacagggtctcactctgtcacccacagtggagtgagtgatgcaatcatggctcactgcagccttgaactcctgggctcaagcgatcttcccatctgtctcctgaatagttagaactacaggtgtgtcccaccacgcctagctaatgtaaaaaatatacatttgtagagatggggtctcactgtgttgcccagactggctcaaactcctggcctcaagtgagtcttctgccttggcccctcaaagtgttggtattataggcgtgagccagtgcacctggcctcacatgacttttattgcattatactggtataactgttctcttttattattagttgataatctcttaccgtgcctattttataaattaaattttatcatatgtatatatgcataggaaaaaacatagcatatataagggtcagtagtatacagtttcaggcatccactgggggttttggaaggacccaacacagggaaggggggattactgtaaatacatttttaaacggtaaagtaagatatttttgacagtccacattattcttaaagat

SEQ ID NO: 536712 - DNA, 462 bp, Homo sapiens
  misc_feature (38)..(38): n is a, c, g, or t
tagtgcttccttatgtcccatccctcttggctcctctntgagcacccacccctctacccgtggtctagtcactaaaggaggaacacctgggggtctctggaaccctattcctataatatggtacctggtatcattggtgaggccatgccatattggtgttaaatatttcaattatcattcccttattctttctactctacataccctcaaattatgcaaagattgtgcatttcaaatgtgaattgaatgcttgtcaattagagacataaaaatcaccaggtcttatgtggtaatgtggtcagaacactacaagatctttctgtggccttgctttccacggtttgttaactttgttcctcactttcagaattcactgtgctataacagaaagggtcggttatacaaagtgtgaaatttcttttctttatacccaataataaaacatcatcctttttgcaaaca

SEQ ID NO: 536713 - DNA, 2775 bp, Homo sapiens
  misc_feature (2759)..(2759): n is a, c, g, or t
  misc_feature (2761)..(2761): n is a, c, g, or t
ggtcccaggcgtgcggctggccatggcgctgttctacgtcgcgcggtacccgggccccgatgcggcagctgcggcggggccggagggcgcggaggccggggcgcacggcagggcccgcgcgctgctcgagcggctgcagagccgggcccgcgaacggcagcagcagcgggagcccgcgcagaccgaggcggctgcatcgaccgagccggcgaccaggaggcgacggcggccccggcggcggcggcgggtgaacgacgcggagccggggagcccggaggcgccgcagggaaaagcgacggaaggcggacggcgaggacgctgggcgcagaaagcaacgaggaggcgccaggggagcccagcgcagggagcagcgaggaggcgccaggggagcccagcgcagggagcagcgaggaggcgccgggggagcgcagcaccagcgccagcgccgaggcggccccagatggaccggccctggaggaggcggccggacccctggtccccggcctggtgctgggggggttcgggaagaggaaggcgccgaaggtccagcctttcctgccaaggtggctggctgagcctaactgtgtcagaaggaatgtcaccgaagacctggttcctatcgaggacatccctgacgtccatcctgacctgcagaagcagctgcgggcacacggcatctcgtcctactttccagtccaggcagctgtgattcctgccctcctggagagcgcagcctgtgggtttctggtgggcagaggtggctaccggcctagcgacctctgtgtttctgccccaacaggcagtgggaagacactggccttcgtcatccctgtggtgcaggccctgctttcgagagtggtctgccacatccgtgccctggttgtgctgcccaccaaggagctggcccagcaggtgagcaaagttttcaacatctacacagatgccacacctctgagagtctccctggttacgggacagaagtctctggccaaggagcaggagagcctcgtccagaaaacgtaggttgtgtcagggtgcgggtttttcagggggtccctgctcagccctgcaggtggcctgaggcaccgtgggagcagaggaggggccaccatctttaaccacctgttcccgtgaagaggaggagctcccaccggcccccttcccatgtggggtggagtcggggctgtggggtgaggcagcgtcttgctatccggaagcccttgagaaagcttccttctctcgagctgctctctggtctgtagagctgatgggtaccgctgcttggctgacatcgtggtagccacccccggccgcctggtggaccacatcgaccagaccccaggattcagcctccagcagctccgcttcctgattatcgacgaggctgaccggatgattgacagcatgcatcagtcctggctgccgcgggtggtggcggccgccttccagagcgaggaccccgcggacccctgtgccctgctccagcgaaggcaggcccaggctgtgacagccgccagcacctgctgtccccagatgcccctgcagaagctgctcttctcagctactctgacccagaaccctgaaaagctgcagcagctgggcctccaccagccccggcttttctccacagggctagcacacaggggcctggaagatacagatggggacggggattcggggaagtatgcctttcctgttgggctcacgcaccactacgtgccctgcagcctcagctctaagccgctggtcgtcctgcacctggtcctggagatgggcttctcgagggttctctgcttcactaactcccgagagaactcccacaggctcttcctgctggtgcaagcttttgggggtgtggacgtggctgagttctcctcgcgctacgggcctggccagaggaggatgatcctgaagcagtttgaacaggggaagatccagctgctcatcagcacggacgccaccgcgcgaggcatcgacgtgcagggtgtggagctggtggtgaactacgacgccccccagtacctgagaacctacgtgcaccgggttgggaggacagctcgcgctgggaaaactggacaggccttcacactgctcctgaaagtgcaggagaggagattcctccgaatgctaactgaagctggggcacctgagttgcagcggcacgagctctccagcaagctgctgcagccgctggttcctcggtacgaggaggccctgtcccagctggaggagtctgtcaaggaagagcgcaagcagagggcggcctaggctggggctcagagggccggagggactgaacgctcaccaccctgaccctccttccagagcagtgctgatcactggatcctgtatgtgaggaaaggaatcccccagtggacacagccttcctccccaagcacgtggtctctgcgccaggcagcccgggcgtcagagctcaagcacctgccccgactggagacttcagggcttgtcactttcagagtgtggaggtcaggatggctgcgggcaatgaagccttagtaaaacggtgaaaagtactcccagacggacgcgggcacccgtcatgcttttgctgagagttgggggcattaaccttgagctaatgttaaaaatcaagctcttggccaggcatggtggctcatgcctgtaattccagcactttgggaggccaaggcgggtggatcacctgaggtcacgagttcgagaccagcctgaccaacatggagaaaccctgtctctactaaaaatacaaaattagncnggccagtctgtgag

SEQ ID NO: 536714 - DNA, 1690 bp, Homo sapiens
  misc_feature (1)..(2): n is a, c, g, or t
  misc_feature (1161)..(1161): n is a, c, g, or t
nntctataggaaaggtcagcaatatgagttgtcctctcttttgtttttgttgtgtatctgtatcttatttcttgttgctctttatctctcgtcgtccggttcgtgacctgtaccttgttggtttgactttactctcgtgtttgtgtgctatcttcgttgctctacttgacatggcccttcgtttctctttgtcctcctatagtttgcgggttagcttctcctagctgtctgatctggttcatgtttccagttcttgctttgtttgttacgttatattctcctgtgagtcaccgcctgtgtggttgtgttgtatgacacactacctccttctgttgtgtttgtgtatggatcactgtctagctgtacgtctcgcgtgtcctttttctgtgactggatagttcttctttattcaactggggagcttatttccatgtggtccacgtattgcgccctgttttgcgctgttctgaactatagtttttgtggatactgtctggtgatcgccgtgttttggttctttcgtcgcttgttgtgttctccttgttgcgctactttccctcctttgctttatctatgagagtagtgtacatcgagttagtctgcctgtggtgtgtgtcggactgattgacatacgtcggttccgtcgatgtggtcttcttttatttgtcccgcggctgtctcgtcgtgcgaccgaggttggcgtgcctgattctttttatgggtctaagtactggctgtgtgttgcgaataaggcgtgttgccactggagaccggctgttttgatctctgggcggtggtgtctcctccagccactttggtttaggcaccgcgtgttggttgggtatcactctgttgttggtggttttatacccgtgggctatcaccgttatttggtgtccctctgtgtatggggggacctgtccaagatttgtctctcgtggtgcacccgcgctgcgccttgccggagtttctgcctgtttctttcggcgttttttgttgggtttcttcacacgggctgtgtcgtgtgtgagagttggcgcccccattgtctattggttgctacgcacttaatgtctcttttggccaaacaacctctgcaaatcttatatactctttttttatctctctctcaatgtcacctttcggtgtctcctcacatangagtattcgacacacgcgtggtctcactactctcctcacacatatctgtgactttgctattctatcgcattacataccttatagttattcgcttctctctcacatacttgctcgtgttgctacactcactcaccctcttctttggtacacaagtttctcgcattcccaccttaaagtttacaggagtttcttccggaccacattcacaacacttttttcacactcgctgttttttctccacaatttttctcgttttggatttttatgtgcacccttcgtttctgggctttccacctgtctgactctttctgtcaccttgagctttatcctcgcttctttcttagggtttctttgtttctggggtcgttcggctacgaagatattagtctacaggtaactgtgcgccaccgattacccgggcgatggggggggggtttggtggaaatttatttgttatgatgtctgtgtggaaagcggctgggcagacctctccatggtctattattactgtaaaaaaaaccaaaaaaaa

SEQ ID NO: 536715 - DNA, 2852 bp, Homo sapiens
  misc_feature (2836)..(2836): n is a, c, g, or t
  misc_feature (2838)..(2838): n is a, c, g, or t
ggtcccaggcgtgcggctggccatggcgctgttctacgtcgcgcggtacccgggccccgatgcggcagctgcggcggggccggagggcgcggaggccggggcgcacggcagggcccgcgcgctgctcgagcggctgcagagccgggcccgcgaacggcagcagcagcgggagcccgcgcagaccgaggcggctgcatcgaccgagccggcgaccaggaggcgacggcggccccggcggcggcggcgggtgaacgacgcggagccggggagcccggaggcgccgcagggaaaagcgacggaaggcggacggcgaggacgctgggcgcagaaagcaacgaggaggcgccaggggagcccagcgcagggagcagcgaggaggcgccaggggagcccagcgcagggagcagcgaggaggcgccgggggagcgcagcaccagcgccagcgccgaggcggccccagatggaccggccctggaggaggcggccggacccctggtccccggcctggtgctgggggggttcgggaagaggaaggcgccgaaggtccagcctttcctgccaaggtggctggctgagcctaactgtgtcagaaggaatgtcaccgaagacctggttcctatcgaggacatccctgacgtccatcctgacctgcagaagcagctgcgggcacacggcatctcgtcctactttccagtccaggcagctgtgattcctgccctcctggagagcgcagcctgtgggtttctggtgggcagaggtggctaccggcctagcgacctctgtgtttctgccccaacaggcagtgggaagacactggccttcgtcatccctgtggtgcaggccctgctttcgagagtggtctgccacatccgtgccctggttgtgctgcccaccaaggagctggcccagcaggtgagcaaagttttcaacatctacacagatgccacacctctgagagtctccctggttacgggacagaagtctctggccaaggagcaggagagcctcgtccagaaaacgtaggttgtgtcagggtgcgggtttttcagggggtccctgctcagccctgcaggtggcctgaggcaccgtgggagcagaggaggggccaccatctttaaccacctgttcccgtgaagaggaggagctcccaccggcccccttcccatgtggggtggagtcggggctgtggggtgaggcagcgtcttgctatccggaagcccttgagaaagcttccttctctcgagctgctctctggtctgtagagctgatgggtaccgctgcttggctgacatcgtggtagccacccccggccgcctggtggaccacatcgaccagaccccaggattcagcctccagcagctccgcttcctggtaggtccccgccccaggggcctgggctttgagctcagggccgcgccacccagtcccgggctccctgtctcctgcagattatcgacgaggctgaccggatgattgacagcatgcatcagtcctggctgccgcgggtggtggcggccgccttccagagcgaggaccccgcggacccctgtgccctgctccagcgaaggcaggcccaggctgtgacagccgccagcacctgctgtccccagatgcccctgcagaagctgctcttctcagctactctgacccagaaccctgaaaagctgcagcagctgggcctccaccagccccggcttttctccacagggctagcacacaggggcctggaagatacagatggggacggggattcggggaagtatgcctttcctgttgggctcacgcaccactacgtgccctgcagcctcagctctaagccgctggtcgtcctgcacctggtcctggagatgggcttctcgagggttctctgcttcactaactcccgagagaactcccacaggctcttcctgctggtgcaagcttttgggggtgtggacgtggctgagttctcctcgcgctacgggcctggccagaggaggatgatcctgaagcagtttgaacaggggaagatccagctgctcatcagcacggacgccaccgcgcgaggcatcgacgtgcagggtgtggagctggtggtgaactacgacgccccccagtacctgagaacctacgtgcaccgggttgggaggacagctcgcgctgggaaaactggacaggccttcacactgctcctgaaagtgcaggagaggagattcctccgaatgctaactgaagctggggcacctgagttgcagcggcacgagctctccagcaagctgctgcagccgctggttcctcggtacgaggaggccctgtcccagctggaggagtctgtcaaggaagagcgcaagcagagggcggcctaggctggggctcagagggccggagggactgaacgctcaccaccctgaccctccttccagagcagtgctgatcactggatcctgtatgtgaggaaaggaatcccccagtggacacagccttcctccccaagcacgtggtctctgcgccaggcagcccgggcgtcagagctcaagcacctgccccgactggagacttcagggcttgtcactttcagagtgtggaggtcaggatggctgcgggcaatgaagccttagtaaaacggtgaaaagtactcccagacggacgcgggcacccgtcatgcttttgctgagagttgggggcattaaccttgagctaatgttaaaaatcaagctcttggccaggcatggtggctcatgcctgtaattccagcactttgggaggccaaggcgggtggatcacctgaggtcacgagttcgagaccagcctgaccaacatggagaaaccctgtctctactaaaaatacaaaattagncnggccagtctgtgag

SEQ ID NO: 536716 - DNA, 2609 bp, Homo sapiens
  misc_feature (2593)..(2593): n is a, c, g, or t
  misc_feature (2595)..(2595): n is a, c, g, or t
ggtcccaggcgtgcggctggccatggcgctgttctacgtcgcgcggtacccgggccccgatgcggcagctgcggcggggccggagggcgcggaggccggggcgcacggcagggcccgcgcgctgctcgagcggctgcagagccgggcccgcgaacggcagcagcagcgggagcccgcgcagaccgaggcggctgcatcgaccgagccggcgaccaggaggcgacggcggccccggcggcggcggcgggtgaacgacgcggagccggggagcccggaggcgccgcagggaaaagcgacggaaggcggacggcgaggacgctgggcgcagaaagcaacgaggaggcgccaggggagcccagcgcagggagcagcgaggaggcgccaggggagcccagcgcagggagcagcgaggaggcgccgggggagcgcagcaccagcgccagcgccgaggcggccccagatggaccggccctggaggaggcggccggacccctggtccccggcctggtgctgggggggttcgggaagaggaaggcgccgaaggtccagcctttcctgccaaggtggctggctgagcctaactgtgtcagaaggaatgtcaccgaagacctggttcctatcgaggacatccctgacgtccatcctgacctgcagaagcagctgcgggcacacggcatctcgtcctactttccagtccaggcagctgtgattcctgccctcctggagagcgcagcctgtgggtttctggtgggcagaggtggctaccggcctagcgacctctgtgtttctgccccaacaggcagtgggaagacactggccttcgtcatccctgtggtgcaggccctgctttcgagagtggtctgccacatccgtgccctggttgtgctgcccaccaaggagctggcccagcaggtgagcaaagttttcaacatctacacagatgccacacctctgagagtctccctggttacgggacagaagtctctggccaaggagcaggagagcctcgtccagaaaacagctgatgggtaccgctgcttggctgacatcgtggtagccacccccggccgcctggtggaccacatcgaccagaccccaggattcagcctccagcagctccgcttcctggtaggtccccgccccaggggcctgggctttgagctcagggccgcgccacccagtcccgggctccctgtctcctgcagattatcgacgaggctgaccggatgattgacagcatgcatcagtcctggctgccgcgggtggtggcggccgccttccagagcgaggaccccgcggacccctgtgccctgctccagcgaaggcaggcccaggctgtgacagccgccagcacctgctgtccccagatgcccctgcagaagctgctcttctcagctactctgacccagaaccctgaaaagctgcagcagctgggcctccaccagccccggcttttctccacagggctagcacacaggggcctggaagatacagatggggacggggattcggggaagtatgcctttcctgttgggctcacgcaccactacgtgccctgcagcctcagctctaagccgctggtcgtcctgcacctggtcctggagatgggcttctcgagggttctctgcttcactaactcccgagagaactcccacaggctcttcctgctggtgcaagcttttgggggtgtggacgtggctgagttctcctcgcgctacgggcctggccagaggaggatgatcctgaagcagtttgaacaggggaagatccagctgctcatcagcacggacgccaccgcgcgaggcatcgacgtgcagggtgtggagctggtggtgaactacgacgccccccagtacctgagaacctacgtgcaccgggttgggaggacagctcgcgctgggaaaactggacaggccttcacactgctcctgaaagtgcaggagaggagattcctccgaatgctaactgaagctggggcacctgagttgcagcggcacgagctctccagcaagctgctgcagccgctggttcctcggtacgaggaggccctgtcccagctggaggagtctgtcaaggaagagcgcaagcagagggcggcctaggctggggctcagagggccggagggactgaacgctcaccaccctgaccctccttccagagcagtgctgatcactggatcctgtatgtgaggaaaggaatcccccagtggacacagccttcctccccaagcacgtggtctctgcgccaggcagcccgggcgtcagagctcaagcacctgccccgactggagacttcagggcttgtcactttcagagtgtggaggtcaggatggctgcgggcaatgaagccttagtaaaacggtgaaaagtactcccagacggacgcgggcacccgtcatgcttttgctgagagttgggggcattaaccttgagctaatgttaaaaatcaagctcttggccaggcatggtggctcatgcctgtaattccagcactttgggaggccaaggcgggtggatcacctgaggtcacgagttcgagaccagcctgaccaacatggagaaaccctgtctctactaaaaatacaaaattagncnggccagtctgtgag

SEQ ID NO: 536717 - DNA, 209 bp, Homo sapiens
acgagacagatagaaccagaaaaacattaaacaccagctgggaatatcactttagatgagattgtcagcattgctcgactgatgcggctaccgactccttcaaccagcagaactctctgcgcaccattaaacgcagcactcctgggcgactgcccagctcagctgggctgtaactgcttgactgggccgccactccctcatgactatca

SEQ ID NO: 536718 - DNA, 2580 bp, Homo sapiens
  misc_feature (2564)..(2564): n is a, c, g, or t
  misc_feature (2566)..(2566): n is a, c, g, or t
ggtcccaggcgtgcggctggccatggcgctgttctacgtcgcgcggtacccgggccccgatgcggcagctgcggcggggccggagggcgcggaggccggggcgcacggcagggcccgcgcgctgctcgagcggctgcagagccgggcccgcgaacggcagcagcagcgggagcccgcgcagaccgaggcggctgcatcgaccgagccggcgaccaggaggcgacggcggccccggcggcggcggcgggtgaacgacgcggagccggggagcccggaggcgccgcagggaaaagcgacggaaggcggacggcgaggacgctgggcgcagaaagcaacgaggaggcgccaggggagcccagcgcagggagcagcgaggaggcgccaggggagcccagcgcagggagcagcgaggaggcgccgggggagcgcagcaccagcgccagcgccgaggcggccccagatggaccggccctggaggaggcggccggacccctggtccccggcctggtgctgggggggttcgggaagaggaaggcgccgaaggtccagcctttcctgccaaggtggctggctgagcctaactgtgtcagaaggaatgtcaccgaagacctggttcctatcgaggacatccctgacgtccatcctgacctgcagaagcagctgcgggcacacggcatctcgtcctactttccagtccaggcagctgtgattcctgccctcctggagagcgcagcctgtgggtttctggtgggcagaggtggctaccggcctagcgacctctgtgtttctgccccaacaggcagtgggaagacactggccttcgtcatccctgtggtgcaggccctgctttcgagagtggtctgccacatccgtgccctggttgtgctgcccaccaaggagctggcccgcagtaggtggacaccagctacctccaggccagtgacagacttctcctagcaggtgagcaaagttttcaacatctacacagatgccacacctctgagagtctccctggttacgggacagaagtctctggccaaggagcaggagagcctcgtccagaaaacagctgatgggtaccgctgcttggctgacatcgtggtagccacccccggccgcctggtggaccacatcgaccagaccccaggattcagcctccagcagctccgcttcctgattatcgacgaggctgaccggatgattgacagcatgcatcagtcctggctgccgcgggtggtggcggccgccttccagagcgaggaccccgcggacccctgtgccctgctccagcgaaggcaggcccaggctgtgacagccgccagcacctgctgtccccagatgcccctgcagaagctgctcttctcagctactctgacccagaaccctgaaaagctgcagcagctgggcctccaccagccccggcttttctccacagggctagcacacaggggcctggaagatacagatggggacggggattcggggaagtatgcctttcctgttgggctcacgcaccactacgtgccctgcagcctcagctctaagccgctggtcgtcctgcacctggtcctggagatgggcttctcgagggttctctgcttcactaactcccgagagaactcccacaggctcttcctgctggtgcaagcttttgggggtgtggacgtggctgagttctcctcgcgctacgggcctggccagaggaggatgatcctgaagcagtttgaacaggggaagatccagctgctcatcagcacggacgccaccgcgcgaggcatcgacgtgcagggtgtggagctggtggtgaactacgacgccccccagtacctgagaacctacgtgcaccgggttgggaggacagctcgcgctgggaaaactggacaggccttcacactgctcctgaaagtgcaggagaggagattcctccgaatgctaactgaagctggggcacctgagttgcagcggcacgagctctccagcaagctgctgcagccgctggttcctcggtacgaggaggccctgtcccagctggaggagtctgtcaaggaagagcgcaagcagagggcggcctaggctggggctcagagggccggagggactgaacgctcaccaccctgaccctccttccagagcagtgctgatcactggatcctgtatgtgaggaaaggaatcccccagtggacacagccttcctccccaagcacgtggtctctgcgccaggcagcccgggcgtcagagctcaagcacctgccccgactggagacttcagggcttgtcactttcagagtgtggaggtcaggatggctgcgggcaatgaagccttagtaaaacggtgaaaagtactcccagacggacgcgggcacccgtcatgcttttgctgagagttgggggcattaaccttgagctaatgttaaaaatcaagctcttggccaggcatggtggctcatgcctgtaattccagcactttgggaggccaaggcgggtggatcacctgaggtcacgagttcgagaccagcctgaccaacatggagaaaccctgtctctactaaaaatacaaaattagncnggccagtctgtgag

SEQ ID NO: 536719 - DNA, 3209 bp, Homo sapiens
  misc_feature (3193)..(3193): n is a, c, g, or t
  misc_feature (3195)..(3195): n is a, c, g, or t
ggtcccaggcgtgcggctggccatggcgctgttctacgtcgcgcggtacccgggccccgatgcggcagctgcggcggggccggagggcgcggaggccggggcgcacggcagggcccgcgcgctgctcgagcggctgcagagccgggcccgcgaacggcagcagcagcgggagcccgcgcagaccgaggcggctgcatcgaccgagccggcgaccaggaggcgacggcggccccggcggcggcggcgggtgaacgacgcggagccggggagcccggaggcgccgcagggaaaagcgacggaaggcggacggcgaggacgctgggcgcagaaagcaacgaggaggcgccaggggagcccagcgcagggagcagcgaggaggcgccaggggagcccagcgcagggagcagcgaggaggcgccgggggagcgcagcaccagcgccagcgccgaggcggccccagatggaccggccctggaggaggcggccggacccctggtccccggcctggtgctgggggggttcgggaagaggaaggcgccgaaggtccagcctttcctgccaaggtggctggctgagcctaactgtgtcagaaggaatgtcaccgaagacctggttcctatcgaggacatccctgacgtccatcctgacctgcagaagcagctgcgggcacacggcatctcgtcctactttccagtccaggcagctgtgattcctgccctcctggagagcgcagcctgtgggtttctggtgggcagaggtggctaccggcctagcgacctctgtgtttctgccccaacaggcagtgggaagacactggccttcgtcatccctgtggtgcaggccctgctttcgagagtggtctgccacatccgtgccctggttgtgctgcccaccaaggagctggcccggcaggtatgtggaccctagacctggagcgtggcaccgcccgcctcagcttccctgctgagtgcacagcgatcagcccctgggggacccagattagatctggggtcctttttgctgcagtaggtggacaccagctacctccaggccagtgacagacttctcctagcaggtgagcaaagttttcaacatctacacagatgccacacctctgagagtctccctggttacgggacagaagtctctggccaaggagcaggagagcctcgtccagaaaacgtaggttgtgtcagggtgcgggtttttcagggggtccctgctcagccctgcaggtggcctgaggcaccgtgggagcagaggaggggccaccatctttaaccacctgttcccgtgaagaggaggagctcccaccggcccccttcccatgtggggtggagtcggggctgtggggtgaggcagcgtcttgctatccggaagcccttgagaaagcttccttctctcgagctgctctctggtctgtagagctgatgggtaccgctgcttggctgacatcgtggtagccacccccggccgcctggtggaccacatcgaccagaccccaggattcagcctccagcagctccgcttcctgattatcgacgaggctgaccggatgattgacagcatgcatcagtcctggctgccgcgggtggtggcggccgccttccagagcgaggaccccgcggacccctgtgccctgctccagcgaaggcaggcccaggctgtgacagccgccagcacctgctgtccccagatgcccctgcagaagctgctcttctcagctactctgacccagaaccctgaaaagctgcagcagctgggcctccaccagccccggcttttctccacagggctagcacacaggggcctggaagatacagatggggacggggattcggggaagtatgcctttcctgttgggctcacgcaccactacgtgccctgcagcctcagctctaagccgctggtcgtcctgcacctggtcctggagatgggcttctcgagggttctctgcttcactaactcccgagagaactcccacaggctcttcctgctggtgcaagcttttgggggtgtggacgtggctgagttctcctcgcgctacgggcctggccagaggaggatgatcctgaagcagtttgaacaggggaagatccagctgctcatcagcacggacgccaccgcgcgaggcatcgacgtgcagggtgtggagctggtggtgaactacgacgccccccagtacctgagaacctacgtgcaccgggttgggaggacagctcgcgctgcgtccactggggggtctggggctttgtgagctcctgggcgttgatgtgggaccgtcttgactggcatggggtgggcttggtgtggagagaagctgtcgttccgtcagactcttgaaggctcaggggccagtctggagatagctgcgtttgattccagggttgggaggacagctcgcgctgggaaaactggacaggccttcacactgctcctgaaagtgcaggtgaggctgcgagggtcttgggagtttctgctgttggtgggtgttaaggggctggcccaagaacccccttccaccatgagcttctctgcaggagaggagattcctccgaatgctaactgaagctggggcacctgagttgcagcggcacgagctctccagcaagctgctgcagccgctggttcctcggtacgaggaggccctgtcccagctggaggagtctgtcaaggaagagcgcaagcagagggcggcctaggctggggctcagagggccggagggactgaacgctcaccaccctgaccctccttccagagcagtgctgatcactggatcctgtatgtgaggaaaggaatcccccagtggacacagccttcctccccaagcacgtggtctctgcgccaggcagcccgggcgtcagagctcaagcacctgccccgactggagacttcagggcttgtcactttcagagtgtggaggtcaggatggctgcgggcaatgaagccttagtaaaacggtgaaaagtactcccagacggacgcgggcacccgtcatgcttttgctgagagttgggggcattaaccttgagctaatgttaaaaatcaagctcttggccaggcatggtggctcatgcctgtaattccagcactttgggaggccaaggcgggtggatcacctgaggtcacgagttcgagaccagcctgaccaacatggagaaaccctgtctctactaaaaatacaaaattagncnggccagtctgtgag

SEQ ID NO: 536720 - DNA, 292 bp, Homo sapiens
  misc_feature (10)..(10): n is a, c, g, or t
  misc_feature (35)..(35): n is a, c, g, or t
  misc_feature (269)..(270): n is a, c, g, or t
gattccttcngaatgcctgtctggggaggtggaancaagtgtggggcctgtggtaggaccgtgtaccacaaaaaaaaggctccttggggtggttggagcttccaccgctgctgctttctctgctgtatgtcgctctccatgctccacctttgacggaatttgtttgtcccgagcttcactatgtctatttatggaaaaattgtggttttgcccccttagatcattttgaatgcccgactggtttttacctgccttcttagatgttgccnntgccatgcctagccgtgccgac

SEQ ID NO: 536721 - DNA, 2831 bp, Homo sapiens
  misc_feature (2815)..(2815): n is a, c, g, or t
  misc_feature (2817)..(2817): n is a, c, g, or t
ggtcccaggcgtgcggctggccatggcgctgttctacgtcgcgcggtacccgggccccgatgcggcagctgcggcggggccggagggcgcggaggccggggcgcacggcagggcccgcgcgctgctcgagcggctgcagagccgggcccgcgaacggcagcagcagcgggagcccgcgcagaccgaggcggctgcatcgaccgagccggcgaccaggaggcgacggcggccccggcggcggcggcgggtgaacgacgcggagccggggagcccggaggcgccgcagggaaaagcgacggaaggcggacggcgaggacgctgggcgcagaaagcaacgaggaggcgccaggggagcccagcgcagggagcagcgaggaggcgccaggggagcccagcgcagggagcagcgaggaggcgccgggggagcgcagcaccagcgccagcgccgaggcggccccagatggaccggccctggaggaggcggccggacccctggtccccggcctggtgctgggggggttcgggaagaggaaggcgccgaaggtccagcctttcctgccaaggtggctggctgagcctaactgtgtcagaaggaatgtcaccgaagacctggttcctatcgaggacatccctgacgtccatcctgacctgcagaagcagctgcgggcacacggcatctcgtcctactttccagtccaggcagctgtgattcctgccctcctggagagcgcagcctgtgggtttctggtgggcagaggtggctaccggcctagcgacctctgtgtttctgccccaacaggcagtgggaagacactggccttcgtcatccctgtggtgcaggccctgctttcgagagtggtctgccacatccgtgccctggttgtgctgcccaccaaggagctggcccggcaggtatgtggaccctagacctggagcgtggcaccgcccgcctcagcttccctgctgagtgcacagcgatcagcccctgggggacccagattagatctggggtcctttttgctgcagtaggtggacaccagctacctccaggccagtgacagacttctcctagcaggtgagcaaagttttcaacatctacacagatgccacacctctgagagtctccctggttacgggacagaagtctctggccaaggagcaggagagcctcgtccagaaaacgtaggttgtgtcagggtgcgggtttttcagggggtccctgctcagccctgcaggtggcctgaggcaccgtgggagcagaggaggggccaccatctttaaccacctgttcccgtgaagaggaggagctcccaccggcccccttcccatgtggggtggagtcggggctgtggggtgaggcagcgtcttgctatccggaagcccttgagaaagcttccttctctcgagctgctctctggtctgtagagctgatgggtaccgctgcttggctgacatcgtggtagccacccccggccgcctggtggaccacatcgaccagaccccaggattcagcctccagcagctccgcttcctgattatcgacgaggctgaccggatgattgacagcatgcatcagtcctggctgccgcgggtggtggcggccgccttccagagcgaggaccccgcggacccctgtgccctgctccagcgaaggcaggcccaggctgtgacagccgccagcacctgctgtccccagatgcccctgcagaagctgctcttctcagctactctgacccagaaccctgaaaagctgcagcagctgggcctccaccagccccggcttttctccacagggctagcacacaggggcctggaagatacagatggggacggggattcggggaagtatgcctttcctgttgggctcacgcaccactacgtgccctgcagcctcagctctaagccgctggtcgtcctgcacctggtcctggagatgggcttctcgagggttctctgcttcactaactcccgagagaactcccacaggctcttcctgctggtgcaagcttttgggggtgtggacgtggctgagttctcctcgcgctacgggcctggccagaggaggatgatcctgaagcagtttgaacaggggaagatccagctgctcatcagcacggacgccaccgcgcgaggcatcgacgtgcagggtgtggagctggtggtgaactacgacgccccccagtacctgagaacctacgtgcaccgggttgggaggacagctcgcgctgagcaagctgctgcagccgctggttcctcggtacgaggaggccctgtcccagctggaggagtctgtcaaggaagagcgcaagcagagggcggcctaggctggggctcagagggccggagggactgaacgctcaccaccctgaccctccttccagagcagtgctgatcactggatcctgtatgtgaggaaaggaatcccccagtggacacagccttcctccccaagcacgtggtctctgcgccaggcagcccgggcgtcagagctcaagcacctgccccgactggagacttcagggcttgtcactttcagagtgtggaggtcaggatggctgcgggcaatgaagccttagtaaaacggtgaaaagtactcccagacggacgcgggcacccgtcatgcttttgctgagagttgggggcattaaccttgagctaatgttaaaaatcaagctcttggccaggcatggtggctcatgcctgtaattccagcactttgggaggccaaggcgggtggatcacctgaggtcacgagttcgagaccagcctgaccaacatggagaaaccctgtctctactaaaaatacaaaattagncnggccagtctgtgag

SEQ ID NO: 536722 - DNA, 3191 bp, Homo sapiens
  misc_feature (3175)..(3175): n is a, c, g, or t
  misc_feature (3177)..(3177): n is a, c, g, or t
ggtcccaggcgtgcggctggccatggcgctgttctacgtcgcgcggtacccgggccccgatgcggcagctgcggcggggccggagggcgcggaggccggggcgcacggcagggcccgcgcgctgctcgagcggctgcagagccgggcccgcgaacggcagcagcagcgggagcccgcgcagaccgaggcggctgcatcgaccgagccggcgaccaggaggcgacggcggccccggcggcggcggcgggtgaacgacgcggagccggggagcccggaggcgccgcagggaaaagcgacggaaggcggacggcgaggacgctgggcgcagaaagcaacgaggaggcgccaggggagcccagcgcagggagcagcgaggaggcgccaggggagcccagcgcagggagcagcgaggaggcgccgggggagcgcagcaccagcgccagcgccgaggcggccccagatggaccggccctggaggaggcggccggacccctggtccccggcctggtgctgggggggttcgggaagaggaaggcgccgaaggtccagcctttcctgccaaggtggctggctgagcctaactgtgtcagaaggaatgtcaccgaagacctggttcctatcgaggacatccctgacgtccatcctgacctgcagaagcagctgcgggcacacggcatctcgtcctactttccagtccaggcagctgtgattcctgccctcctggagagcgcagcctgtgggtttctggtgggcagaggtggctaccggcctagcgacctctgtgtttctgccccaacaggcagtgggaagacactggccttcgtcatccctgtggtgcaggccctgctttcgagagtggtctgccacatccgtgccctggttgtgctgcccaccaaggagctggcccggcaggtatgtggaccctagacctggagcgtggcaccgcccgcctcagcttccctgctgagtgcacagcgatcagcccctgggggacccagattagatctggggtcctttttgctgcagtaggtggacaccagctacctccaggccagtgacagacttctcctagcaggtgagcaaagttttcaacatctacacagatgccacacctctgagagtctccctggttacgggacagaagtctctggccaaggagcaggagagcctcgtccagaaaacgtaggttgtgtcagggtgcgggtttttcagggggtccctgctcagccctgcaggtggcctgaggcaccgtgggagcagaggaggggccaccatctttaaccacctgttcccgtgaagaggaggagctcccaccggcccccttcccatgtggggtggagtcggggctgtggggtgaggcagcgtcttgctatccggaagcccttgagaaagcttccttctctcgagctgctctctggtctgtagagctgatgggtaccgctgcttggctgacatcgtggtagccacccccggccgcctggtggaccacatcgaccagaccccaggattcagcctccagcagctccgcttcctgattatcgacgaggctgaccggatgattgacagcatgcatcagtcctggctgccgcgggtggtggcggccgccttccagagcgaggaccccgcggacccctgtgccctgctccagcgaaggcaggcccaggctgtgacagccgccagtatccagcagcacgcccaggtgctggcctcccctgagcagagtcctctgcacacagctctccttccttaatgcccagagataagggtggcttgagctctggtgcacagaaccgcatcgtactgtcacgtgagctggacccaccttgctcctggtctgcggcagtctctacagtgcgtagatggaggaatcctgttccctggaggttcggggcagccactggtagggtgccagcaacacccccttctcttccagcacctgctgtccccagatgcccctgcagaagctgctcttctcagctactctgacccagaaccctgaaaagctgcagcagctgggcctccaccagccccggcttttctccacagggctagcacacaggggcctggaagatacagatggggacggggattcggggaagtatgcctttcctgttgggctcacgcaccactacgtgccctgcagcctcagctctaagccgctggtcgtcctgcacctggtcctggagatgggcttctcgagggttctctgcttcactaactcccgagagaactcccacaggctcttcctgctggtgcaagcttttgggggtgtggacgtggctgagttctcctcgcgctacgggcctggccagaggaggatgatcctgaagcagtttgaacaggggaagatccagctgctcatcagcacggacgccaccgcgcgaggcatcgacgtgcagggtgtggagctggtggtgaactacgacgccccccagtacctgagaacctacgtgcaccgggttgggaggacagctcgcgctgggaaaactggacaggccttcacactgctcctgaaagtgcaggagaggagattcctccgaatgctaactgaagctggggcacctgagttgcagcggcacgagctctccagcaagctgctgcagccgctggttcctcggtacgaggaggccctgtcccagctggaggagtctgtcaaggaagagcgcaagcagagggcggcctaggctggggctcagagggccggagggactgaacgctcaccaccctgaccctccttccagagcagtgctgatcactggatcctgtatgtgaggaaaggaatcccccagtggacacagccttcctccccaagcacgtggtctctgcgccaggcagcccgggcgtcagagctcaagcacctgccccgactggagacttcagggcttgtcactttcagagtgtggaggtcaggatggctgcgggcaatgaagccttagtaaaacggtgaaaagtactcccagacggacgcgggcacccgtcatgcttttgctgagagttgggggcattaaccttgagctaatgttaaaaatcaagctcttggccaggcatggtggctcatgcctgtaattccagcactttgggaggccaaggcgggtggatcacctgaggtcacgagttcgagaccagcctgaccaacatggagaaaccctgtctctactaaaaatacaaaattagncnggccagtctgtgag

SEQ ID NO: 536723 - DNA, 206 bp, Homo sapiens
gaccgtttgcttttctggggggtcctggcggtttttttttaggctgttcctagttgaaacccaaaggtagaagggttgttcttgttgccaaccaaggtaagtgtgcccgggtttcttcccgggtcttacgttcttccggggttcttctgggggcttagttgggagagcctacgccttattgttcctctgcgccacaggagagggta

SEQ ID NO: 536724 - DNA, 223 bp, Homo sapiens
caagacaagaggattgcttgaggccgggagttcaagaccagcgacacagcaggaccctgtctctacaagaaataaaaaaaattagccaagcatggtggcacatgcctaaaagtcctagctagtggggaggctgaggtgggaggatcacttgagtgatcattgatgatgccactgcactccagattgggtgacagagcaagaccctatctctttaaaaaaaaaa

SEQ ID NO: 536725 - DNA, 408 bp, Homo sapiens
tcaacggaacttttctaggtcttgtttatcaatgtggctactccaatattgggtacatatatatttaggacaattaaatcccctcgttgaattgaatcctctatcattatgtaatgcctttctttgttcttttttactgttgttggtttaaagtttgttttatctgatgtaagaatagcaagccctgctcttttttgttattcattactttgagcctgtaggtgttgttacctgtgagatgggtcacttgaagacagcagatgactgggtcttgttgttttatcaaacttgctactctgtgccctttaagtagactgtttagaccatttacaatcaaggttaatattcacatttgaggttttgaccctatcatgaaattgttagctggtggctttgtagtttctatta

SEQ ID NO: 536726 - DNA, 309 bp, Homo sapiens
  misc_feature (89)..(89): n is a, c, g, or t
  misc_feature (168)..(168): n is a, c, g, or t
  misc_feature (184)..(184): n is a, c, g, or t
  misc_feature (289)..(289): n is a, c, g, or t
  misc_feature (303)..(303): n is a, c, g, or t
atcctgatctgcatgatctcagctactttattgacaggcagtgaacataacctcacttaattctggtgtagggtgtatgtgctaatcgntctaattcttgatacctagtttatagataactgctggtcttaaatgcagagtcagagaactgaaccagttctgaaatgnagtagcagctttctgnttctcactctgcctatattccatggggttacttctctcatactctttcagggatttcttccagtgaatctgggcacatatttagcatctcctgtgatgagcaatngatttgggggcctntcactg

SEQ ID NO: 536727 - DNA, 141 bp, Homo sapiens
ataggagggagcagtgtaggtagagatcaaaagtgtaaatacttagggctgtgatactggacagcagcgtaggaaggtggtgaacaagactgaagtagtggggcgattacacagagagctgagttgttgggacttaatgtg

SEQ ID NO: 536728 - DNA, 505 bp, Homo sapiens
  misc_feature (128)..(128): n is a, c, g, or t
  misc_feature (130)..(130): n is a, c, g, or t
cgcttcctttctgaccctttccgggtgttcaagatgtcgaagcgaggacgcggtgggtcctccggggcgaaattccggatttccctgggtcttccggtcggagctgtgatcaactgtgcagacaacanangagctaaaaacttgtatatcatctctgtgaagggaatcaagggacggttgaacagacttcctgctgctggtgttggggacatggtgatggccacagttaagaaaggcaaaccagaactaaggaaaaaggtacatccagcagtggtaattagacaacgaaagtcatatcgaagaaaagatggggtgtttctttactttgaagataacgcaggggtcatagtaaacaataaaggagagatgaaaggctctgctatcacaggtccagtggcaaaggagtgtgcagacttgtggcccagaattgcatccaacgcaggcagcattgcatgattctccagtgtatttgtaaaatatattcattaaagtctcaaaaaaaaaa

SEQ ID NO: 536729 - DNA, 176 bp, Homo sapiens
ccttttttttgggggggggcccccccccctaaggccttttaaaaagggggggcttttttttggggcccggggggaaggttggtttttaatttttgggcttcccccttttttaaccccttttaaagggggtttggggacttttggttttttcccaaaaaaggttttcctttccccca

SEQ ID NO: 536730 - DNA, 211 bp, Homo sapiens
aagataggtacttgtttacttttttaaagaaactttcaaaatattttccaaagtaacatctaacattcacatcagctgtggatgagagttgtagtttacatacctcctgaccaacacttgatatagtcagtcttttatatttcacatattctaaccagtgtgtgtagtaatttcttatcaatataaaggggagtttatatattatatatat

SEQ ID NO: 536731 - DNA, 482 bp, Homo sapiens
  misc_feature (93)..(93): n is a, c, g, or t
  misc_feature (103)..(103): n is a, c, g, or t
  misc_feature (114)..(114): n is a, c, g, or t
  misc_feature (133)..(133): n is a, c, g, or t
acagcgagtcaggtgccagcggctcctcttttgaggagctggacttggagggcgaggggccttaggggagtcacggctggaccctggaaaaantcctttgggnaaggggccccncccccccctttgggggacntaccaagtggctctgggagcccactgcccctgagaagggcaaggagtaacccatggcctgcaccctcctgcagtgcagttgctgaggaactgagcagactctccagcagactctccaaccctcttcctccttcctctgggggaggaggggttcctgagggacctgacttcccctgctccaggcctcttgctaagccttctcctcactgccctttaggctcccagggccagaggagccagggactattttctgcaccagcccccagggctgccgcccctgttgtgtctttttttcagactcacagtggagcttccaggacccagaataaagccaatgatttacttgtttc

SEQ ID NO: 536732 - DNA, 914 bp, Homo sapiens
tccctgtgcggtgtcgacgtagatatgaagtacagctatgcgagccgccagtggcttctttataatattctcgcaaatgggttcctggcgaaatggggatataaaaatcttgcgaccgtctgattgcctcaaccgggggtcttgccacccggaattccgtggttttctgaccttctgggagacacatgttgttcccaacccacgggtggtctcccgcaatttgagtgggccccccctttgttgttggtagtttttgacgacgcaccagagtgtgccccggccaaatcaggactgtgtcttcccaaacttttccctggtccttccgttggagaaagttgtgctgccccgtttgaggcccaaagtcgcctttcggatgcttcttttagaaggtcattgggtcccgtgtcgtaaagttttgtgaaatagaaaggggatgtaccacacatgcaaggggctcttcaatagacccccgcgggaatgaacgaaccctttaaaccccctgggtttatctaaacgacgaactctcggataagatgtgtcgcaactttccctgagccctcgagtagtaggagaaaggatgttccttttcccgctctctcaggtcggagaaacatttcaccttgttgccgcagttgtcactccctgatcagaggatatccggttagccacatgatctgttatcttcatgaacaccctgataaggagagacgttcccccgcggagctcttctgatggcatataaatttatgtatagcacaatatgctgtgtaaaatatcaaaccccgccacaatcactgtctgtctatgccgaatccccggaaataaattatttcttatcatataaaaacttataccctttttttttttcccctttttttgccaaccccaaaaaataaaacgggtgttgaaaaaaa

SEQ ID NO: 536733 - DNA, 208 bp, Homo sapiens
  misc_feature (16)..(16): n is a, c, g, or t
  misc_feature (90)..(90): n is a, c, g, or t
  misc_feature (95)..(95): n is a, c, g, or t
  misc_feature (106)..(106): n is a, c, g, or t
  misc_feature (112)..(112): n is a, c, g, or t
  misc_feature (117)..(117): n is a, c, g, or t
  misc_feature (120)..(120): n is a, c, g, or t
  misc_feature (133)..(133): n is a, c, g, or t
  misc_feature (138)..(138): n is a, c, g, or t
  misc_feature (153)..(153): n is a, c, g, or t
  misc_feature (160)..(160): n is a, c, g, or t
  misc_feature (195)..(195): n is a, c, g, or t
  misc_feature (206)..(206): n is a, c, g, or t
gtcttagctcttccgnagttgccaaccgcagcaagaagtcccgggctttgttcctgtcagctgctgttttctgcatcttcatcatttgcntcggncccacaaacgncctccngattncgnattactcatttcnttctnacactttcaccacanagggtgnctactttgtgctacctcctctgtgttctgtgtcancagacataagntg

SEQ ID NO: 536734 - DNA, 440 bp, Homo sapiens
gaacacttgctgcttgggcttcatagtattcgcatacttcttgaagtctagtgacaggaagatggttggctatgtgaccgggctccaggcctatgtctccacctgctaagtgcctgatcatctgggccctgattttgggcatcttcatgatcattctgctcatcatcatcccagtgttggtcgtcctggcccagctatagatcagtaggctatcattgaggtcatgactctgcccttgacctgtatcctcacgtattttatcttccattcctcgccctgcccccagaggccaggtgctctgctcttgacctgtattccacttactccaccttccattcctcgccctgtccccatagccgagtctttcatcagccctttatctttacattcttttctacaatggcattcaattatgtgtatatgtttctggtaaaaaaaaa

SEQ ID NO: 536735 - DNA, 489 bp, Homo sapiens
atattgctagctgcagttgtcgtgagtatctgctcaaagccggggagagccagatgacgcaaggtcctgactatccttcagagacctcatcaagtatcttcacactgcccagcacaacattataatccaaagatggcttggaagtgctgcccagaagccatgttccctcttcatacgagccagctaggcggcctcacgtacatgacactccactcatggcccatggaggacgacgctacagacagctgacccagctcctgggactccctcctgagggacactgcagcttgagagcagagaggaacacctgagccggaagacctcagtgatgtggctatagcaatccaccagcaccaaggcaacaagcagtttgggacggcgaaagtgggctttctatacaagaaaagtgacggaattcgaagagtctggcagaaaaggaagtgtaggagtcaagtatggatgcctgaccatctcacgacaaactgcagc

SEQ ID NO: 536736 - DNA, 1324 bp, Homo sapiens
gggagtgagggcggggagtgaggaggacgactgaggagcatggatcctgcagacgatcgacagcctcattgagctgtccaccaaactccacctgccagctggactgacgtgtgtcatgcatcatctgagtgaggtggatgtgagaatgcttgtgaatgctgtgaatgaatgaactgcccgctcactgatgacctgatgctgacgactttgatgaaagaagaaaagaaaaaaaaaagagaaaaagaataatagaaacatagcacgaagaacagaagagaaagaatgaaagaaagataaaagaaaagaagaagaataaaacaaagagtacactaaagaaaaacacataacaaaaaaagaaaaaaaaaacaaaaaagaaaagaaacaaaacaagaatagaaaggagagaagaacgagaggaaggaaagcgaaagagacggaaagaagcggaaggaaggacagagaccaagaagggaagagaagaaagaagaaagaggagagaagcaaaaaacagcaaagaaagaaaaaaaaaggaaaggagaaaagagagggaagaagggaggaagagaagagaaggaagaggaagagagagagaggacgagagacggcggaagagaagacaagacgaaagggaggaaagaggcagagagagaagagaagaaaagagaggaaagagaagacaaaagagaggacggaagaacgagaggagaaaacagagagaggcggagaggaagacggaacaaaacaaagaaaaaggagagagagaggagagcacagcgaggaaaaaggagaagagaagaggagacagagcgcaggaagacgaagccaaagagaaggagacggaagagaaaagagaaagagaaagagagaggaaagagaaaaagagcgaagaggaacacgtacgaacgacaacgagaatagagaagaagagcacgagacggaggagagagaggacggagcagacaaggacaagagaggagaaaagagacagagaacgagaaagcaaagcgaagggagaacgagagagacgaaaatgaaaaaccgagagaggagcgaagcaatgcaggaagcagacaacaaaacaacaacaaagagataaagacgacaagaacaaagtaaaaacaagaacataaagaaagtccgtagtcactggttaattaataccgatcagtaaccaacagcaataaagccaagacagcaggagccggagaaacaatagacgagacaaaaccaacaaaacaagaaagaggaccagacggatagcaatacaagaacgaagatacagaatataggcagaagaggagagcaaagagggacaaacaaagag

SEQ ID NO: 536737 - DNA, 333 bp, Homo sapiens
tgagacgacgtttcactcttgttgcccacgctggagtgcaatggcacgatctcagctcactgccacctcctcctcccaggttcaagcgattatcctgcctcagcctctcgagtagctgggatcacaggcacccaacaccaaacccagctaacttattgtatttttagtagagacgggattcactatgctgaccaggctggtcttgaactcttgaccttgtgatccgcccactttggcctcccaaagtgctgggattacaggcgtaagccaccgcgcctggctgaccatcctgttttaagagtgacactgggaatccagatttttatatgacat

SEQ ID NO: 536738 - DNA, 790 bp, Homo sapiens
  misc_feature (601)..(601): n is a, c, g, or t
caaccactgagagccaggctcttgcacgacgggtttgcatggggccatctgaattggcagtctcagcgggtgagggagctgagagatgccaatcggggaggatggccacagagaggctggtgtggggaggttcatcccaggatgtgcactgttggtatatggggtggggaagcaggtgatgatgaaccatggacacccactgacatcgttccttggacggaagtggcttgtcgcgtgaccagtcgcttctcgcttccgtatcgctctggtaggcatgtggactgtgggattcctgaatccatcgagaatggtaaagttgaagacccagagagcactttgttcggtgctgtcgtccgcctacacattgtgaggagcccgtattactagcactggtaaaagtggcaggagcgtggcggacgtagtcacatgtgctggtaacgggtagctgggtgaatgaggtgctgggcactctggagctggtcgaaatgtgttcacacgtctggtggagtcgcgcctagagaaccctttgacatggaagaaacgatggaggatgacttgcgaggatccgaatgccgactattcgggcaccttagccgctggncaagctctcctttcgtacaagcgccatggagactgggtggagccgcctcatgaactgagttactgggctgcatgaacggctgcctcaggaagctggaggggaacaccagggagccgaacgagtgatatgatggagtccacctcagttgccgcactctcaacggcgggaccagagatccgaagatgccca

SEQ ID NO: 536739 - DNA, 887 bp, Homo sapiens
acatttcctcagaagaaggctccttggtgctttgaagaacatcctgaagattatatcggagacaatatatcaagaatctatttattgaatcatctagaacaaaagccaggagctccctaatggatgcacattagtgtttattttgatgaagaaatatatagattttttaaaacaaccacaaagtagatagctcagtaaaaaatcaatttgggaagatgtcactgaacaagctcttccaatgtatttctggattcagtgcccagtaataccaaatcgcttcaagttagggtcataaatgagaaccattgtcaggtaccgggctgatggaacaaattcccagggttcatgagcatggtaatcagggttccggccccctcatcaactggcgggaatcttctccttgcaacactctcctccgacctggcctccctgtgttcagcgacacccaaagggtaccaggctctgtgcaggacaaatctacaaagccctgacagtttaatggcaaaggggatatggggaaaaaacaatgaacccctgagaggatatattctcacattttcttatagccatgggcctttattcttatgcggaactgaacaccaatgctccccaatacatcacccaaactggagcatggcctacatatgcacattatgagttatctcctgcgtccaatgcctcttatgccagatctccaggatggagaccgcgaatgaatatacaacaagagaggtaaacaaggagcagaaagggcaggcaaacgttgccaaaacgggggagggcagcacaagcaagcatcggcaaacaccaagagatgagagcaaaaaagcgacacgacgagaaaggaacacagagagagctaagacacagatggggcaacggacaga

SEQ ID NO: 536740 - DNA, 656 bp, Homo sapiens
agcggacagcctcccaaggccctcatgggggccttgggcgggggcatcagccatgaccggaggtttagagttctggttccgccgatcgtcattatggggcgtcaggataaaaatcctaggcttccggacccaaccccacacgtgcatcagagtcatcaggaaactctggttgtagctaggctgccacgaagtgagctggttggaccgactgacttagattcaacatcggccatttcgcgtgtagcaaaagtgaatcccgagaagacacagaacttacctgaagtcaccaggcagttaggcaggcagggccgaggtcagaacccgggttatcttcagatgcctcgttccaccagcgtatcttgattcagtcaggaataccgcagtaatgggctgcccagagagctgcaggacaagcagcgcaggatgcacctccgggtagactactacgcctggagccacccaatagtggagggcagtatggtagtgggctagcccctggtggatggtaatgggggtcctgcccctggagggaccatatggaccaccagactggttggaggggcctgatggacacacccaaatcgctgggatgtaccacacatctggaactcaaggaggacactatggacggcgcagtacacgagaggcccactatg

SEQ ID NO: 536741 - DNA, 369 bp, Homo sapiens
acactacacggctctcagctctgggcactcagacatcatgagaggtgcctcgcacccccggaatttaaatctctactgctatgctcttttatattctctcttcaacatgtgtagcatatgtggctaccagagacacactggtgcatcttagatgaaagattcggtaggtattggccaactacctgtggcattgcagatattctggctacttatcaaacccaagtagacacagggtctacaggctttggaagacatcttacattaagttgaaaacacaacattagaaggcaaacagctgagagcgatccaacttacttataatcctgaggaatcattcccaatatgatagacactgttactttggtcccg

SEQ ID NO: 536742 - DNA, 140 bp, Homo sapiens
gcctcccttatccttgtttgactactccgcatccatcttgctatacctcaacttatctggcttttacagtatatgccacatagttctaatttagatcttacaacaaaggaagaaaaaaagacactggcctggagcatggg

SEQ ID NO: 536743 - DNA, 461 bp, Homo sapiens
ctagctaataagctgattccagtagtccgtgatgggtgctaagtcgacaaggaatggacttaattttgggaatacctagaaacctgacaaagcattgcttggggtgtgtctgtgacggtgtttgcagaggaggttagtgtgtgcatctgagtggaccaggtggggaagatccgccctcagtgttggcaggcaccagctaattgcctggggccctggagagaacaattacagaaggtgaactgtctctctcagagctgggacacactttttttctgccttggacatcagaaatttgattccatgaaagtgcattatcacattgactttgtaagccttgtgcatgtacataaaaatgttgaaacttcctcagtaaaagaggtgtgctatttgtgcacctgcgcttgtgaaagataaaatttctcaagatcttggttctttggttgactacttgtgcagtggtg

SEQ ID NO: 536744 - DNA, 735 bp, Homo sapiens
gagagaactagcctccagtccttatctttgatctaggtatctccctctgtgtgagggcaccctctattgctatctgtattaaccctatgaaaacaggaatacacagatgccactccacacatggacatttagcttgcctagaacattgagccagtggatatgtgaatgaattatatcctgtcccccaactgaacaataattccggttattggctcaaggcactggatcaaaaggggccttccttaactcctaacataataagaacaatgtggcacaagagctttccatacctctaaggacctaaaccattagtcctgagaacataattttaagggatactatatggaaaatggcgctacctaagaggtcatgagaatcttatgaagagcttgggatgctaattccatgaaccttagacaattccttgaggtcccggggatttctcaaaaattaaggaagaaaatctcaatctttatacacaaagcgcacaacaaataatggggttagtttgttgaccacaaaaccaaaaagaattatatggcgcctaaacgcgggggcctcttgggggagggccccggcccatttacaccccctattgagacctgttacacattactgggccctgcccttcacagggaagccacgggaaaacctggggttctctacgccttagctcttaacacaccccccctgttgccccagtgcccaatttcccgccccggccttgccccttcc

SEQ ID NO: 536745 - DNA, 290 bp, Homo sapiens
ctggccgtggaaaggggcctggggccctggttccggctgtgtttggtggtctggcttcggggaaggggcaaaaaggcgggcaggccttccctgcagccctgagcctcaaatccgctttggagcattagggtggatgcagtggtggtgaggccgccccgctcccttccgaggcagccaggggttgttttgggctttcctgtcccaaatgctgccctattgggttttaagttttttatttcccggtccttatttatgcctatgccaaaaataaatgacgccccagagctgga

SEQ ID NO: 536746 - DNA, 1381 bp, Homo sapiens
  misc_feature (361)..(361): n is a, c, g, or t
tcgcgggtgcgagtgtgcctggtggatatccctcggaccgggaccaaatagtggggcgggctgagaagcgacttgtggaagtgaacaagagtgcgagtttgagtcgccctctggtgctgggatattgtggttgcttcctgttccatgtgcaggacatcacataatggatctaagtactcatgagactgttcacatcctaaccagggcgtgcgcatacattccacaacgacgtagtacctgttagccatgtggggaggtgctgtacaacactgcttttttcatgtgtcgcgaactggaagtcgtacgtcgacttgggtgtccccaacacagacaaggtggatggtcccactgtggcaggcanacctgggaagcacgtatgggtgcaaacgtgtctcaaataagaggtaggtgggttcaccatacggcgacaccacatggacgatttaccatgtacccaattcagaccggcatatagaggatggggatatcccgggtaaggtcccaccttcaaaccaggtggaccgcttgttctgcccttccatgaaccattggctctaacccctaaagataataagctagaaaaagttcgcgtgacttcggggagagcggcgggttacggttatgtgtgtattttctgacctagaggaggtgttaatgggtggtttggtgtacaagaggtatacgagcgtgggtaaatgtgcggtacggttaaggccccaacttcatttggggtaagtgtacgtaaggtgaaggttctaacaaatattaagaaaggttgccccaaagtgtaaggtggcattttcttaggggagggaaaaggaagactaaaaagccgaggacataccaactaagaaaggggacattaaaccgggacacaaacaatgatggagccggcaggcaagagggaaagccggcttggtgcacgcaaaaggaaagaacatcttcggaaccaagaggagtggagcgcgccacgcgcaacgtcgtactcattaacgagaggaaaacccccaacgggggcacctgacgcgtggggcaccaaggagaagagcgcggcgaccattaaacaaaggaaacagttgcggctccagcggttaccctgtaaccgaacgaagcacgatagagaacaacagagaggggggcgcgagcgcacgcggtaaccaacaaacaagggactactacgaccaactcagcggagggcagaaggcagccctaggcggccaacatcacaccgacgggacggaaaacacccacaggggcagaggaaagcacatgatggccagcacccacacaacaaagcgtcggcgccgcgcaggtagaggtaggtacgacagcgacaacagatagagagaggagcgaacacgacagcctacaaacagagacg

SEQ ID NO: 536747 - DNA, 166 bp, Homo sapiens
cccgattaccgtcgggcgccactgctcgtgattgacccttgatcgacggcgctaacggatcgcagtcggcgtccacgcggaacacgcaagcccgcgtggtggaggtggcgcagcgcttcccgcaatacgacctccgccccttcaacacggccagcctggaaagcaa

SEQ ID NO: 536748 - DNA, 821 bp, Homo sapiens
taaatcaaaaggctgttaatggacaaaatagggtgtcacaaatacttcatttatagggagagaggggacttgaacaagtccaaaatcttatactcgtgcacagaagcccagcgagggagtgtcctctctagaagagtggtttatcaggggtaccccagtgagaagggcagcctccgtgatgcagcgtgccggaagaagcatcgcacaaccgggtcccctcttccgtgggtctcttccccgagggttagtggataaagtcgtggccgtggaagttaacgcgagcgttcccgtgaagtgcgcctctgtggacagtctcaacctttgtgcaaaactagtctcgtgggcctctccagtgggagggtctcctcgacagtggcgagcctctccaagaagcctttcgtgcaatattctatccgggcggtgaactcggataggaaagctgtgcgtgaaagcccacctggtggccacttggggcccacttaaaacacacagtgggccaccgaacctttgggtcccagagaaatagcccccggaacccgccaaggaggggggctctcgagtgcgccacggtgtggaagacaagacctcacagggcctgtggtcccgggagacactctccccaaaagaaactgggatcgccgggcgcgcaaacaaacgccaaaggtatccaagggacgtggtctactacacagaggggcccaacggtccctgggtgaacccggggcgcactcccctttgggaaagagggcgccaaagaacgcctttggccaaggcaacaccattgggggcaacgccgcagatggggtatgggggagaagact

SEQ ID NO: 536749 - DNA, 262 bp, Homo sapiens
agacgtgtaggtgggtaggtgggtgatatggatcagctctgtgtccctggccaaatctcacactgaatgtaatccccactgttactggtggggcctggtgggaggtggatggatcatgggggtggatttgtgatgaatggtttcacaccaccccttggtgctgttcttatcatagtgagttctcacgacatctggttgtttagaagtgtgtagcgcctcccccctcactctctcttgctcctggtcccggcatgtggagaga

SEQ ID NO: 536750 - DNA, 182 bp, Homo sapiens
  misc_feature (25)..(25): n is a, c, g, or t
gaaaggtgatccttgttataaagtngcaaataagctggatgtggtggctcatgccagtaattccagcactttgggaggctgagctgggaggattgcttgggcccaggaggtctaggttgcagtgagccatggtggtgccactatactcagcttgggtgattgattgagaccctgtctcaagt

SEQ ID NO: 536751 - DNA, 519 bp, Homo sapiens
  misc_feature (25)..(25): n is a, c, g, or t
  misc_feature (131)..(131): n is a, c, g, or t
  misc_feature (135)..(135): n is a, c, g, or t
  misc_feature (148)..(148): n is a, c, g, or t
  misc_feature (154)..(154): n is a, c, g, or t
  misc_feature (168)..(168): n is a, c, g, or t
  misc_feature (170)..(170): n is a, c, g, or t
  misc_feature (172)..(173): n is a, c, g, or t
  misc_feature (181)..(181): n is a, c, g, or t
  misc_feature (186)..(186): n is a, c, g, or t
  misc_feature (195)..(195): n is a, c, g, or t
  misc_feature (199)..(199): n is a, c, g, or t
  misc_feature (212)..(213): n is a, c, g, or t
  misc_feature (217)..(217): n is a, c, g, or t
  misc_feature (228)..(228): n is a, c, g, or t
  misc_feature (235)..(235): n is a, c, g, or t
  misc_feature (241)..(242): n is a, c, g, or t
  misc_feature (276)..(276): n is a, c, g, or t
  misc_feature (309)..(310): n is a, c, g, or t
  misc_feature (507)..(507): n is a, c, g, or t
gtattgctgccattgtggggaaaantactgcttattttcatgacattttcagaacttaactaggtaaaatggggatactaccctgtgcagggttatgataattaaatgagacacttttaagggaaaagaanctgncatagaacctggnacagantgggtatacaaganangnntaattttnaaaantaaaaactnaggngggtaatatacgnnatanggggagaaagnaaccaanccaggnnaccataatacatcagtagtagaatgtggggtgcngcctacactttccactgtgaattgcttgtattnntatctcaacaatcatataatgtttgcagtttacaaatatgcatcacatttactctttcacttaatcattgatacaactgtgagacaggtagagtgcatgctgttctccccatcatagagataagggaatggaggcgcgcaatattttgtcaatattttatcaagatcatagtaagtggcagaataggaatttttacncctaatataagg

SEQ ID NO: 536752 - DNA, 215 bp, Homo sapiens
aggatgaggtgtgagagatggaagtatgcctctcctcatcctcccttcacctcgaggatgccctgtgggagggtctgtagtggtctgtgtccacctcctacatctattcacatgcaggtatgtgctcgaatcacgaagttcacttgactgactttgtgcatagtgtttctggtgttcccaacttaggaaacgacgtctctagacacgtggtttcc

SEQ ID NO: 536753 - DNA, 205 bp, Homo sapiens
  misc_feature (8)..(8): n is a, c, g, or t
  misc_feature (37)..(37): n is a, c, g, or t
cgatcttnaacacgcaatctgggtgcgcacggcgttnggccaaaaacgggactggccacggtgagggaaaagacgctggataaaacccgatgcacaggccatcctttgcgctttaagccgcgctgtgcgcgggctcgaggtttaaaggaaatgccatgcacgcccaaacctcctcgctccccgcacgactttcgaaattccattg

SEQ ID NO: 536754 - DNA, 213 bp, Homo sapiens
actagaggacccattgagatgtgcagcgcgagaggtgtcagcaagacgcctgagtctacgcttcacataagagcgcgtgaggatgaggggctcagggccagatcaggcgtggccggaccaagaagaacggtgctggacaagtgtcaagaggtcatctcgtggctggacgccaacaccttggccgagaaggacgagtttgagcacattcttaat

SEQ ID NO: 536755 - DNA, 521 bp, Homo sapiens
  misc_feature (2)..(2): n is a, c, g, or t
  misc_feature (49)..(49): n is a, c, g, or t
  misc_feature (62)..(62): n is a, c, g, or t
  misc_feature (74)..(74): n is a, c, g, or t
  misc_feature (106)..(106): n is a, c, g, or t
  misc_feature (127)..(127): n is a, c, g, or t
  misc_feature (179)..(179): n is a, c, g, or t
  misc_feature (198)..(198): n is a, c, g, or t
tnggggggccccgaaccccaggcatctgacccatttagaccatgctcanccaaaggttcctnggaagaaacccngagggaaggagaaagcctcaccaaaaggaaancaaatgcctattttatctggncttctcacttctacggatagttgttttcacttaaaaaccaaatcccccaaantgtttccatgatagggccnaagtgacttttaaacacaatctagtttagtagatagtatactatactattttaagggccaggcgtggtggatcctgcctgtaatcctagcacttcgggaggcagaggcaggaggatcccaggagttttgagaccagcctgggcaacatggggagatcctgtctcttaaaaaaaaaaaaagtgtactatactattttaaatgtctacttttaaatgaattcagtgttatctgttatttttaatgttatttttcagatcaagtttgaatattaattgtacatgtaatggctaaaaaattaaatcatgatttgagatcttgattat

SEQ ID NO: 536756 - DNA, 216 bp, Homo sapiens
gtggtcgcctgtatcccagcacttggggaggccgaggaccgtggatcacctggggtgggaagctcaagaccagcctgaccaacgatggagaaacctcatctctactaaaaacacaaaattagctgggtgtggtggcacattgcctcattaatcccagtctactcagaaaaacatgaggccagaagaacccggcttgaaaccacgggcaggcggaag

SEQ ID NO: 536757 - DNA, 716 bp, Homo sapiens
agaccttgacactatgtgtctcgaaggaattctgccacttgatcgtattcacaggagccctggtaggctcctttataaggaccatttctgttcctagagcttaactagaattcattcttcactgaaaaaaaaaaaagttacttaagaaagcatttcgtttccataagtcatcactcaagatctgcagaagttattgtggtacatttagtaattacagaactctggccaaagggagacttgtaaactagcgtaaagtggtgtcttatgctaaacggttggcaaatgtataggcacgagaagcctctttgaagttgtcagcactgagctgggctcagcaagcctgagttcaaacaggcgtgtcggtcctccatctcaccccttaagtactggtgcagcccaaacttcctaggactcttgaacattctgagcagtattggtgctttgagccacttttggacaaaaatggctccatttttccacagcggggtttctcttaaacactagtttaactgtcttactagtctcatagtacgtagtgtggctttctaacgctataacagctcgacttatatccttctactctgaaaaactcttgacttgtctggacgtgtatatacatatatataaaggggagccttaatggatgggttctcataacttaatactctcggtactcgcccctgtataatggtccacaacggaaacgttcacacgaa

SEQ ID NO: 536758 - DNA, 1016 bp, Homo sapiens
aagcagtggtatcaacgcagagtgcccattacggccgggcggcggggtcacgcctgtaatcccagctctcagggaggctaagaggcgggaggatagcttgagcccaggagttcgagacctgcctgggcaatatagcgagaccccgttcgtccagaaaacggacaaacaagacacacaaaaaaatgtgtttgggccgccttgggccgtggaaaaggtttactaaaccctttctcgttgggggggcggggcccaaagttgggtataggtgaaacgtgggcaaaaagcgggcgtcccaaagagaaaccccggcccattggacaaagggcggggttcaccaccaatattaaaaaaggccgggcgggaaccggggcggtttgggaacaatccccagggcggggaggtcgcagagacggccaaaacaggggggcctcaacttaaaccaggggaggcacaaggggggacggcggaattattcaaaaatctaacgccccggggtgtgggtaaacgacaatagaatcggacggaaacaacacacaggacaagaggacagcagcacagcatcaacgtactgaaataaaagaacagcacgcgaagagaacgcagaacacacagacacacagacactcaaagcagacactacatcgacaagacacagcaagcagacgaaagaaagtacgacacacacacaggagaacaaaccgatagcaggagggagcaccaaacagagaaagacggaaaacgattcgaggagagtactgaacgacgaccaaggagggacaacaaacaaaccaaggcgtccacacacaccagtcaccaggagcatgatgacagataatcagaagagtgcgacacacacgcacgctgtgtggcacaatatcacacgtcccatcagaaaaaacccccgagacggacgcaacagggactgcaagattgatgcgacgcaaacatcatgcaacctcgacgtcggacccgtgacgacaagcagacggcggaacatcacaggcgagccaacggaa

SEQ ID NO: 536759 - DNA, 1288 bp, Homo sapiens
  misc_feature (1)..(1): n is a, c, g, or t
naccccccgcctgcgctcggcggctgggtgggtaataaacagaaggccgctccttttattgtggaccctcctctcctacgttttctctcctcttgtgtggatacctccccctttcgctcaccccccgcgttgtttgtgggaccagccccccccctcttggtaatgaaactccctctctcggggggtcctacaatttactatccccctcctctgccgggattgttttttgtactcttgtagtgtctctcgtctgggggcgcggtggtagttactccactgttgtgttgcacacacccggggggtgccatgctgttgttgtggtcgcccctttttggggcccgcattttttttagtgggggcgccaccctcttgttatgacacaccagggtgtgtgccccgccacaatatctctccagggcttgtttgtttccccggtgtccgcgggttttttccccggggggatttttttttctggtgaggctcccactacgcgcgctttccgcgtgtgttctgccagcgcccacgacggtttttttctcttggggtttctcccctcctgaaagaatgtttcccccgcccacacaattttttttgcgcgcgtgatatcttcctccccccctctactcctctctgatttgggcgtcgcgccggcgatatatttacagctccctcttttctcacacctctctctctccgcccccttttaaggaggtgtttttgggtgcgccccgcgcagatatatatatgtcctcacatatctgtggggttctgtgaggagtatgtcacgccccctcttgtcccctcttctcccccgagaggggcgcggaggagaactttctctctctcgcgagagagagagagcgggtgagatacactttgtgtgtgctctcccccttttttccgcaatatctctccgctcgcgctcgctccacaagagagtctccccacagtggttgttctttgaacacaccaccaaaagagagattatataagagagagtgtggaaaataacacccccgcggttctttcgcccacagtgtgttttgtgagacgcacacacacacgcactctcctctgatatataccctgtgggcgcgctgttaaaaaatttgggcccccagagagaggggggtggctcacacttttgtggcgccctttttttctcggggcgcccccccccccagacccccctgtgcccccctggcgcccccccgtggggtgttccccaaaaaaaaaaatttttgtgtgccttttttttttaaaaaaaggttttaataccctctattga

SEQ ID NO: 536760 - DNA, 104 bp, Homo sapiens
tctggaaaggggagctgtggctctttaagggtacccagagactctgtgagaacgtttgacacagttcaagcaccttgaatgtcagaggactgagatgaatggcg

SEQ ID NO: 536761 - DNA, 421 bp, Homo sapiens
actgacaacctatggaatgggaaaaatattttcaaactgtgtatctgataacagggcgaaatccagaatatacaaataactcttacaatgcaacaaaaacaacaaccatttttaaatgagcaaacagatattttttcacaaagtgaaaagatacttaacatcattttcatgatttgcattagagaaatgccaaatcaaaaccacaatgagataccacttcacaactactagaacggctttatgataaacacaaaacaaaatgggctgggtgaggttgggctcatacctgtagtcccagcactgtgggaggttgagggcaggaggatcatctgcggccaagagttcaagatcagcctgggccacatagtgataccctatctcttaaaaaagaagaagttttaaatttgacatacttataggt

SEQ ID NO: 536762 - DNA, 250 bp, Homo sapiens
caggtaaacagctacgaatgtagggacactgtatagctgagcagtgtttacaagattgcttccgggactaagcaggcagggaataggcagacacatgtccacattaccacagctgcggccaattcctcagaattatataacagcacgaaacatttaagagtattttaaatctgagagctctaagtgttccgctctactttttcgcattttcagaattctgtacctgaacatctaattcctttcaaaacta

SEQ ID NO: 536763 - DNA, 457 bp, Homo sapiens
cgtctgactccgcttaaggcaataacctccaagtgacatgcctaattaatgacaccagtgctgatattcaaagacggatctctatgacccctaagcctgagctagtttatgacacgcacacactgatatgccagagagaaagcatctttttctccttcaaggcacccaatatgaaaattcaacgagctgacagacatctgtctggggttgaaatcatctgcctttagaagacagggagtgcctgcgtggatactcagttacccacgtgcatgtgggcatgtgggtaactgcagagtgggggccaaaactgagcttgtaacgtcatcatcaagaagcccggtgtcatgtatttgtcaagagctaaggacgctcccttgcccccatgagctcctgatactacagcgctatactgactggccaaggccctaaagcggaatcaggaggtacccgagcgtcg

SEQ ID NO: 536764 - DNA, 404 bp, Homo sapiens
aatcctctggggagaggtgtgaaccacacgccactccacgcccaggtgccggggtgcataatacaagaacagagttcttccggttgggatggactccgtaagatatgctttacccccagatgtataaataagggcaggttctatctagccgtagtccatcccgctcgttcccgcagcttgggcaagattgtagtgggatggtcccagcgtccagcccagagcgccctcggcacaaggagccatttgggataagccgttgacccatgtctcccagatcctcagcaggtccaccttagcccatcccagttaatcccgtgtcatctgagatgggattccctcatcctttgagttggaagtcccttctctagtcttcaataaagtcttttgacccttgaatcacatta

SEQ ID NO: 536765 - DNA, 204 bp, Homo sapiens
  misc_feature (55)..(55): n is a, c, g, or t
  misc_feature (59)..(59): n is a, c, g, or t
  misc_feature (61)..(61): n is a, c, g, or t
  misc_feature (67)..(67): n is a, c, g, or t
  misc_feature (74)..(74): n is a, c, g, or t
  misc_feature (84)..(84): n is a, c, g, or t
  misc_feature (94)..(94): n is a, c, g, or t
  misc_feature (97)..(98): n is a, c, g, or t
  misc_feature (112)..(112): n is a, c, g, or t
  misc_feature (122)..(122): n is a, c, g, or t
  misc_feature (187)..(187): n is a, c, g, or t
  misc_feature (191)..(191): n is a, c, g, or t
  misc_feature (196)..(196): n is a, c, g, or t
agttcggaccactgcaccaacactgtcgtatccttgttaaaatggtgtgtacctnacananttatantttatgngccaggttcnttttgtactnaanncctattattgtgangtgtataaantctttaatcttggttcttagtactttgatttggtctacaggtatattcctgggatgaaaggattnccanacccnaatataga

SEQ ID NO: 536766 - DNA, 718 bp, Homo sapiens
cgcagtggctcacgcctgtaatcccagcacttgggaggctgaggcaggcagatcacaaggtcaggagatcgagaccatcctggccaacacggtgaaaccccgtctctactaaaaatacaaaaaaaatgagccaggcgtggtggtgggtgcctgtagtcccagctactgtgggaggctgaggcgggagaatcgcttgagaccgggaaggcggaggttgcagtgagccgagactggccattgcactccagcctgggcaacagagtgaaattctatctcaaagaaaattaaataaaatacataaattagaatgtagtggtacaatggaatattatacagcagtgaaaatgagtaaaataaagctatatgcattaacatggatgaactttacaaattttgtgtgagtcaaaaacaaaaaacaacaaaaaaaaaattgggggggggctggggctggaaaaagtttttaaaaaacctttgttggggggcggggcccattgggtatgggaactgggccccaagcgggcaccaaaggaaaacccggccggcaccaggtgcggtttctccaccaaaaaaaagggccgggaccacggaccgtgtcggaccacccagaaggtgtcgggagcggccacaggggtctaaccagggggccagcaagtcggtaataccgcgcgggggggggaggaaagacaaagcaagaagaaggcgacgacagagacgacaa

SEQ ID NO: 536767 - DNA, 1298 bp, Homo sapiens
tttttttttgcgcgcccgtcgctttgctttcctctcccgtgcgtggtgtgttttgttctcgtcgtccttgctctaggtggctgcgtcttctcggtgggccggtccccctgtgttcctgtggtggcgtgtctctcgtcggtgctctgtctccgccgccccgtcctctcgtttccgtttctttgggcgtgttctcctggttgcttgtgtactgtcgggcctgcttgtcggttcggtgtcctctggttgggggcttcggttgccggttcgtgtggggctgcgggctctgggggctggcctcccgtcgtgcttgcgtccttcggtttcgtctggtgctctcgtcgcccttgcactggtccgtgctccctgctgctgtcttcggtggctgggggccgcggtatgtttgttctgggagcccttcctagctgtccgttgggcgcgggtgggctttcctgtgcgggggctgtcctgggtttgtgtcttccggtcggttcccggtttaggctcgagtgacgctcgtggccggctgtggccgcgtcgtgcccgcgccctctgtagtctcgagctgttccgcccgggtcgcctcgtatggtcgtcggtctgtctccgtctcccccctgtcccgtgcttgtgatgcgttcctgtgtgctccgtagttcggggtctggatgctccgtgtcgtgaatcctggggctccgcgtggggacgcgtgcgtatgctccggctgtcatgattattggtgttcccgtgcctgtgtcctgatagtcgcgtccgacctcgagtccccgcagaggatagcacaagtgccactacgcgggtctgcgagtaaagtttatcgggaaatcttcgcacctcaaggctgcacctgagaactctacacaggtgtagaggcccgtcgcctgcagtctggcaggactgcaaccaagaagttctgcgcgctgcgcgacgtagctggtcgcgtgcactaccgtcacacacacgggcgatgaagaagttctagctgccccatctgtcgagatagcgcttcatgcgctagctgacctacctgtaccaagcacgcgtcgcctgccacgccaatcttccaccctgggaatgctgcagtcggcgcggtcgtggggcttcgctggacctggctccctcgagcgactatcagccgctccgacgtccagcagccccaccatcagcccggtccagctcgccctgagcccgccacagtccagtgagcatgcctgctcccaccccctcgtgagttcctggccgttccttttgtaataagaatagaaaagagagagctggatgca

SEQ ID NO: 536768 - DNA, 385 bp, Homo sapiens
  misc_feature (94)..(94): n is a, c, g, or t
  misc_feature (119)..(119): n is a, c, g, or t
accttcgattgtggactcagagccgctgtggggaggaaattgctgttcagttcgtggacatggtgaaggggaaatctctcacgggggttgtgantgcccagtcgccttaccatgtgccnttctctccacacaccaatgccttggatttggtcttggcagacagctactgggtgacacttgattgcgacgcctgggcttgggtcccccaagaggaccaatccagtgtgataaccacatgggacacatcccctgacagaactgcttgggaacttgcctaatgccccgcaggtcatttgtcgcggctccgtgaaaggaggctttccaagccagggcggattgtgaaccttgtgtgacacgctaaagcttgctgggtgaaaagcaggct

SEQ ID NO: 536769 - DNA, 257 bp, Homo sapiens
  misc_feature (24)..(24): n is a, c, g, or t
  misc_feature (47)..(47): n is a, c, g, or t
  misc_feature (69)..(69): n is a, c, g, or t
  misc_feature (99)..(99): n is a, c, g, or t
  misc_feature (118)..(118): n is a, c, g, or t
  misc_feature (163)..(163): n is a, c, g, or t
gtggcaacttctctcccaccgggntctacactgagaggtaaccaggncttgtgcatgcccttgtgcagnaaatcaagggcccttgaatttgtcactgtncgggcgcattttttataanattgtcatatagtgcactgcacaaatattgtattactgtacatanagagaacaggtgggcatttttgggctacctggttcgtttttataagattttgctgggttggttttttttttaattaaaaagttttgcatctttt

SEQ ID NO: 536770 - DNA, 114 bp, Homo sapiens
tggaggacttctacccggaacatcagcagcgaagaaaaggcttcgtggactcgaccagagaagcaagagactctggatgggcacatggtggtgcgtagccatgcccgtgtgtcg

SEQ ID NO: 536771 - DNA, 449 bp, Homo sapiens
ggatccccttcgaggagctcagtcagtctgattctttattttatctaatcttactttgtggttggttcttttgatttctagatcttcaggtttggtgttagattggtggattggagatttttctaactttttgatgtgggtattagtgctacaaactgtttactcagaagtcattcaggagtgtttgtttaatttccttgtaattttatgattttgagtgatcttcttggtatcggtttcaatttttattgctcagtggtgtgacagtgtggttggtattatttcgtatttttttctcaatttcctgaagattgttttatggctaattgtgtggtcaatttagagcatctgcaatatacaaatgagaagaatgtatattcttttgtttttggctgaagagttctatagatatctgttaggtccatttggttgaatggtccgtgaagttg

SEQ ID NO: 536772 - DNA, 154 bp, Homo sapiens
tccaacgggccctcggccagcccaccagctctgaaccccggtgataggcgatctcatagccatcagggttcatgagtgggcagcaggtgaatgcgcatctcagagagcagccgggtcaccctgtgggtacccatcgcaggaacctcatggcaca

SEQ ID NO: 536773 - DNA, 243 bp, Homo sapiens
ccccccaaaaaattttttcccccccccggggggggggggggggccccccatttttcccccccccaaagcccaaaaggggggggccttttccccgggggttgggggaaattttttttccctggcccttctccccccccctgggtttttttttttgcccccccggccggggcccaaaccccagggggggttccccccccccccaaaaaaaaaaaaaaaaaagggtttttttttttttttttttta

SEQ ID NO: 536774 - DNA, 108 bp, Homo sapiens
gcatgtctggacagtgtgtgactcttgtgtacgtatgtctatgtgaatgtgtgcatatgtgtacatgtctgttagtatgtgtgtgtgcctgtttgtggaggtagcact

SEQ ID NO: 536775 - DNA, 117 bp, Homo sapiens
aatccagtgaaccatctatcacgaataaaaattctacctctttctactattctctcctacataatctcctacagtataagattcacagcctcagaactaattcatattcgatatcta

SEQ ID NO: 536776 - DNA, 411 bp, Homo sapiens
tatatataataactatatgtaaacttttatacacaactttatatatgtatttgtatagggaacaatgtgtctgagctgtgccatcttttcccaacaaattggaattattttttaatttcatgtaaatgaaagcattggggtctagagcttctttgcatgaaagttttttgtttgtttctgtatagaataaaatataagtgtatgcaaagtttttagtatctatacctcaaatggataggaatattcagttttccatttttttgtgcatttttttaacattttactttcttaatctctataacggtccagaaatgaaagaaaggaatgttcatagtccatacagaatacaggataaaggtctgtattctgttttacagagcaatttttcccctctagatgtgatatttaatc

SEQ ID NO: 536777 - DNA, 230 bp, Homo sapiens
tatcacttacatcatatcttaatggatattagacattacattaatggtatattaatatgttagggcttagtctgctatttatttttgtttctgtcatcatagttgttaggatatagctcctctctctctcacactgccggtgcgaccccggggcccccaattccacactcaacacaagctctggccaggaggctggcccagggcacagcatggtcggcgtcagagagccc

SEQ ID NO: 536778 - DNA, 272 bp, Homo sapiens
gcatgtgcgtgggcaagccgtagtgtgtggttccccagtggtgctctaacagatcaccgatcttgccatggcttacgaagctgcagattatatattgttacagttctgtgaagccagaagtccacaatcaaggggtcatgtagagtctctctctctgagacctgctgaggatgatgcccctggcctctccccagcctctggagtacccagcaggccttgggattccttggccttggtagatggcaaactccgatctccacctctatcctcac

SEQ ID NO: 536779 - DNA, 387 bp, Homo sapiens
agaacatggtcataatatttaaagggtgatttcactttccacccactcgctctagcttcactacaataaattcatcttcctatgacggcagggtggcatagcccaagggcaatggtcaaggtgggcctctcctgacctgatccctcattaacatttatcagctcccaaggtgaatgttctcaagggttatccagaaatgctggggtggctctacgtaagcgtgcagaccccttgctctcagaggcacccctcaggaacgccatcatattcgctcattcaccactcgttccctcctatctccccttgtaccggtgggtctctcagtgtcgtcattctctgggttgtgtccgtcatgcccctgaaaccttgatctatactctctggctc

SEQ ID NO: 536780 - DNA, 422 bp, Homo sapiens
cgttacctggttttatattctttgaaattacgctgagatgcatgaataaccagctcagggacaatgaagaaaccacccctagtgtaattacagctcataaacacgcaacttacagatggcccgtgtgcatgaacctccggatgctggctcctctagactctgcacagacaggcagggcaggaggcagtcccgcctacagggctctctgtctcccagtataacagcactgttttatagcgattgcatttgtttagatattctcacatcagagtgggatggatgtggccaggttctgggggaaacatcaccactttgcctgccactgggcagttcagctggactagttagtgggccatggtgaccttcgctgcccacgtagatgagcaaactacaggaagagacaactcatagaaggtgagagc

SEQ ID NO: 536781 - DNA, 881 bp, Homo sapiens
  misc_feature (342)..(342): n is a, c, g, or t
tgtctgtctactcccccctgttgggtggtctctcaggcgtgccatctgtgcctacccccgcagtttgttcggcccccgtttttctacggggggcgccccctgttgtgacaccgggtgttggttccgccgggtggcggcgagccccccgtgtggcccgcccttttgggtagacgccaacgggttgccctggtctccccccgagttgcgggggcagtctccccccctatggggggcgcaaccctccggtccacccatgcgggggatatcatgcgtgcgtagtggggccctcaccaggggttacccgcgctgtctttttcgtcactcaagacttggctcaggcancccctccgtgctaacactcgccgccactattccaaccccgcgcggggcatcaccacttcccctttgagggtccccctgggcgccaccgcacgtgcgcccatgtcttttccgggcctaggcctcaggacgccccccgattgtcagggcacggccccgaatgtcctctcgtgcatctctctctgcagcgcggtgagtttatttgacgtgagtcctattgtcacttcgttgaaacgtctcccccctgcggcggtccccgcccttgagatgcagacctgctgtggccactcttctatgcactcgcagcgctcttctcgagcacgcccggttgttgtgggctccccgcctggggaggcaccgagtctcctccctttcctttaaccgtctcatcgtacggcccgggccccatgcgtcgctccctcgcatgccccgccccggtggtgcgcccccgcccggctgcgtcctccgtcgcgttcccagggcccgtctgcccgatcccggcacaccccggggaatactcctttgcttcgcacaacaaaacc

SEQ ID NO: 536782 - DNA, 237 bp, Homo sapiens
gggcacagtcctgtggccccagcgcatgctcactgctgtctctcctgcgagggcgatcccggctggagaggacgttatccttcaccaggcgtcagagattccacaagtgtctctcaatatcagtcagcaggtacacgcgtaaacatggagaagtacaaattcctgggtatctccatagggggccagagcaatgagcggggagacggaggcatctacagttggctccatcatgaaggg

SEQ ID NO: 536783 - DNA, 520 bp, Homo sapiens
  misc_feature (307)..(307): n is a, c, g, or t
  misc_feature (422)..(422): n is a, c, g, or t
  misc_feature (479)..(479): n is a, c, g, or t
  misc_feature (486)..(486): n is a, c, g, or t
tgtgagcccagagctcctgacaaagccacccgggcagaagctttttgttttggccaaagttgatgactccttccttccttccttcctctttaacaagccacaagaataaaaggaagcctccatgaagatggatgtagacacagactgttgctagcctgacctcattatggggattagggtgatcttcaaggcctttctggtctccgttctcccatgcagggcaatttggactgtttttgccccaggctgtttagctgccaggacaacactggcagagagaggctgaggcgctgggctgcagtagcanaaggcaacagcctgatgccctgtgacagtgccccaggaaggttttcaggcagtgccttgctccctggaaccctgacccaccgtgttgcctctgttgatttggccagtactgtcantttccatcctggaagaatgtgtttggaaatcagcatttaataaaaaacccaaattcngaaaggntaaatttgcttgcctgggaaaaagggcttttacc

SEQ ID NO: 536784 - DNA, 319 bp, Homo sapiens
  misc_feature (9)..(9): n is a, c, g, or t
  misc_feature (40)..(40): n is a, c, g, or t
  misc_feature (124)..(124): n is a, c, g, or t
  misc_feature (204)..(204): n is a, c, g, or t
  misc_feature (258)..(258): n is a, c, g, or t
  misc_feature (296)..(296): n is a, c, g, or t
gaattcggnacgaggagagagagaactagtctcgagggtnagggataatgatggggtgaggggaagtggaaaacaaaacctcacaacagcactcccagacagttctgtgccttttacccatggnaccatgttgcatgcatttgggacttagaggccgatacaggctattggagaggctgcttataaaaaatcctaaccccctgncctactcagtgaagaaaataatctcttttatggttgcaagtgtgagaatgaatnttgtaaatgtaatgttcataaatttttaaatgaacttncttgaggatgccaggcccttaaa

SEQ ID NO: 536785 - DNA, 189 bp, Homo sapiens
  misc_feature (136)..(136): n is a, c, g, or t
ctcaaactcctggcctcaagcagtccttccccctcggcctcccaaagtgttgggattacaggcgtaagcaccaggctgggccttaaacttttcaatggatctatgcttctcttctgttgcttttttttttcgaggnactccagctctgtcggccaggctggagtgtagtaggtccaatctcggctcact

SEQ ID NO: 536786 - DNA, 247 bp, Homo sapiens
cccaaagtgtgggattgaggcgtgaaccaccgcgccggcctatatatcttttctttgagacaggtctggctctgtcgcccagggtggctggagtacagtggcacaatctcagctcaccacaacctctacctcctgggctctagccatcctcccacctcatcctcccaagtagctgggactacatgtgcatgccaccacacctagctattttttgtattttttgtagagatggagtcgcgcttgtcgt

SEQ ID NO: 536787 - DNA, 160 bp, Homo sapiens
atagctgctggccttctcactctaccttggactttgtgcagcttatctttcctttttatctgggagacagcccattgccttgacgccaagacaggatcgcgctgccgcaatctgagactcagtgcaacctctaactccatggtatcaagggacgatcctg

SEQ ID NO: 536788 - DNA, 185 bp, Homo sapiens
cgacttagaccccaggaggccatggaaactgtgatcttacctgtgatcctgagactccggacacaagctaccagtgttggatgattggtcagagcctccctatgactcacaggtttcagctgtccgagtccaacaggaccctctttctatttggtgtcacccagtattctgcaggaccctatgaa

SEQ ID NO: 536789 - DNA, 227 bp, Homo sapiens
agcacgactccgagcctctggtgatagcatcagggctgtgcagtttgaggtgggtagttgagctcgtcaggaaccgagtccattgcgcttggatctcctggctgacatggaaggtcgacgtcccaggtgtcatctttccgggcgatgaatgtacattgttcccgaagtgcctgggaggcgatcgagtagtcgtcagacttgatcctacaacgtcgacgtgtagaact

SEQ ID NO: 536790 - DNA, 1182 bp, Homo sapiens
gaacatctacacagcttatgtggacctggaaccaggacttctgctgctgaggttgtacatcctggagacctgagacgaattctgttgatatgtcagcactggagacaatgttgcatgagatccaaatccagggaaaagtttaataccaccatgtcactgtaaaaagacgtggccagcgcatgcctacctcagatcctctcaggagcatgaagccaaatggcacggaatggcccatgtcgctagagcaattcaggaacgcgaggagcgaggtcatcgcgcatgcccggcctgggaatagtaccgatgtgtgcggtaaaactcaatcagcgtgatggaagaaagcgagccgcagagtggcagcacgagcctggtaatgctagagtaagagttgatcgctggcgggaaaagctgaaaaccgacggggactagtagtgtgtgacgctgcggcctgggcgtaaccatgtggccgtgagtccctcaaagagacgtgaggcgtaagcaatgggagacactgcgttggggtcagggtacgagtggttccgtttgcaaagccttcgaaatcctctcaagaaaccgatggacaaacgtgaattgcgaatgtttgccgccacacgagatccatggggcgtgttcatgggttgtatgccctatccttgagttgatgcccaggggggggcatctcaacacttacagcgaccaagggagatgggaaaggacccgtacgtggtgagggcctcgtacctcgtgattggagaggcccttgccgtgaacttttcccgtggtgaatccgggaagaacaagcggagttggatcaagtggatagaaaccagtggcggccatacatttggaagccaataccgtggggggcccgcaaattgcgcacaggcagattgaagacgtggcaccggacttcttacaagggctccgcgcataccgggaaaaagctggacaagacacaggtatccgttggtccttgcaatggaaaacgaggttttgggcagaacgatggccttcgggaaccctttttccaatacgacaagttcgagtaccgtaggaagcggagaaggttagacagaattacgtgacacaccacattgcgtagagtcacaagggcttaaaaattcggaaaaaatatatccaatttgaaaccccagagaggagcgttggggcggatcattccca

SEQ ID NO: 536791 - DNA, 675 bp, Homo sapiens
aggaacagtctgagatctaagtaagatccatttcctcgctctgccgcagcagcgtcattttagaaggactgccaggcacaatgaaggttctcttactaaaagacgccaaggaggatgacagcggcctggatccatatatccaggagctgcgattgtgtggcctagaagccacacatgaattcctgtgctgtcatttgagtttatgtctctccccagtttgtcagaaaagctgtctcatcctgaaggctttggaggactcattttcaccagccccagggcagtggaagcagtgaagctgtgtttggagaaggacaataaaactgaagcctgggagaagtctctgaaagacagatggaatgccaagtctgtgtacgtggttggaagtgccaccgcttctctagtgaataaaattggtctggatgcagaaggagcgggcagtggaaatgcagaaaagcttgctgaatatatttgctcaaagccatcttcagagctgcctcttctctttccgtgtggaactatcaaaggagatactcttccaaaaatgctcaaggacaaagggatccccatggaaagcatgcatgtctatcagacagttccacaccctgggatccaagggagcctgaagagctactatgaagatcagggtatcccagccagcatcacgtttttcagtcc

SEQ ID NO: 536792 - DNA, 361 bp, Homo sapiens
agggttgcttggttcacagaatggtggcttatggacgctttgaagacacataaagaaacccacatggtaaaaggctgggtgcggtggctcacgcctgtaatcccagcactctgagaggctgaggcgggcggatcacaaggtcaggagttcgagaccagcctggccaacatggtgaaaccccgtctctactaaaaatacaaaaattagccgggcatggtggcatgcacctgtaatcccagctactcgggaggctcaggcaggagaatcacttgaacttgggagacagaggtgcagtgagccaagatcgcaccattgtactccagcctgggcaatggagtgagactccgtcccaaaaaaaaac

SEQ ID NO: 536793 - DNA, 132 bp, Homo sapiens
ctacccgccataaccaatcaccataatcgaatattataacactgagactgtaaaaaacactccaaaagtccagagtgataggcaacaaggtttcaattgtatacgattaaagattaactattggtacaaaat

SEQ ID NO: 536794 - DNA, 1653 bp, Homo sapiens
  misc_feature (322)..(322): n is a, c, g, or t
  misc_feature (338)..(338): n is a, c, g, or t
  misc_feature (342)..(342): n is a, c, g, or t
  misc_feature (349)..(349): n is a, c, g, or t
  misc_feature (355)..(355): n is a, c, g, or t
aagggtgatgcggtggggaggaggaggagaagaagaagaaaggggtctgggaaaggatccggttcaaattaagttctcaagcgctggtggaaggtttagctacaggtcacggagaagatcagggaagcaacaggacacgcggggcaagggagcgtgaggcttaggagcaattagagggagacaaaggttctgctttccaccaaaccttcttcggtctgggccctcccttagcaaccctggggctttagactctctctccaccaatccctgatgaccccggtggtgcctcacaatggacattccaagtagcgcccgcatcatnccaatgacccctcccncatntcagtcncccacnctcctcccaaggacaggtcctctctggaaccttcacaaacctgatttctggtcctccccaaccagctccctgtccctgcttctgggcgctccttccttcctgagctcccagggttcctcaaggtcacttttggcgacaaaacataaaaaacaaatgatggcaggatggcaggaagaacctcatacccaagcagagtgccaggttttacagcctccgctcagccattcatatcctaagcaacaaaacatcagcagggtgcggaaggtcccgatagtaaaccatctccatcacatccatgtagccatccgtccatcaacctgtatctcaggaacaaatgtagatacattcattttaagcatgcatggtacatttacaaaaattaacctgacttattttgttccagcaaatctcaatatatttgagagcaatcaaatcacacagcatgtttctgatcatataactgtgctagaagtcaatgattaaaagctaattcaaaattattatttgcttggaaattcaaagtgcccttataagacataaacataagaaagaatccaaaatgaaacaagattgcctttcaactcaatgatgagatcataacatggcaataaaatgtctccctctggcctgggaattcctctttgtggcacaaggttgtgtgatctcaaatcaccgctaacccacctagacattttaacatccgaaaccgagtgatgacgtccttatctatatcatcttactgcctgtgtgtgtggactttaaattctgaacccaaatgagggggagaaaaccaagttgactttcatgactgagctctcagggacgtccaaggaatctgtgcatttcaagaaacaaagttcatcagcttctctcctaaggtatttgcccacaatacccagagggcttggcagcatcatgtgtgatgggtggggagctccaagcaggtgggcaggacccaggggcctggtgaccaggacagacccccactgtccatcacctttcctggccctgtcctctgctaaacttcccacaggccttctgcccgatcacacagagtatgcccaaactctctcaggcctctggcagctgaaaaccactgctttaaatccctttaccatttactatgacataaggttattgtaaacaggaaatattctattgatgctacaaatggaaagccaatgcctttaccataaatagaaaaacaaccctaagaagcaagcaaaacaaaaacaaacaggggctgggtgtggtggctcacgcctgtaatcccagcactttgggaagctgtggcgccg

SEQ ID NO: 536795 - DNA, 1589 bp, Homo sapiens
tggctctctgctgtacatccgtggatcctcaatgtccattttgagacgggaagatagtcttcaggaaagacacacaaaggtaacttgtgcagagggagatggcaaatttatactttctcagaaacacagtaatgataagtaaccaaggacttccactaaagtcagtcccacgatgacgatgttcagccagagtattgataacacttaaggttatatattttggccaggcgcggtggctcacgcctgtaatcccagcactgggaggccgaggcaggcagatcacgaggtcagagatgagactatctggcgaacacggtgaaacccgtctctactgatttctggtcctccccaaccagctccctgtccctgcttctgggcgctccttccttcctgagctcccagggttcctcaaggtcacttttggcgacaaaacataaaaaacaaatgatggcaggatggcaggaagaacctcatacccaagcagagtgccaggttttacagcctccgctcagccattcatatcctaagcaacaaaacatcagcagggtgcggaaggtcccgatagtaaaccatctccatcacatccatgtagccatccgtccatcaacctgtatctcaggaacaaatgtagatacattcattttaagcatgcatggtacatttacaaaaattaacctgacttattttgttccagcaaatctcaatatatttgagagcaatcaaatcacacagcatgtttctgatcatataactgtgctagaagtcaatgattaaaagctaattcaaaattattatttgcttggaaattcaaagtgcccttataagacataaacataagaaagaatccaaaatgaaacaagattgcctttcaactcaatgatgagatcataacatggcaataaaatgtctccctctggcctgggaattcctctttgtggcacaaggttgtgtgatctcaaatcaccgctaacccacctagacattttaacatccgaaaccgagtgatgacgtccttatctatatcatcttactgcctgtgtgtgtggactttaaattctgaacccaaatgagggggagaaaaccaagttgactttcatgactgagctctcagggacgtccaaggaatctgtgcatttcaagaaacaaagttcatcagcttctctcctaaggtatttgcccacaatacccagagggcttggcagcatcatgtgtgatgggtggggagctccaagcaggtgggcaggacccaggggcctggtgaccaggacagacccccactgtccatcacctttcctggccctgtcctctgctaaacttcccacaggccttctgcccgatcacacagagtatgcccaaactctctcaggcctctggcagctgaaaaccactgctttaaatccctttaccatttactatgacataaggttattgtaaacaggaaatattctattgatgctacaaatggaaagccaatgcctttaccataaatagaaaaacaaccctaagaagcaagcaaaacaaaaacaaacaggggctgggtgtggtggctcacgcctgtaatcccagcactttgggaagctgtggcgccg

SEQ ID NO: 536796 - DNA, 469 bp, Homo sapiens
  misc_feature (61)..(61): n is a, c, g, or t
atggccagtccttaaagtgtcatccaaacgcttttgcttgctttgtgaaaagccacaggcncctccgggaaggttacctaaaagagctgctgtccccatgggggggtcggtttacccatgaggaagtggattagctgtcaccagaagcccccattgcccaaaagggggatttccatttcctcgaggtcacccgcctccttaaacctggggcccaaggccaagatggctgaaagaactttagctaaaattttcccggtaccttgttttactctcttttacttttcagacccctcccccccccccatagaacctgttgcatgccacttagtttccccgctttgcctcttctttttgatggatttattcccgccccttttgccccttagcccttggataatccgcctgggaatgggggtgaggggggtaattgtttttaaaaaggtcgcgaataaaaatcccccaatgtgga

SEQ ID NO: 536797 - DNA, 453 bp, Homo sapiens
tggacacgcggggcgggagacagtgcagggggcataatctggcgctcacggcagcctcggcctcccaggttcaagcaatgctgcgcggcctgggccttcggagtagctgggtttacaggcgcccaccaccacaccgggctaattggtgtatttttagtagagacggggtttcaccacatgggccaggcgggtttcgaactccgggtctcaagtgatctgcccacctcagcctcccagagtgctgggattataggcgtgagctaccgcgcccggccctagggaagtttaaagccaattctatctcgtctttggcagtacaacctgccggtggccaccggaaggtggtactgaagctgcttataaaactgctgacttcgggatatgggaacgtggagacaagaccaaccaagggatctcagagttgaatggccagttcagtgggatgggcaaagg

SEQ ID NO: 536798 - DNA, 314 bp, Homo sapiens
cagggtccccaaggtcttgggcaggaccggtttcagggacagtgcacccaggtgggggtggaatttatggccgacccgagccgatccttcatccccaatgtaaaaggccccgtgggcgagggggacgtgctcccccttttggagtcaaagcgaaaagcccggaggttgcgttgagcttggctgctcgctgggttttggatgtcgggttcgcccccttggccgatgggaatggtttgtcccagtttgccccttttttttgtcccccccccggaactgaaatgctcctttaaataaagggtttgtgtttcaagtta

SEQ ID NO: 536799 - DNA, 640 bp, Homo sapiens
cagtgcgaatacctgatacaccttctatggctgtcccaaggatgagctgcaacctgtttgtgctgaatgtgacacactacaagaagatgcagaagttcttgggactgccccgagtacatggtgactcttgtagcaagaagtagccactcgatgaccagtgcgagaagctgagcgcatgccggtaaaacccaggagtgctgcgtccaagctaacaagctctcattcgcctcgcgaagcccaagtgggacaagaaccagatcacatacaggatcattggctacacacgctgatctggacccagagacagtggatgatgcctattgctcggtgccttcgcaagtctggagcgatgtgaccccactgcggttttctcgaatccatgatggagaggcagacatcatgatcaactttggccgctggtgagcatggcgatggatacccccttttgacggggtaaagcgaacgggacctccctggtctcatgcctttcgcccacaggcactgatgttgggggagactcccatttgatgacgatgagctatggaccttgggagaagagcaagtggtccgtgtgaagtatgggaacgccgatggggagtactgcaatgttccccttcttgtcaatggcaaggagtacaag

SEQ ID NO: 536800 - DNA, 443 bp, Homo sapiens
  misc_feature (300)..(300): n is a, c, g, or t
  misc_feature (302)..(302): n is a, c, g, or t
ctgccaggattcggccacgagtggaagatgaggatcacttaccagagaagtcaaggtgatcatctccaaagaggtttacagtgcttggtaggaatggaaaatgaggacaagaaaaagaggagaaccatggagaaggcccaacatggcacggacagcagccagctccaaagtcacgaactctgggattcaagaagagtcgtgtagtgctttcaactctcatccgcagcagctcactgtgtgtggactctgagctgacacgggagttggcttctttgttccatagattttctatccacaggnantattattgttcttggaaagttcattatttttttaaattaccttactctcagaaagggatttttttgaaggattctgtcatatatctttggaaaacagaaaatcagtaatatgtatatttttatgtatgttcactggcacta

SEQ ID NO: 536801 - DNA, 143 bp, Homo sapiens
cacagaacatgaccagtccccgaaggtgacgattttagcggcccatctccaacgtaacctcggcgccgggtgacgtccctcccgcttggtcaccactcgggcaccagaaacctgtgaaggtcgaaacagctgcgtttccggtt

SEQ ID NO: 536802 - DNA, 236 bp, Homo sapiens
tggatgtcgtgtttcttgtagcacaacttcttgtagaagttgttcttggcttctggaggaggttacggtaccacaagaccagtctgagcggaaacaagacatttgaataggtcaaaaacttcggtttaaccacttgcataggaagaggatgcacattcggccggaaaacgattgtttcataaatgactgcagtggtcgacgcggccgcgaatttagtagtagtagtaggcggccga

SEQ ID NO: 536803 - DNA, 114 bp, Homo sapiens
gcggccagctagctgttatgacaaggactgtctgtacagagacagagaggaacttcctacatgaattttcataattcaggtaacagcaataggcattccaggattcattggggg

SEQ ID NO: 536804 - DNA, 94 bp, Homo sapiens
agcctcacctgggggcattttgtgggtggagggccagagtgtgtatacccagccttgtctggaaggataacgttttccctgcctaaaagtcaaa

SEQ ID NO: 536805 - DNA, 493 bp, Homo sapiens
cattattcatttcttaacatagcgtgttcagctgtgacgagtcaagttgatatcctagaatatgccagtgacctttcaaactcgacacaagtgtgttctgaaactgtcgtgactcttaccacgcgctctgtgatcaatgaactatgtggttttgaatcggatgtagaccattagtactactacttgagctaaacttctgcatggttcataatttttaaagtgtgtagttaatatgcatgttatcgtcctttcttccattcttaccagtatgtgcccatttgcaaaacaaaaatgctaataatcagtaatagtcctataaaagatgttaactctgtttagtcattgactgatcttgctctaaccttaaaattttgtgattattgacctctgttgcatttattctaaagccccccaaaaattatctagccgtttcgaatatcaacattaccctggtgtattcactgctgtatgcattattgttagcgcgtgctgt

SEQ ID NO: 536806 - DNA, 302 bp, Homo sapiens
gcgttgtcgttacgtcctgtaatcttacactttaggaggcaaggcgggtggatcacttgaggttcaggagttcaagacgagactgggcaacatggtgaagtcccatgtctatgaaaaatttaaaaagtaagctgggtatggctgggcacggtgactcatgtctgtaatctcagcactttgggagggcccagttgggtggatcacttgaggtcaggagtaagagaacagcctggccaacatggtgaaaccccctgtctctactaaaaatgcaaaaacttaccctggccgtgctagcgagcacc

SEQ ID NO: 536807 - DNA, 144 bp, Homo sapiens
tgtatataatctcacattgactcgaacttcgtactcccggcaacaggcattaagcggagtgacagtccccgtcagacggaatatgtcccctttaattaaattatttcatggtgtgtcgaaagacggaacgatcggtaatccccg

SEQ ID NO: 536808 - DNA, 617 bp, Homo sapiens
  misc_feature (1)..(1): n is a, c, g, or t
  misc_feature (153)..(153): n is a, c, g, or t
  misc_feature (157)..(157): n is a, c, g, or t
  misc_feature (159)..(159): n is a, c, g, or t
  misc_feature (162)..(162): n is a, c, g, or t
  misc_feature (166)..(166): n is a, c, g, or t
  misc_feature (169)..(170): n is a, c, g, or t
  misc_feature (172)..(173): n is a, c, g, or t
  misc_feature (175)..(176): n is a, c, g, or t
  misc_feature (178)..(178): n is a, c, g, or t
  misc_feature (181)..(181): n is a, c, g, or t
  misc_feature (183)..(183): n is a, c, g, or t
  misc_feature (190)..(190): n is a, c, g, or t
  misc_feature (229)..(229): n is a, c, g, or t
  misc_feature (295)..(295): n is a, c, g, or t
  misc_feature (300)..(300): n is a, c, g, or t
  misc_feature (379)..(379): n is a, c, g, or t
  misc_feature (407)..(407): n is a, c, g, or t
  misc_feature (464)..(464): n is a, c, g, or t
  misc_feature (524)..(524): n is a, c, g, or t
  misc_feature (527)..(527): n is a, c, g, or t
  misc_feature (532)..(533): n is a, c, g, or t
  misc_feature (608)..(608): n is a, c, g, or t
nttttatttttttttttgttatattttgaagaaaacatacaatacaaaatacagaaaaagttggttccgtcccctcccactcccccctctttacccacccacccccaaatactcatcatcatgatttggtcagaacagggctcagagccagangttngngtnaccnagnntnnanngnttntnggcaatnggttcgtggctgtcacaataatgctgtgataatgctgtngtttcccagcagggaggtgggagcggggagggggctgcagcctgatgagagccagctgaaggaagnttctncctctcccttcctaagccccttcccaaggtctgccccaccgcccaaaccaaagaccactccgaacaaagtgaggatgtngattcttcttgctgggtccgctgttccncatgagggaatagaaagggtagctgccctgaccccactgtccccatatacaagggtnggggggcaagaacatgtggctactcccagcaagggaaaatgggagatcagtaaaaagggnatnaagtnngaatagcagaagatcatatatattaaaaaagttacttaagactttaaaattgaattagtatttgtacagaaaggntggcatgtt

SEQ ID NO: 536809 - DNA, 573 bp, Homo sapiens
gcacgagaaagggtcaatgacttggatgaagatattccaaggccgcctttctcctcacatagtgacaaaacggaagataaagagggagtttctgaggcctgtcctgtttgcgaaaaaactgtacaaaacccctgtgtattggaaacaggatacgtggcatgctacccgtgtgccataagctatttagttaataatgaaggccattgtcccgttaccaataaaaagctgctgggttgtacatacaacaaacacacgaataaatgggaagttgtgacaggtattaggaagctactaatctgatgacggaggaagtgaagaaaataattctgtgtaatatatatattctagttatttttttaacatatttgaaatttcccattgtttacacgaaatttctaataattttatttcattaattttgttatccaacaggtaattcatgtcacttgttccacctctttgcagttgtgttacaagcattgatatttttcgaagtattacctcttgtgtggcagagaaaggcttgtcagaggcatcataatttttcaagaatattatcattcgattaatctt

SEQ ID NO: 536810 - DNA, 1472 bp, Homo sapiens
gctcggagccgcgagggaaccgcgacccgcatggccccggcccgccgacccgccggagccctgcctgctgctctgtctactgctggtgcctgctgtgcctgcctgccgcctgcagggccatgggtgtcccctgtgacgcctggtggctgccctcgatggagcctgcgccctgcatgtggagcctgcctgccctggtgaacagacgctgcacccagagggccacacggtggacgcagccagcagctgtggtgccagtgccgacatcgtaccgccagagcagcacacacacgattgaggacagtgacacaacgagcagatcgacaccccaggagacagacctgagaatagcatctttcagatcacgtgcaaagacggttgacaaacgtggagttgtccaaagtagagcaaaagaaaagcaagagacgacacaggtgtgcacaaagggcacaaacgacacgcttagacacgatatcagggaatatgcaccaagagggaacacccatagaagaacatcacacagagaaccaccaaagagagacacccacaacaaagggaccacccaaaataaaaatccacaagacacggagagcgacaaagcaaagaaagagaaaaataaccacaaaaatgacatagacagaaaaacacgatgaagcggaagcgaagaaaagaagagaggaagaaaaaaaagacaaaaaagacacagaaaaaacacagtgaaaaaagaaaagatagggacaccaaacggaacaaagagaccagagaacaagagagagaaaaacacaataagacacacagggacacaaaggagaaccaaacaaggaacaagagaaaaaaaagaaaaagaaaaaaaacaaaacaagaaagaaagagaaggaagacaaaaagaaaaagaaaacaaagaaaaaaaacaaaagaacaaccagaaaaaacaacacaaaaaagaacaaaaagaagaaaacaaaaaaaaaagaaagaaagaggcccaaaaaaaaacacaaaactaaaagaaacaaaaaaagaaaaaaacaacaacaagaaaaaagaaaagaaaaacaaaaaaacgaaaaagacaacaaaaaaaaagaaatagaaacagaacaaaaaacaaacacaatgacacagaaaagaaacacacgaagacagaaagcgaaatacaaacagaaacgagagaaaacaagaaaagaccaaacaaaaaaaaaaaacaaaaaagagaacaaaacaacacagaagaacgagaccaacaaagaaaatagaaaacataaaaagaaatacacaaacacgaaaaaaaaaacaaaaaaaaaaaagaaaaaacaaagaaaacaacaaaaaaaagaaggaaaacaaacaacaaaccaagaaaacaaaaaaaaacacacagacaaaaaaaacaaacaaacaacgaaataaaagaaaaacacaacaaaacagagaacaaacaacaaagacagaaacacacacaagagagaaaaaaa

SEQ ID NO: 536811 - DNA, 304 bp, Homo sapiens
tatgctggaaccttcctctcctcccacctcatctgtagcaatctgcccatttctccctcgcacaaggctgaggcaggagaactgcttgaacctgagaggtggaagctgcagtgagccgagatcgcaccactgcactccagcctggattacagaacgagactgactctcaaaaaaaaaaaaagctacggatgcatgaaacaacagggggcggtccctcaagaaatagtggtggtcaagccacggggcgcaggggctcacaccggtaatcccagcactttgggaggccgaggggggaggagaggaa

SEQ ID NO: 536812 - DNA, 139 bp, Homo sapiens
gagtcggcccgctctcctggtgttgacttagggatgaaggctcaggctgtgcagaaatggagtcaccagcagaagaactgtttatctctgataagggatgtcccaccattttcaagctgttcgttaaagttacacaggt

SEQ ID NO: 536813 - DNA, 407 bp, Homo sapiens
aattcaaatgaggcagacttggtgctggcgaaagaggccaatatgaagtgtccccaaattgtaattgctttttatgaagagagcctaacttggccttcttgtccagaagatgaagctcaataattgttccccttgttcttttatatatatttatataaataaataaaaattgggtcttagattttgatttcctagtgtgccaaaatacccccctcctaatgaaaaccaagtttgatatgtttgttttgaaagaagcgttggaaaagttgttgggggttttttgcacccaaacccctggttcctttgaacaaataaataaaacctttctgtagttgcttcctttatcaaaaaaaaacatttgaacccatggtaaatcatttcctcttcattaaaaaccccctttttta

SEQ ID NO: 536814 - DNA, 122 bp, Homo sapiens
gactctaccgatcctaatgctttgggacggcgatccacccctgtattaaagaaggaaaccaggccaggcgcgatgactcacgcctgtaatcccagcactgtgggaggcaaaggtgggcagac

SEQ ID NO: 536815 - DNA, 421 bp, Homo sapiens
  misc_feature (143)..(143): n is a, c, g, or t
  misc_feature (208)..(208): n is a, c, g, or t
  misc_feature (246)..(246): n is a, c, g, or t
gttggagtttcttttatcaggcctcaaagcagaagaataattctccgtggttctggctctaccctctagatctgggtttgtcttctgagtcttcctttttcatcaaagctagagtgtgtttttacctgcagttcttttctcanggctgcttctttccagatagaattttagcgggaactatgtggtctctatatttgtacatgtttcntgtcctgtttatgttccataaatggcgagtgtttctanctgagtacagtaagattttggtgggcctgcctgtgattctccttgcggatttactccatttagacaaaagccacactcataaatatcttctttatgagacctaagcttcttacagactctgtttatcggttgaaaggatctgtgagacataatcttctgaacagccttttgtatg

SEQ ID NO: 536816 - DNA, 271 bp, Homo sapiens
ttgaatgtctggagtgtggatccatgcatgaacgcggatgggcaggtcaggcagaggctgtcgccatggttattatgagatggcacctagggatagtcagaaaagggagcaaagtaaaagatctagaaatatgtcggaggcactatgctgaatggataccatataaggcgggatgaagaaaaagagaatcaaggataatatctagactccaatttgaaccaatgatgacgtggtggtaacgtgttaacgtaaacactggggacgaatgaga

SEQ ID NO: 536817 - DNA, 180 bp, Homo sapiens
cggggggactgtcacgggacggtccctgggttctgctccgaggtcgccccaatcgctatttttaactgcaggttcggtagtttacggacctgtgtgtttgttagcgtcctgtttgcatttataaattaaagctccatagggtcttctcgtacttgctgtgttattgcccagcgagaacct

SEQ ID NO: 536818 - DNA, 339 bp, Homo sapiens
tgtgactgacatggagcctggatgactatcgtgtacttgggaaagtctctttgctctatttgctgacatgcttcctgttgtggtctggccaatgccaaatgtactcgaatgatgttaagggctctgtaaaacttcatacctctttggccatttgtatgcatgatgtttggtttttaaacatcggataattaattgtgtactttttgtagaataaagcattatgttctttatatccatttaataaatttctaacttgtatgaattttgtactctgaacatcatgatttctgaaagtacctgttggttttggaaaacatttctagctttggggaatgtgac

SEQ ID NO: 536819 - DNA, 468 bp, Homo sapiens
  misc_feature (35)..(35): n is a, c, g, or t
tagttagtgtgtttttcgcacacatttatccttgngtttaaaaggacacacatacatgctcacacacaatcctcctaagtgcgtatacttgctgtaatctaaataaaatacagctctaagaatgcaactatcattttttaaaaatcgactcttccacagtgatgatttaaaatttcattaaaagacataactgtctcaagttacccaaataaaatgaagctacatttttcatatcattttcaattgcccaattagacaaaacactctaaatgtcactagacaagtaaaatggcaaaaaaaaaaaagaaaaaaaaattcagctggctacttttcctaatttactcatataaacaatcatttcattgttaataatcagtaaatttgagaaaatttaccaaaagcaaacttatctccagtaaacaggacaaggaagaggcctcataagtttttaacttttaaaaacttggg

SEQ ID NO: 536820 - DNA, 799 bp, Homo sapiens
ggctcgggtggtgatcgcgtatgacacaccgctggaactaagggacgcttctacacagacagcactggccgggagatcctgctgaggaggcgggattatcgtagcctcctggaaactgatacccagacggagcccgtggccatggaatactactatccagtcaacaccgcgtgatttacatcgacggatgtgatacactatgcatctgactgtgctgactgaccgctcccagggcgggcagcctagctctgagagatgggctcgctgtgagctcatggtgcacctgaaggctgttgaaggacgatggacgcggagtatcggagccactaatggagcaacgggatcgtgaggcgtggagtgcgaggagcagccaccatgtggtgctgcgtggacacagcccaggctgcagccgccggacaaccggctcctggcggagcaggaggtcctggcccctcaggatggtgctggccccgggtggcggcgccgccatactaagtctcggtggctcctccgtcgcacgcacgctgtctcagggactgccgcagggtagcctggccgggccctcggtgcacctgctccacgctgagccatgctggggtccccgcaaatggtgcctgctagcgcttggagctaccgagtattgccgataggagaggattccggacgtaccctgagcgcccccgttaccttgaactttgagggacctgtactccagcttcaccatcacccggctgcaggagaccacgctggtggacaacaagctccgagaagaaacctcaagctcaagtggacacaatcg

SEQ ID NO: 536821 - DNA, 296 bp, Homo sapiens
tggtgactggaagtgtgggatccaggaatattgaagactcgacactgtaccatttgatgaacatcatcctgttgcaacggaaaatagatggtgattctacaaattctgaaggggaagaacctactgcgcacgtgaactgacagcacttggaatttagacgagagaaccagcttcatctcatatcgttctacgtgtggctgacaaaacctccgatcggcctggtgctcatcctaactgtgcagaagccaaatcacctgtcggaccggcggcggcggggcccccggctgcggcggccg

SEQ ID NO: 536822 - DNA, 846 bp, Homo sapiens
  misc_feature (36)..(36): n is a, c, g, or t
  misc_feature (113)..(113): n is a, c, g, or t
  misc_feature (174)..(174): n is a, c, g, or t
  misc_feature (224)..(224): n is a, c, g, or t
  misc_feature (242)..(242): n is a, c, g, or t
  misc_feature (324)..(324): n is a, c, g, or t
  misc_feature (501)..(501): n is a, c, g, or t
  misc_feature (529)..(529): n is a, c, g, or t
  misc_feature (571)..(571): n is a, c, g, or t
  misc_feature (592)..(592): n is a, c, g, or t
  misc_feature (627)..(627): n is a, c, g, or t
  misc_feature (631)..(631): n is a, c, g, or t
  misc_feature (648)..(648): n is a, c, g, or t
  misc_feature (684)..(684): n is a, c, g, or t
  misc_feature (687)..(687): n is a, c, g, or t
  misc_feature (697)..(697): n is a, c, g, or t
  misc_feature (725)..(725): n is a, c, g, or t
  misc_feature (757)..(757): n is a, c, g, or t
  misc_feature (785)..(785): n is a, c, g, or t
  misc_feature (844)..(844): n is a, c, g, or t
ttctaaataagtctgccaaattaaacatcatgattnaactacacatgaaaggaacatgcataccttacagcaacacccacagagaatgagctgaatacatgacagttacagtnaagaactaaagaaaccggcaaaaccgaggactcgctgccatgcaggttttacatgtctgcnatctgaaaacaaaaccataaaatagagtgtaacgggaatgtaagaaaatnaaatatatatcccaagtngctgacaatgtagagcccataacccagttaccaaatgttaaaaaaagttatgtgcctctccttcccaaaatgttagtgtgtngccatccttacaaatgagggggggggagacggtggacctgggggctcggaggccagaccagggcattgccctccacaccagcgggaaccgcatggacccccccagaccctgccctggcagaggaccccgaagtgaaaggatgtgttccccataacgaatgtccaaagttcgtgcatnactctgccgtgccctacacataaccgcncacacaggtttaatccaaaatgtaaccaggagaacccccgtncccgccccgcacacgccttangtgtgatggctcggcttctagagttgcctggtgtntgcnttattctaatggccccnacggagaaggggacgccacgcacgggcacaggtgangtnacgggcacanatgaacacgttgcgggtacggagaagancacaggctgggctcacacgaggggaaacattnacactgtgttctctctacagggtcaggncgtttttcttcatgtacgggcgggaaaaggaatacctttctccttttctaaggcaagcngc

SEQ ID NO: 536823 - DNA, 541 bp, Homo sapiens
tagccgtaccgtattcgccatgatcccaaatgcgactgttagtgaacacctgttgctctcgcgtattcaagcaaacgtccatgagcggtcgggccatgtgcgcgcgcggggacctcaggtgtctcaaggcagcatctcctgtatgaatacctgagcccattctttctgggtccaggtcacctgatacgcatgggtaaagtattttcgtgtgccactgtacaaaagcgtctttaacttttcccctgtagcgctattgttcgaaaaacatcagctcattttcttgagcaaatctggaggctctaagaaaggtaacttcacgatctgcatccggtcctcttgttccacaaaggatgatcaccaatggtctggctcgctagcaatcgggcatctgtaaaccaattagatagcgcattgtaaggtatctcggctggtgatatcatagacgacgagagccctggccgcgcctcggtaataacttctcgtcacggacctgtaatcacagctactcaggagggctgagacaggggacacattggcgaaa

SEQ ID NO: 536824 - DNA, 232 bp, Homo sapiens
ctgcatgcccacacatttgcctccaaacgtctgccaagggagggagggcgcggaacccacccatggcaatgactcagcacgaatccactcttctgcttgctgacccctgacctctgactcgaagtcagggccctcagctggccttcaaggaccccatcctctccaccctggcaggaagtggggttcctgagtatctggaaggaggaccccatggaaggatctggagttccta

SEQ ID NO: 536825 - DNA, 223 bp, Homo sapiens
acattggcagaagctaagctctgtgaaatagctaccgttataaatcttgaaaccctactaagtaccgtgggctaccatatgggagcctgataaattactggcaatcagaaacccatacctaacacatcagatgatagtaggttttgacctagggaagaagaggttgagcgaagaacccccaccaggtatgatttgagagtctatagttgagggttaattgggg

SEQ ID NO: 536826 - DNA, 166 bp, Homo sapiens
atggaggaggctttggagtcctgctctgtgtggtccaggtcctttcccccctgagacttggctccccccctgatatcctcctttggggaaaggcttggcccccagcaggctttcaaaaagtgccagttgatcaatgaataaataaacgagcctatttttctttgca

SEQ ID NO: 536827 - DNA, 315 bp, Homo sapiens
  misc_feature (9)..(9): n is a, c, g, or t
atactcggnctattgctctgttgtcgcgctgcgcccatgctgcggtactgccccacggtcatctgcatcgaacgctgcataggcctgctgcgtaccgtcgctgctggatgcatcggccgacgacggcggtcgcggcggcgtgatcgcgtggcttgcatcgcttcctgtcagttcctgcagactcaatgccccgctactttgtcggtctgtcgagcaggtccagcagctgcgtgctcgacgcgatgtcgccattgaccagtgtgctcaattcagcgctgctgacactgtcgtcaccatcgctgtccaggccggcca

SEQ ID NO: 536828 - DNA, 148 bp, Homo sapiens
ttacagattacctgcatatggctagccagtatacccaacatcatttattaaatagggaatcctttccccattgcaaaagctcgggatatgtcaaatcatgagactggacgaggacactgggcgtgagggagatccatctagagctcga

SEQ ID NO: 536829 - DNA, 355 bp, Homo sapiens
gatccatgcccttaccacttatcacgcaagagaagaatatccataaagtaatgtctggcttgctatgtcaaagcagtcaactgtacgaagatctacgtgttacactctaaaattatgattttaaaagtctattaaaaacaagaatgccagcattctatcatccattatcagaggctttaaaactgttgcaagaccatatagtatatattagcttttatactgctaatgcacaacttacagcaaacttgattagattaccagaactctgtcttaattaacgcctttatatatcacactagagacaaatgccacaagatctgcagaaacattcagttctgagcactcgaatggcagg

SEQ ID NO: 536830 - DNA, 300 bp, Homo sapiens
  misc_feature (16)..(16): n is a, c, g, or t
  misc_feature (60)..(60): n is a, c, g, or t
  misc_feature (81)..(81): n is a, c, g, or t
  misc_feature (115)..(115): n is a, c, g, or t
  misc_feature (148)..(148): n is a, c, g, or t
  misc_feature (244)..(244): n is a, c, g, or t
  misc_feature (249)..(249): n is a, c, g, or t
ttagctctgtgatgcnatgccctgttacagatcacattcaccgtaggtctctgagaaagnacctgctccttaagtcttccntgcaacaagtgccactgtttttaggaacctgggngtccacatagacatctcaccagcactgaaaccntcacaagtcctctcagccttgcctttggatgcccttctcttgggaatgtccccagtcctggtcagctgctcacaccttttgcaattttgtctgccnccccntcagcctaaaagtgtgcagaacccttcaattctgttaagtcacaaaaaaaa

SEQ ID NO: 536831 - DNA, 188 bp, Homo sapiens
atcattgttcatttgttgggtcttcaacttttccctccccaaatcctttttttaaaaaaaatgcaaaactcccctaagtgtcaagggtataaacatttaaaaaagtcagctaaaattttaattccccccctttaggaaaacatgtaattttaaccaggaaatgtcattaaaccattccttcattttca

SEQ ID NO: 536832 - DNA, 1014 bp, Homo sapiens
  misc_feature (468)..(468): n is a, c, g, or t
tggacggccctaaatggtttataaggtatgaatttcccaaactttacttatataagcggaaacggtggagctgggagagtatggcgccttctccaagctgcccggcgagagccaccaattagtgtggtgggaactggtgggccctttccagggccagggctctttcggcctgcagatgtcagcccacgcatctccctgtgctggtggcacgggttgggtgactccactggggtgtcagggatatcttctggatacgcttaatggcgaatgggttcaatggaggataacctcaaaaaattttggcatggtgggaatcttcaccaacccagtaaagaattcacgagactctcaaaagccccaaaggggctgtccagtctcgctcctcctggcaacgggatttggaagggcttcagagcaaatcttaagctggtgttaaccccatgatgggacaggcttcgccggtaatgngcgcacaccttagagaactgggcgcgtatccgggccaccagggggaacacgaatcctatatataacggtaacctggtctgggcctggtaagcccagtgggcgcgcttaaatcaggccgggtggggcgcgggaacgccctggtgggaagagcaaaagacgctgggggggaactggccagcacgggggaccctcaagaagaaacggcgcatggaaatccaagagcgggtatcttttcttccataaagtcccctggggatgcgtcactcttgttatggccccccattattgggtaaaccctagaatgcgctcgtttactaagccaagaagcgccacacagctgggcgacggggccggaggcatcacaaaaggtgcgcccacgctgaaagccataaagccctacaagcagggttggagcccgcggcttggggtccccaaagaacacgggaaaacccggttgggtggcccgtgctcatacacccaaaccggggctatggcgcaacctgaaagatgcgaagaaagacaaggcctgccaatcgcggaacgcca

SEQ ID NO: 536833 - DNA, 563 bp, Homo sapiens
gaaggcctcgggcacgtttcgggagtacaaggtggtgggcgctgcttgccaaccccaaaatgccacacaccaccactgtaccgtatgcgaatctttgcacccaaccatgtggtggccaagtcccgcttctggtactttgtgtcacagctgaagaagatgaagaagtcatccggggaaattgtgtactgcggacaggtgtttgagaagtcacccctgcgtgtgaagaactttggcatctgcgtgcgctatgactcccgcagtggcacacacaacatgtatcgggagtacagggacctgaccactgctggtgcagtcacacagtgctaccgagacatgggtgcccgacaccgtgcccgtgcccactccatccagatcatgaaggtggaagagattgcagctggcaagctccgccggccagctgtcaagcagttccacgactccaagatcaaattcccactgccccaccgtgtgttgcggcgccagcacaagccacgcttcaccaccaagaggcccaacaccttcttctagacacagagacccactgaataaaaacttgagactgt

SEQ ID NO: 536834 - DNA, 130 bp, Homo sapiens
gaccatgacccaagcatgattgttgctgcaggtcgacgtgtttcaccagtgcggtgcatgcctccctgttacaggttccgtcgagacgttagcaccgtgctgagctccaaatatcgttatgctggagcct

SEQ ID NO: 536835 - DNA, 615 bp, Homo sapiens
caccagtctcaagcgtgtgcaagcctgtcctttgactgtggttacagtgctacttgttgattgtgttacacattgcctctgacttactccttttcaggtctctaacatcttctatagactggcgtggaagtcagagatcttgcgtctaactcttctgaatcgagagattactctaaacttgttttttggcaatgcctaaattaaaagcgtccaatctttactatctacacgaaatcacactattgatgcctacgctgtattgcactgactagatctcagatcaatgcaacctgtggctacacctaccaaaccattctatatacctcaccctcactgattaactttaattacactttcctgtcaccatgccaagcttactaattccattcttatttactgatactgcatttaaccatgttgttcagactctactaaaactccttacctagagtgatccaaacctactaggcctatcaaagcgtctggcttacacgcattagccaatgcccaagctcaacatgtactatcttttagattccacacgtcaacctgacatctgaaccccactagactcatcattcaacctacttatgactacatgtaacctaataacat

SEQ ID NO: 536836 - DNA, 175 bp, Homo sapiens
gctccccgtgttacggcaccggcccacagctgttttccagcgggcgggtttcggcgaactcatcgcggctaagaatgcgctgcgcgccgaggtatataacgatattcatgggtgctttcgcgctcggaaaccgccgccaccttgtatcctgagatgatgcagcaaagcgaccgcg

SEQ ID NO: 536837 - DNA, 1003 bp, Homo sapiens
  misc_feature (469)..(469): n is a, c, g, or t
  misc_feature (473)..(473): n is a, c, g, or t
  misc_feature (895)..(895): n is a, c, g, or t
acagtggctgacattacaaggctcggatctccgggccctcagacatcatgagtttggtccttgcatgctccgcgtgaaatctaagtatcgtgcctacctgtctactgctctattatatattctactcattcataaccatgtgtgaggtcctaagtgttgcctacactatcgagacgaactgcgtggcatcgtatagtatcgagtagactctcgcgtagctctagttggtccagtcgtcaccgtggtgagcagttggtcagaatatgtctctagtccttgaccttctttactccaaaacgcggaacatggtagggaccacaagtgatacctacttacggtcatattgggtaaaacaaccactacgtattaacatgctacaccgttttgagacattagcgaaatactaatacaaggaaagtgcgaaaccaagtctgacttaataacggcaatccaaagacatctactttantaanttccgatgaattgaattcatctcatgaataccacaatgtgattattaaagaccgtcgatgctgaagctcttgaatgctctcgacggaagaaagtggtcttaggagaggaaaagagtataatgtaggaatactgcagaggacatcagtactttgttaatgcagcaatgaacatctaaagttagtttccgaattaattttagtagagataactatatagttatattgtcaacattaattcgaagaatgattagttgaacaccttgaagaagaggaaaggtaagtccgcattgcttatgcagaggcacaagaatgcacagagggaatcgattatgtgtatgagcacaacagagtagtgacgaatcgcattggatatcatcgtgtggaaatgaatttgtgcaaggaacaatagtgcgaataaaggngggagtctaaaatacacggagcaggtgctattgagatttatttaaaatgctcattgaaaggctaaagcagcagaattcatcggaaggatctagtggagaaaaatcgag

SEQ ID NO: 536838 - DNA, 309 bp, Homo sapiens
cccgactagcccgacagcgggcaaatcacgggtgtaaatctaagagtccaaaagctgaagaactgggagtcggaggttcgagggcaggaagcatggggcacaagagaaagatgaaggcgggcagactcggcagactcagcagactcagggaatcagctcttccatcttcttcggtctgctttattctagccacacgggcagctgatgggatggtgcccacccagatggagggtggatctgcctctcccagtggactgactcaaatgttaatctccttgggcagcaccctcacggtcgggctagtcgggg

SEQ ID NO: 536839 - DNA, 146 bp, Homo sapiens
tggtggtggtaaacaattttgataccttttgtagccaaataccagagtgggaagaatctgactataaaatggtccaactactgagaaacagcagtttctaccaatgcctacctactttgtagaaacgagaagtgaaaccatctcag

SEQ ID NO: 536840 - DNA, 257 bp, Homo sapiens
cagagtccaaacagggccctagactcatttttacattaaaaacaaaaaacaatcatttgtcataaaagttcaaagtaagctgggtgtggtggcacatgactttagtcccaactacttggggggctgaggcaggagggtcgcttgagcccaggaaagttcgagtccaagctgggcaacagaacaaaaccttgtcttttaaaaaagaaaaaaaatagagttcaaaatagataaaaaagttgttggcactgtttggtctg

SEQ ID NO: 536841 - DNA, 153 bp, Homo sapiens
atcataggctgagccacgtgcagcgggagagatctttactaaggtaactcttggagaggaatccataggcaagttctggcacttgaataataggaatcatacatgcatgtataaactcaaaatatattaagcacttctggtagtcgaagcacg

SEQ ID NO: 536842 - DNA, 152 bp, Homo sapiens
tgtcttgcgaaagtacgggtgcgagagaagcagtagtcaataaagagagtggagaagggagaggggctgagtgaatgagctgggaggaggggacctgtgggaggacaggcagagggagtgggagagcgcgagggctgtcgggctagtcgggg

SEQ ID NO: 536843 - DNA, 1132 bp, Homo sapiens
  misc_feature (814)..(814): n is a, c, g, or t
cttgtcgtgtgtggatgatgtgccccctgtttcgttcggtggtcccttctctctggtcactccgatttcttgtcccgtgttcccgggtgaaccgtattttcccgaccggtgttgctgccttgtgcttgttatcgctttcctggtggtcccgatttgctcctctgcctttaccttcggctgtttgaacgattgccatgtgaccattctcgtgtgacccctggccccttgccggtgtgaccgtgagcgggacccagtggcaagctcttctttgacatttaagcccaacctgttgtttgttccatccggggttcagatgagctggggtctaacaggagccgctgccttcacctggccacagcctccacgccagatctccacattgtcttgatccagaccagctctgtgatcagaaggacattggtccagtgtaggagagagctggtcctgggcctggcaggcaagactgtgggccatcctttccatggcctttctccactctccctcaagcctgtgctcaggttgccttgaatagtggactctggaagacgccaggggcccagaatgccgggggaggcttctgagtggcactcatggaacaccgtccctctgccagccataggccctgcctccagtgtcagggaaatggaggctgggctgcgagagtgttactgccccctgtgtcattcttctaatccaatgtagaaattgtacgtaatgtatttaaatcaacgcaaatgtatgaataacaaatacagttctgaccttttttgtccagatttcatttaggagggataaggagagatcaacacgatanggatacggaagcggaacatatgttagaggcgacgaatagaaatcctgtgcctttccagtggaacttgactgagacgtggctcctggggctatttctccctaagtaacaggatgatgccaggtcctcatatccaaagtcccaactgctctgaaaaccccaaagtattcttcataacccatttgaaaccgaacctgacctgaactcacaactgataggaagctatgggtaattatgatgtgtatccttttagtgtgacttctttgttgcagcaaatgtcaatatactgtttatgacatggttacctactagggattatac

SEQ ID NO: 536844 - DNA, 191 bp, Homo sapiens
gctatgctgcaggtgcggcgtgaaaagaaaaaaaatgtatatgcagggaccctgaatgacatgagttgaactgagcagatccacttatgtgtgaatagtttgtcttactggctaatgctgaagaagttcccaggtcaaggatggaactgtatcacagcagtgaccggagccacagcagtgaccggagccag

SEQ ID NO: 536845 - DNA, 426 bp, Homo sapiens
  misc_feature (335)..(335): n is a, c, g, or t
gtttttccccccccccccggccatttttggaggaaacttgggggtgtaactttaaatggggggcgggggggggccacaaaaaggtgggtccctttttttgtaaatttgccccacaaacaccttttttcaagtcccccccggggggatgttcctcaagttggagcagggggagaattttttttctgagggccccccaccaaaaaattcaactttggggcatggggggggccacaagctattttttcggggttccggttttttccaaaaatgggggcctgccctggggggtgttttaattccaccccgggttcccccggccagaaaggttttttttntccccccacccccccccttgcccagccaatgcacccagtggggtttggtgaatgttgttgggtgaatgggtaaataaatttttcagggcca

SEQ ID NO: 536846 - DNA, 828 bp, Homo sapiens
atggcctcggagaagccgctggcggcagtcacttgtacagcgccggtcaacatcgcggtcatcaagtactggggcaagcgcgatgaagagctggttctgcccatcaactcctccctgagctgtcactctgcaccaggaccagttaaaaaccacctataacagaccgtcatcagctaaggacttcaccgatggaccggtatttggctgaatggccgggaggcaggatgtggggcgagccgaggctgctaggccgtgcctgcggcgagatccgctgcctggcccgagaagcggagtgaatctcgagcggtgatggggacccgcgtgccctccatgcctcagctgcgaaggtgcacgcggtcatcgtgtgaacaacgttccccatcgggctgtcggtgccttggcctcgctcagcgtgcggggctatgccttgccgtagttgcagtctggcgttggggctctcgctctgtactcccagtaccttaacgacggctgatggtgggagaatgcagctgctatggccaggcagtgcatagcagcagcctgggcaacatagctgagaccccgcccccgcatctctacaaaaacataagaagaactcttcccgtctgctgtatgtggagcccctctagatggtccagtgatacgagaaccacgttcaaagctgggctcagcccctaaaagtagcgatagatgtggtggctcactgtaactgagggattccaattgggcgacagctgcgttgcaggccccgttggacccagctctctgctggcccaggccaatttgctgcgcagcttcccaccctattgtcaagagcctgtccccccg

SEQ ID NO: 536847 - DNA, 318 bp, Homo sapiens
gtcgggaccccgggaactggtttggatgccttccaaaggggggccacgccttcttgggatgctctttgggaagcttttaatccccagcccttatccaaagtttgccgcccaggagggactcctcccctggcctttaccaaggaaaaaattggtattgtcggactcacctccgacgtactccggggtcttttgggagttttttcccctaaccatttcaacctttttttggattctcactcttgcatgcctcccccgtcctttttcccttgccagttccctggtgacagttaccagctttcctgaatggattcccggccc

SEQ ID NO: 536848 - DNA, 165 bp, Homo sapiens
  misc_feature (46)..(46): n is a, c, g, or t
ggtgatctaagatcgatgatcgtgctcagaatttatatgtatgtgnatttcttttctctctcatgcataaatacagtcttttgtggggagatgaaaaagatgaggtcatagagatctggtagtgagttctaatctttcatgggatgcggagcccgtggatttcaa

SEQ ID NO: 536849 - DNA, 147 bp, Homo sapiens
ttgaaatgagtgggcacaataattttctattaccttgctgcaagattccagtgcagttgccatacagcctattgaggtatggtcaacctatagtacgtagtaattataaggggaggaagaaatggaaaatttctgtgcccatttcaa

SEQ ID NO: 536850 - DNA, 223 bp, Homo sapiens
tttctctcatgctgccggcatgcctgagtgcctgctgcccaggaggcccgcacaccggtacactcgtggacactaacacactcccataatgagatcctaggctttccagggtagggcaagggcaaggagccaggcttggagcgggggaccagtgggggctagtaagggtaagcccctgagcctgggacctacatgtggtatatgcgtaataaaaccatttgta

SEQ ID NO: 536851 - DNA, 133 bp, Homo sapiens
tggaggtgatctagaggatccctgaagatggcggttgggaaaagggtggaggctgatctataaagtccttttcatggtaagattatatgattttcggtaaacggtatattttttaaaaacagtccagaatatc

SEQ ID NO: 536852 - DNA, 105 bp, Homo sapiens
cgcccacggcgggtcagtcagctcctggatcttgatgcttagggaaagattttatatcattaaaaagaaatgggaggtcacttccaagatggctaaatgggaaca

SEQ ID NO: 536853 - DNA, 800 bp, Homo sapiens
  misc_feature (1)..(1): n is a, c, g, or t
ntcccggcatcgataagcttgattaaccagccctgtccgtctctctagctgtccgtggctatccacgatctactatactccactgggctagccggacccctggctagcctatggatatggtactagataggagggcgaggaaccctatcccaccctactgtcagcgccagggggactacagcaccccatacctcagccaggtgcagcaggccttgtgctggatagaccaggaacccagatacacggaacagcacggtatgtaaggcgtatagcaggtcaacgacgcaagcagtgttgtcatacctactaccagaaaaggcacctatggaggatagtaggagagaactgacaggggctaggtttaatacgacattaccttagcagccccggggggaatcccacttacgtatctagacagcggcctgccacccgcagttgcgagcttcccagggttaatgggaaccccttaaaggtagaggggtaacattttgcggcgccaaaggggacaaatcccatggtccaaaattggtaacctgagtacacacacgggccccccacccctcattccccctccccctcgccccaccccacccttatgaaggggagcccgaacgcggactcgactggcgaccccgggacagcccgtgccggacgactgcacggaccctccagccgcagagtgacggcgtaacagatgaggcgccctgtgccgaccgaccgacccgacccaactcttcagccctccggcccgaccattgggttcggcggcccgcgcactgccggcctgctcgttcgttcgc

SEQ ID NO: 536854 - DNA, 442 bp, Homo sapiens
gatagtgagtgaatttgacaatgtatgttaatgtgggcaggccagtagtgattctagggcctttctctgaacccacacagcaagtgcattttaatagtagaaaatgcatttattacataaatcaaaggagtggactgaatcaaatggtgtgatttctggccaggtgggtggaaatgttggcaccatagtaggccagtgtgggagacagctgtggagcctccttcagatcccactatgcaagaaccatctgtagatctgatcaagccctgggtgcaatgcccttgaaatacatgaattatgattaagacatttcacaatagaataagcacatgtgttttcttacttaacaatgtgaactttggtcagagtacaaatgaaaaaaaaaaggtaggaaataatatatatttttctgtaggtagactttcttaaatatcacaccata

SEQ ID NO: 536855 - DNA, 241 bp, Homo sapiens
tattgcgccattgcactccagcctgggcaatgagcaaaactccgtctcaaaaaaaaattttttttttgaaaaatatgactttacattgaagagacgtgataaacagtacctcagcccattagtgataagccatattgatatagcatgtacctttgatatgacgtgatgagatggcccttttacctctgtagttttcttccaaagctcataacttcaatttaattgagggatgttttcaaaa

SEQ ID NO: 536856 - DNA, 352 bp, Homo sapiens
atacaatcgagctcggtaccgcagctcgctgtcgctgggattacaggcgccgccacgcgcccggctaattttgtatttttagtagagacggggtttcaccctgttggccagggtggtctcaacctcctgacctcaggtgatccacccgcctcagcgctcccaaagtgttgggattacaggcgtgagccagtgtgcctggccaaccatgaatttcagaggccatgatggaaaggtttaggagggtgtctggtagtgactggtgaagagggcatctgatggaatggtctcaatgatgtctaggggaaagtgtctttcttgggactggtctcttgggtggcttgtagtggggaga

SEQ ID NO: 536857 - DNA, 168 bp, Homo sapiens
  misc_feature (19)..(19): n is a, c, g, or t
tcctgcctcagctacgcgngaggctgaagcaggagaattgctggaacccaggacgcagaggctgtagtgagccgagatcatgccattgtactagcctgggcaatgagaacgaaactccgtctcaaaaataaataaataaatttttaaataagctatgggattagaata

SEQ ID NO: 536858 - DNA, 1004 bp, Homo sapiens
cttccactccataacgctcctctataataggcctagcctaaccagaacagcactaaccatataccaatgatggcgcgatgtaagccacgagaaagctacataccaaggccaccaaacacgcacgctgtccaaaaaggccgttcgatatgggagtaatccctatttattacgctcagaaggtctttttcattcagctagggatttattctgagcctctttacgcactccaggccatagcccctctagcccactcaaggtagagagggcaagaggtccgcaatcgaggcgatcaacgccggcgtaagagtcccgcgtagaaggttccagatccgtataatcacatccgatatgactcggcttcaggaggtatccagtcacctgatggctccaccataggtctagatacgaagaatagaccgaaaccaaggtaattcgagtcaactggcgttagttagcacaggaggttatcgtggggatcttctaatatgttaaccacatacgcgtatcgagagcacgtcaaggagggtaccattacgcaagtagtcgccatattaagccgattgtttccggtaccgaggcatagtgctaacgggacatcaaaacagtatggtcccaggtaaggccagcagcgccatttaccaacgggaacagttttcaacagagtccagttgcaataggggccctcaacacttttatcccgttctacgtaaatcatggcgagtatcaattcgccggggcgcaaaacgctcaaagatgtaattatgtaccagcatgtgtaacccaattccccaagaaaaacaaagttcaccgtgttatggggcgtttccggaacagcccccctgcacccggctccttgggacaattgacctgcgctcacattgtgctggggtaaagaatagcatggggctagatggaactgcgtcactacccacgctggtccattgcgttcttccccgagttcataatgccggcaggcagaacggggggtccttctaaaaaccaaa

SEQ ID NO: 536859 - DNA, 1556 bp, Homo sapiens
agcggctctttctccccatgccctcgaggccatgttggcagaagggaaagtgaagctgcgctggttctactgccctttcacttcgattaagcaggcccgtacttacacaatgggcattttgcgcgccttcagctgcctaaacgactgatgccgcacaacttcatcttgcttccttttcactggagcactcgctgagcgagcagactacagaacttgacgtagcttctctctctactcgctctttgtatccctagtcgaccttaacggactcctgcgccttacgagttggccccgcaactgccatttccttccagggtaccgccaacgcaggacactttcatcccaaccacgcacttcacccaaccttgccaacccaaaccactttaccctggctgccacttgactgggctctggctgttcccactaaccaactcctggctctgccacaccggaccaccctggcgccgcaacttacttaccttctcacttcttgggcccgtcagccactggacctagctccatacactttaagcctcacacgttttacgcatcaactccccctctcaccaagcccccccgcacactagccggccctactctccggaatccgacatgccataactttacccggggtgttgccacgccgggcgctagcccccgtaagcgtcacgcaataaatccatcctcacctttctataaagtcctgaggccacacaccggtatctccgcttgtaaaccgctcgtcctggcatttaacccaaaacaaaccttgcaaaccttacacacaaccccaacgcccaacttatgggcgtagaccttcctccgtttggagcccattccgttggggagcccaagctaaacctttgccggccaacggcccttataaagcgtttcacctatcgttcgctcaacttgatcgcgccctcaagcacccccggcggtttactggggccaaagcctgctccgaatgcatcgctgcacatttggcccccccagctgtcaaccacgagacgcacccccaacactcgctcacagcccctaacaaccgacaacacgcttggtgaccccgccagacaccacttttgctctcatccgccccggtttgcgatttcccgactttcactctcacgctgggcgcgcgagctaacccccgcttatcccctttctcttcaccttcgccacccgccaaccttttcacgctcttcggcgcagccccttcgggcttatacgccccgcccgcttcacgtcttggacatccccgccgccgtccttctccccgccccttctgttcgtcctcctgttccctttcccctttttcggtctggcggccgtccggccatcgcgcccactgcccccccccacccccgtgggctctcctagccggcgctctctcccggccccttcgcgggctccttcccctcgtcgcgcgcgcctctttctcctccctctcgcccccttcgcccgcctctggtcgcccccccgccccccgcgcccgccctcctcctcactccgcgcgccttctccccccggcgtccctctccgcgctctccctcctg

SEQ ID NO: 536860 - DNA, 124 bp, Homo sapiens
aaacccggtgggggaacggggattttttttgcccccaaactgctttttaaacaaaaaaccatgggggtcttggggtttcctgcccccctttttttattaaaagaaaaatttaattttgccagga

SEQ ID NO: 536861 - DNA, 157 bp, Homo sapiens
ctgtgagagaatacacttttgtttcctttttctctgtttttgagacaagttgcctctgtctcacccaggctgcagtgcatggtgcgatctcggcatcactgcaacctctgcactcccaggttcaaagtgattctcctgtctcagcctcccgagtagc

SEQ ID NO: 536862 - DNA, 364 bp, Homo sapiens
gagcagatcgaaaatgaatgtgagaaggataatggagatactatgaaattaagagtaaaaatgtgcatgtcgtacaatcaaacatacattggatagttcattctgtggaggtgcagaaaaaaatagcccaaaatgaaggtctcagaagcaaacgcttttctctgaccttctcctgccctcctgtctctcagtcccactctctgctgaggctgaccatagaaactggaatccctctttcccaaggcagatcatagaaaccagaactccctttcctcagagctagtcataaaacataaatacattactataactttccctccacctttctgtgtaactactggccataaagaaattatctgactac

SEQ ID NO: 536863 - DNA, 2152 bp, Homo sapiens
cttaaataacacatgaatgagtcaaccacacccttgtggagttcagtgtgaaacaaatgccatccgattgcttgtccatcctctgtacacacccatgagattcatggtgccagcctagtaatatgtccctttcatgggaaagtagaatattcattgtcttagagttcaactgaagacgacaatctactgtagctggttgaagccgcaagggatttattatgcatcattagttggcttccaaaatttttggtagggttggaggagcaggctctaggctgagcttccaggagcacctactggaatcataccatggaactggcctgccatcagaaggaagacgaggaagcaggatctactctcatgtctgctgggtcctggatgtccattgtccccattgcgagtcatgatatcacatggctgccccctgacttgcctctcaacaccacgaagcgaggaatgggacgctgggatttcagttttctgtggactgccacagaagaggaagtaccttcttggctatgtctgccagcaggaacaaagaggcatccaaagcatgtcctttgggccatggcattgtctttttccttctaagtctaggatgggtgtgtctgctgaagctacatcattgtgtggaacctgagctgtggtccagctttccagcctctagtgagcagtaaggcacactgcaaggggaatgtggcagaggtgagtggatccacatggagtatttactacatccacttcattggattctacctggatcactgtgttggaggtggaaggccatctgtgatttgtggtgcttctaaaacattctaaggacgtgccctatctagttaagacacacatttgatttctagctatgcaacctttacaactgacctgatacttcctgaacttccatctgtaataatgagaaagataatgacgatgtcacatgttagtagaagataaagtgagcaaaaatacaccgaagctctgtctcagaggaaaatattagcttatttcttgggttactgtaggcttatttcttcccttttttaatcagccggtctaaatattgtacattaattccccctggactgggctgtatttggaatgagtggtcatatcagcttctagtgagttttcacacactcagcaatgagcgggaacatagaatttagcctctctggtacatactagggttaggattaggatcatacttgtaactaaagaaagcttaaaagctatattaaaaaccacagagcagggcagttccaaaatagccgaataggaacagctccaatctacagctcccagtgtgaacgatgcagaagacagatgatttctgcatttccaactgagattggaagacagtagcggttctctcagcacgcagcttgagatctgagaacggacagactgcctcttcaagtgggtccctgacccctgagtagcctaactgggaggcaccccccagtaggggcagactgacacctcacacggctgggtacccctctgagacaaaacttcaagaggaacaatcaggcagcaacgtttgctgttcaccaatattcgctgttctgcagcctccgctgctgatacccaggcaaacggtctggagtggacctccggcaaactccaacagacctgcagctgagggtcctgactgttagaaggaaaactaacaaacagaaaggacatccacaccaaaaccccatctgtacgtcaccatcatcaaagaccaaaggtagataaaaccacaaagatggggaaaaaaacgagcagaaaaactgaaaattctaaaaatcagagcgcctctcctcctccaaaggaacgcagctcctcaccagcaacagaacaaagctgggccgagaatggctttgacgagttgagagaagaaggcttcagacaatcaaacttctccgagctaaaggaggaagttcgaacccatggtaaggaagttaaaaaccttgaaaaaagattagacgaatggctaactagaataaccaatgcagagaagtccttaaaggacctcatggagctgaaaaccacggcacgagaactacgtgacgaatgcacaagcctcagtagccaattcgatcaaccggaagaaagggtatcagtgatggaagatcaaatgaatgaaataaagcgagaagagaagttt

SEQ ID NO: 536864 - DNA, 121 bp, Homo sapiens
aagcagttaatacagactcagctctaaggagcaacttaactctatggaaaaccaagcagctgtagctagagttgctcagttcagtccttattttaggaaatgggagtacaactattaaacc

SEQ ID NO: 536865 - DNA, 296 bp, Homo sapiens
gctggagtgcagtggtgtgatttcagcctcctgagtagctgggactacaggcacatgccaccaagcctggctaattttttttgtatttttagtagagacggggtttcgccatgttggccaggctggtcttgaactcctgacctcaagtgatccacccgcctcagcctcccaaagtgctgggattacagcatgagccaccatgcctggccagatttacgcagaatttcttttcctttttttttttgagatggaatttctttcttgctcgcctaggctagagtgcaatggcgtggctc

SEQ ID NO: 536866 - DNA, 391 bp, Homo sapiens
  misc_feature (16)..(16): n is a, c, g, or t
aagagccacacccttnttacctatgtctacgctacttcatgctataaggcagagttgagaattgcaacagagtccatgtgctcacaaagccaaaattatttactatctgattctttacaggaagcttgctgacatctgctgtagatcttcatgattttcctaaagaggcatgcttgcttcattctgcactttggaatttaagtcacattacgcagcctacttttagcagtgagagttcacaagggcagaaaggggaatcggggtgttaattagtatatttgtgaatactgcatgctatgtgttctaatgctttgtttcatcttctcagagtcctaggacaaaggttttattatctccatttgaaagacggaagcaggccaggtggtgcagc

SEQ ID NO: 536867 - DNA, 835 bp, Homo sapiens
gcaagaagcagcgactgcagcagcagcagcagcagcggcggtggcagcagcagcagcagcggcggcagcagcagcagcagcggaggcaccggtggcagcagcagcatcaccagcaacaacaacaaaaaaaaatcctcatcaaatcctcacctaagctttcagtgtatccagatccacatcttcactcaagccaggagagggaaagaggaaaggggggcaggaaaaaaaaaaaaaacccaacaactttgagcggaaacttctcagaagaatgctccaaaactcagcaaggtgcttctgggtggctgggtgatcaagtggcttctggcaaacccaatgaaggcgggacgcaagaatggactctggtgagccccaaggaaatccccgaatgtggagggctccaaaacatccaagttgaaaggggtacgagtggcctacaacgagtgctctacagggtcaggatgggggggctttggcaatgcctgggaaaactccacctggtgacacagatggggatgtatgacatctggtaaatccttctggtacagacgctgctaaatttggaacctcagggaaaagcatatcgtcaaaagagagcttaaaaggcatcgccaagggggtcacctccagggtcttcctcgccattcggaggtgctccaatttccaaaggatgatggctgaggtgcaggaagagtgcataccagcaagcttgaatgtgtgaagacatcgccaagacggaaacctgtgaaagccaatcactgagggtcgtcaagatgcccaatacaatatatccaaaagaatactaataacaagacttgtccgaagcctggtgcaaggt

SEQ ID NO: 536868 - DNA, 134 bp, Homo sapiens
cgctgcgctgtcacggtgctgacctacgtcatcgggcgtggcgccgcgccacgtcgacctgcgcccctatgtgctgtgcggcaaggacatccgcaccgtgccgggcggcctgtgccgcgtggcgctgaccgagg

SEQ ID NO: 536869 - DNA, 181 bp, Homo sapiens
aagagatgaggcagatgtttgccaacaaagtgaaggagacagagctgctgctgacgcataaggaaagggagctccatgacgcgtttgagcacctgacgcgggctcaccaggaggagaagcgcacggtggaggaaaagcgccgccaactggaggaggagaccaacgccttcaatcgactgaa

SEQ ID NO: 536870 - DNA, 87 bp, Homo sapiens
agaatggcctgattgaggatgaagctctgcagcgggccctggaaatgtccctggcagaaaccaaaccccaggttccaaggtacctta

SEQ ID NO: 536871 - DNA, 176 bp, Homo sapiens
cacagagctctagtgccacagcatccggatccaggtagtttgcactttgacccaaactggcggccttggctcggccattgtacagcttgccatcatcagcatggtaggctacagagtcaggcaaccagccaggctggtgatccaagctgtagtactgagggaccagccccacagca

SEQ ID NO: 536872 - DNA, 339 bp, Homo sapiens
cgtcgacgctcaaacgcatgaacttttaacaaggcacacctgttaattgaaatgcattccaggtgactgcctcatgaagctggttgatagaatgccaagagtgtgcaaagctgtcatcaaggcaaagggtggctactttgaaaatcgaaaatatattttgatttgtttaacattttttttggttactacatgattccatatgtgttattgcatagttttgatgtattcactattattctacaagacaaaccctggaatgcaagatcgaatccccgagctgataaggtacaaaatatgtcgttcggcccctgaacaagggtcgacgcggccgcgaattta

SEQ ID NO: 536873 - DNA, 2391 bp, Homo sapiens
  misc_feature (178)..(178): n is a, c, g, or t
  misc_feature (238)..(238): n is a, c, g, or t
aggcgtgctggtggtggcgaccagcaggatgctccaggattttgtgtttacctcgcgtgaagttcagcacgtgctgtcgtgtagtcagcttctactctaatttctgttacagttctgcaaaggtaacctggagtttagaagttaaaaaaaagcatgggatgttggatttgcaccattnggagtttctttaggaaagaaaagttttctgcttttttatagaaaatcatttcagtctccngaggtctcatgctagcaaattttgaaataggattctaatcactgatttcaaatattaagcaaaatgtaaagcactttaatttatagctatggttataaacaggttttagatgtttcaaatgacttgtccactgaatgtcacttgaccttgataagaggccgcctgcacacagagcccagttaattctccgcacctcggttgtgtgcttccgaatgggctcactcccgtggtggtgtttgagagccaacaacactacctcagagacgggtctttgggaaactttgggtctcactgttgcctggctggagcactttggtttatagctggaatactgagttcagttcagaaggcaggaaagacagtcacaccgacgtgtcctgaaggtgtaggctctccacttaggcgcacaagctgacggctgcagccagcaggccccggtgacgagacacttccaggtcttgtggtggggacgcctctcagtgccagtcccgccactgctgagtgagcctggtgttcttgccttcttggaaattactgctcacctggtatctgtacgttaatgtttcttgctgagttacagttttgataaagaggctctcatttcctgtgtcttgtatattcagtcctttcaatacgtccacctggaggctcaccacttggagagacacaggaaggtaatatttacagctgtcatgtgacatccccaggtctttgtgttttgccctgttttacggtgaggtaggagggaacccatctggggaccggtaggtgcaggtgcagtaggacgtgggacttttggacccgtcctttggtgcagctcgccagggatgagaggcacctccctacttgggtcttcaggagctggtccaaggagcttcgaatctaagtcatctagaatgaccctgaaatgactgacaccccgggcccaagaaaaacccataaccacctcagatggatctgacgtggctaagggacaaacagcaaatatttcagtcattttgattttacaaataaaaaatgtgttgtgtttttgtccgacattatttcctgactgcactgttctgagaatggagtccacctggtccctctggttgattagaatctcaggtttcagctcctgctgtcctgagcgaacttgcctgatgcagggctgtgctgtgtccagatgttgctggggcctcactttttctcttggctggaggtccaattgccagagcctcccacactgcacatacaaaggtctgagcccagggcagcttctggggccactgcacaggccacctgcttgggttcctcggagtttaatttgaaagtctgggtgtcttaggatgatggttaggaacattgaaaaatggctgcaaatagccaaatcaaacttaagaaccagatctctgccagattaaacatttttgaagcttttaaaagtcaatattcctagtggccactgagttccaggcacactggtgccctttactgccacagctgctcaccttgtctggcaaactggagggacctcagaaactggactcctgcatgtccttgggggcgcagccctgtggtgctcaggcagagctctcaggagccggggcaccttgctgttcgctgctgtgtcgtcttctaatgtgagctcatccactgctgctgcagcgtggtgatcaggagtcacagacaagatcggggatggtgtgcgtgtgtgtgtgtgtgtgtgtgcacgtgtgtgtggctaaattaagtcatactgtcaaccacacgtgatctcgtctgaaacagtgtttggaagtgggaacagttttgtcctgtatgctgatgtgtccagaatttcatttaatgatagacggaaaatgtgtggttactgaaaactgtatatgatacagaatttcataagagccatgctgttgggcaaagcaactctttttcaaccactgctcatcagtttctgtagagacaaaaactctgtacatattttggaatctgaagaatcctatgtaaatcatttgttacttaagtctgtgaaaaacatatttctttggaggaaaatgtatgcatttataagtgttccatggaatcagtttttattgtatcgatataattgtctctaagtgttgactgtcttcattgcaatatgaaattcattaaaatgtccatgttccata

SEQ ID NO: 536874 - DNA, 232 bp, Homo sapiens
cgtgatgattagaccaaagaatgttatcagacatctggacatatgaaaatctctcaaagaatctttcctggactgacgtttcaggtatttacatgaacttcctccgtatcctttattaaatacactatctaccttataatttaattagctataaaaacctaactgaaattttaagcttgacacagaaaagtcaaaaaggtgtttcctaacatgatgtgtctaaatgcaatca

SEQ ID NO: 536875 - DNA, 1629 bp, Homo sapiens
  misc_feature (178)..(178): n is a, c, g, or t
  misc_feature (238)..(238): n is a, c, g, or t
aggcgtgctggtggtggcgaccagcaggatgctccaggattttgtgtttacctcgcgtgaagttcagcacgtgctgtcgtgtagtcagcttctactctaatttctgttacagttctgcaaaggtaacctggagtttagaagttaaaaaaaagcatgggatgttggatttgcaccattnggagtttctttaggaaagaaaagttttctgcttttttatagaaaatcatttcagtctccngaggtctcatgctagcaaattttgaaataggattctaatcactgatttcaaatattaagcaaaatgtaaagcactttaatttatagctatggttataaacaggttttagatgtttcaaatgacttgtccactgaatgtcacttgaccttgataagaggccgcctgcacacagagcccagttaattctccgcacctcggttgtgtgcttccgaatgggctcactcccgtggtggtgtttgagagccaacaacactacctcagagacgggtctttgggaaactttgggtctcactgttgcctggctggagcactttggtttatagctggaatactgagttcagttcagaaggcaggaaagacagtcacaccgacgtgtcctgaaggtgtaggctctccacttaggcgcacaagctgacggctgcagccagcaggccccggtgacgagacacttccaggtcttgtggtggggacgcctctcagtgccagtcccgccactgctgagtgagcctggtgttcttgccttcttggaaattactgctcacctggtatctgtacgttaatgtttcttgctgagttacagttttgataaagaggctctcatttcctgtgtcttgtatattcagtcctttcaatacgtccacctggaggctcaccacttggagagacacaggaaggtaatatttacagctgtcatgtgacatccccaggtctttgtgttttgccctgttttacggtgaggtaggagggaacccatctggggaccggtaggtgcaggtgcagtaggacgtgggacttttggacccgtcctttggtgcagctcgccagggatgagaggcacctccctacttgggtcttcaggagctggtccaaggagcttcgaatctaagtcatctagaatgaccctgaaatgactgacaccccgggcccaagaaaaacccataaccacctcagatggatctgacgtggctaagggacaaacagcaaatatttcagtcattttgattttacaaataaaaaatgtgttgtgtttttgtccgacattatttcctgactgcactgttctgagaatggagtccacctggtccctctggttgattagaatctcaggtttcagctcctgctgtcctgagcgaacttgcctgatgcagggctgtgctgtgtccagatgttgctggggcctcactttttctcttggctggaggtccaattgccagagcctcccacactgcacatacaaaggtctgagcccagggcagcccatgcacggtggtccatgatctgtcgtccatgcttggtggtccgtgctcggtggtccatgggactgatcctgcacaccatgttgttttcctataacttacgtactttgagtgatgtggtatcatttcgctgag

SEQ ID NO: 536876 - DNA, 2536 bp, Homo sapiens
  misc_feature (178)..(178): n is a, c, g, or t
  misc_feature (238)..(238): n is a, c, g, or t
aggcgtgctggtggtggcgaccagcaggatgctccaggattttgtgtttacctcgcgtgaagttcagcacgtgctgtcgtgtagtcagcttctactctaatttctgttacagttctgcaaaggtaacctggagtttagaagttaaaaaaaagcatgggatgttggatttgcaccattnggagtttctttaggaaagaaaagttttctgcttttttatagaaaatcatttcagtctccngaggtctcatgctagcaaattttgaaataggattctaatcactgatttcaaatattaagcaaaatgtaaagcactttaatttatagctatggttataaacaggttttagatgtttcaaatgacttgtccactgaatgtcacttgaccttgataagaggccgcctgcacacagagcccagttaattctccgcacctcggttgtgtgcttccgaatgggctcactcccgtggtggtgtttgagagccaacaacactacctcagagacgggtctttgggaaactttgggtctcactgttgcctggctggagcactttggtttatagctggaatactgagttcagttcagaaggcaggaaagacagtcacaccgacgtgtcctgaaggtgtaggctctccacttaggcgcacaagctgacggctgcagccagcaggccccggtgacgagacacttccaggtcttgtggtggggacgcctctcagtgccagtcccgccactgctgagtgagcctggtgttcttgccttcttggaaattactgctcacctggtatctgtacgttaatgtttcttgctgagttacagttttgataaagaggctctcatttcctgtgtcttgtatattcagtcctttcaatacgtccacctggaggctcaccacttggagagacacaggaaggtaatatttacagctgtcatgtgacatccccaggtctttgtgttttgccctgttttacggtgaggtaggagggaacccatctggggaccggtaggtgcaggtgcagtaggacgtgggacttttggacccgtcctttggtgcagctcgccagggatgagaggcacctccctacttgggtcttcaggagctggtccaaggagcttcgaatctaagtcatctagaatgaccctgaaatgactgacaccccgggcccaagaaaaacccataaccacctcagatggatctgacgtggctaagggacaaacagcaaatatttcagtcattttgattttacaaataaaaaatgtgttgtgtttttgtccgacattatttcctgactgcactgttctgagaatggagtccacctggtccctctggttgattagaatctcaggtttcagctcctgctgtcctgagcgaacttgcctgatgcagggctgtgctgtgtccagatgttgctggggcctcactttttctcttggctggaggtccaattgccagagcctcccacactgcacatacaaaggtctgagcccagggcagcttctggggccactgcacaggccacctgcttgggttcctcggagtttaatttgaaagtctgggtgtcttaggatgatggttaggaacattgaaaaatggctgcaaatagccaaatcaaacttaagaaccagatctctgccagattaaacatttttgaagcttttaaaagtcaatattcctagtggccactgagttccaggcacactggtgccctttactgccacagctgctcaccttgtctggcaaactggagggacctcagaaactggactcctgcatgtccttgggggcgcagccctgtggtgctcaggcagagctctcaggagccggggcaccttgctgttcgctgctgtgtcgtcttctaatgtgagctcatccactgctgctgcagcgtggtgatcaggagtcacagacaagatcggggatggtgtgcgtgtgtgtgtgtgtgtgtgtgcacgtgtgtgtggctaaattaagtcatactgtcaaccacacgtgatctcgtctgaaacagtgtttggaagtgggaacagttttgtcctgtatgctgatgtgtccagaatttcatttaatgatagacggaaaatgtgtggttactgaaaactgtatatgatacagaatttcataagagccatgctgttgggcaaagcaactctttttcaaccactgctcatcagtttctgtagagacaaaaactctgtacatattttggaatctgaagaatcctatgtaaatcatttgttacttaagtctgtgaaaaacatatttctttggaggaaaatgtatgcatttataagtgttccatggaatcagtttttattgtatcgatataattgtctctaagtgttgactgtcttcattgcaatatgaaattcattaaaatgtccatgttccataattactattataaaagctttgtgttattgggagtcttattatttttatagtttttcatgttttgctttggtgaaacattgtgaatgactatataaacatcacgatgagctagaaattgaacaaatataatactggtcactcgaaa

SEQ ID NO: 536877 - DNA, 252 bp, Homo sapiens
  misc_feature (150)..(150): n is a, c, g, or t
cctggtgagtcgacctagaggaccccaagctggaagcctgaagataaatcagctcttcctctgggaggtgagtttattccttccttggaaaccaaggggtattatcgtgtctaggatatagttagggaggaagtggtatggagtacctangagaagcccttcactactgggtgaacttctttacttctttttcttttcttttttcttttctttcttctttgtgtttttatttttctctgggagacaaggttt

SEQ ID NO: 536878 - DNA, 1178 bp, Homo sapiens
  misc_feature (285)..(285): n is a, c, g, or t
  misc_feature (302)..(302): n is a, c, g, or t
  misc_feature (435)..(435): n is a, c, g, or t
agcgaggatgtgcgcagcgacttccagcgcagagtgccctacaactacctgcagcgggcctacatcaagcttaaccagctcgaaaaagcagtggaagcagctcacacatttttcgtggctaaccctgagcacatggaaatgcagcagaacattgagaattacagggcgacagctggtgttgaagcattgcagttggtagacagagaagccaagccacacatggagagttacaatgcaggagttaaacattatgaggctgatgactttgagatggctatcaggcanttcgaacaagccttaanagaatatttcgttgaagatacagaatgccggaccctatgtgaggggcctcagagatttgaagaatatgagtatttagggtataaggctggtctgtatgaagctattgcagatcactacatgcaggtgcttgtntgtcagcatgaatgtgtgagggaacttgccacccgccctggccgcctctctcccatcgagaattttcttcctctgcactatgattacctacagtttgcctactatcgagttggtgagtatgtgaaagccctggagtgtgccaaagcctatcttctatgccatccagatgatgaggatgtcctagacaatgtggattactatgagagtctgctggatgatagcattgacccggcatccattgaggccagagaggatttaacaatgttcgtgaaacgtcataagctggagtctgagctgataaaatcagctgcagaaggtctggggtttcatcactgaaccgaattattggatcagatttgcgggagggacgggatgggaacccgggtccccttcatgacgtgcaccgcgtggattggcgcccgaaggtccgtggacttcccactgggaacgacatggtcattgcccagcaagctcgaacctatagaagagtggccccctaggtatcagaaacacttagatggtcattaggcctgcgactagttaagtcgggtacttcgcgcggacatactgcgacaaacgcacagagcgaataagaacgtcgggactccggcgagtgcagggacataatcggattgcatgaggagtataagaatagataccagacagacgaaatggtagtatcaacatcaagcaacaagacgtaacacgagtcgtatgcagctgtcacaagcgaacgtaatctt

SEQ ID NO: 536879 - DNA, 116 bp, Homo sapiens
acgagagcgagaaggactgcgggcaggatcggcgggctcctggggttcagcgcgtgccaggcatcgttagctgatgaccagatgtggttaaggacaggtgtatagccttggagccc

SEQ ID NO: 536880 - DNA, 137 bp, Homo sapiens
agccggccccaagtatgcactagaagtctggagcgtggaaaatcaagcaatcaggaacaacaggcagcacactcaggttcaatctcagctctttcctcacttctgatcccttttttgctctttgcttgttccgctga

SEQ ID NO: 536881 - DNA, 172 bp, Homo sapiens
agggaggtgacagagaaggagagtgagagggaaagaagaaagagacgagagggagacagggacggagagagagcagggcgaagagaaaacaacgaaaaatgaaggaacgcgctgaaaaaccaaagagaagaccccaaaacagccaaacagaaaaaaaaaacacaacaccaca

SEQ ID NO: 536882 - DNA, 105 bp, Homo sapiens
gtgtacctcttcctacgccagtaacttcgggtgcgtcagtatcgcgagagatcgcgactgccctggtcacgcggtatcaccgatatgcaggtcgacaaggtacct

SEQ ID NO: 536883 - DNA, 443 bp, Homo sapiens
agatcttgcctgataatcataaaggaatgcgaataggagactggtaaaatgatataggactagtgcaaatgcaaagcgaaggtaaaagtcatcacgaaccgcacagactaggacaaaactcctacatctggctagcaataggttggatatccgtcagaccaggagccagagaattggctacaaagagctactggagtagcccctccctacaaataaagtatactaaagcgtagcactgatacaacatagaagtacgcataaacttggggctaccaagtctacaatagaggggagtggatagtacagacagaggagcctacctggacctggtacaatctatcacgcggaaacttatagaatagggtaatcctactaccagtgatagtccatgtagctgacgcaagcagagcccgccccgtagcaagcctccaagcaggtagtac

SEQ ID NO: 536884 - DNA, 900 bp, Homo sapiens
taaaaattggatgtgagacgtctatctctcaccagaggtaacgagaagtaggtcgaaaattactacagaaaaaaggaacaaagtgctatacattcataatatatcccctttatattataatgagttaattccacttattatctaaagtggcactaaattggcatgatggtagcagtgtccaatagtgaagttaattactgtcagattactgcatcacagagaaaggaagggatcccatcaagagagagggggttgtctccttctgggttgtgctaaaaaaaatagggaggaaagctggagcgtggagtcaaaggaattgagtaagtgtgctggttctgacaataggttgtaaggcacccttgggaaaggatatacaagaggttcctgagttataaaatgggagagtgtaaaactagccttgtaagtagagaagtcaaatgagaaggtatgtgaggactctgtcactaaatatgaagagtaataatcggagtttagaggctagtttgagaagacaacagaatgaacaagagacagtaagagcataatccgggtgagacaagataagagcagatacaggacggcacggcaatgggcctgcaatcacagatagagacgagacctaaaagaatcacactaaagccaggaccaacagaaggaggaagtcatgaggcccaccagcaaacggagaccccgttagaataacaccgcagggggctccacgatcgagggcagcaacacacaggacccgaaaacggcgagacagcccctaggttagaacacacacagaacgctgcgggacaacccatgcatgaggagacgcaagaaatcgggcgacacgggacgagaaaacgcactccaagggatgagcaccaacaccggccgccggaaacaagtcggcga

SEQ ID NO: 536885 - DNA, 1331 bp, Homo sapiens
ggcctatggagaggctctgggtcttgcttcgttaggcggcccagaggattcgccatggtcgacgtgccctgagcactcggggatgcaccgtcaccgaccaaccggatccgtcctgctgggcctgggagaaggttcgtggtctttggacgaagaagcacgcatggcctggctgccctataaccatctgagagtaataggatacggttacaggttatccgcgtgctcttgcgatcgagaaggacgctcgtcctgggcgaaggcctatgaccccacaaccaggataaggcccaaggccgtcgtattgcctatcagtagtgtgcaagctctacccgtagatagtggaccgaatacctgaatcactcacgagctccatgtttcttggcgtctttacgctagtatccaacagtcaagagattggactggcgtagcaatggacacttgctatcgtcgactgcgtcgctagtcgacgatagacgtcgattgtctttggagcaatggatcctttcgtcttcccctctctcaacgcccccatgggagccttgagtgccatagcgctacgacctacagagattggtgggagttggtttgttgtgttctttgcttcacgcttatccgtatttagctaatgtgcgccttgttcgttcctaatcctacccaaccaagcgggctcgtgggggtccttggcgagatgtgacacctgagcacgagaggaccgatgagagtggatcgaaagcttcataagcgcgccaggtgggccgtagcccatgtgaacgcttgtgccctcgctaagccctaacgtcgtcggcttctagcgcatataagaggcaaccgtaaccacaaatgattccaccatgggcgcacagaagacaggaacgcgaatttcccgaggtatggtaggggcgacagaatggctttacagttgtctcgacgcgattggccccatagcataagtaatcccctagattggcccttctgttgcctttttagatcttcgaagagcttatagggaactagtacttgcggatcctctcccaaggtaccgcttcgtttccccgttgttccctcgtttccttggctccccccggttccaaccaatgggcatacgttattggtcaatttgtttcacacttgggttagtggcgacaacagcccccaaacttcacaggcgttccccgggttgaacaccattgggatgaacgaaagccagcaaggggccgggagactttccaacccctgtgagagaccatggtgaaagcctctccttgcaaaagaggcccccctggggaatgcgaagtggttgggagaccctccgaacgagactgttagattgc

SEQ ID NO: 536886 - DNA, 148 bp, Homo sapiens
aggtatgtgatctagaggatccctaactgggttcgagttcttgaagtgttctggatcagtgatctgcctgtgaacttagtttcacgctgaagacagtcttctcagttctcatgactgtgaagtgtgaaaatggaacgcatccttgatc

SEQ ID NO: 536887 - DNA, 213 bp, Homo sapiens
cttctgagtggtggggcggatgagctccagccaccccggagagcactttctttgtaacatcttcctatggtgacatcgtaaacttacacagattttatgagcgtggtacatacattaacttattacctcattttgttatttttcgaaacaaagccctgtggaagacaatggaaaactcgaagaagcattaatgtcattctgttaagctgcgta

SEQ ID NO: 536888 - DNA, 487 bp, Homo sapiens
  misc_feature (367)..(367): n is a, c, g, or t
ctttatgcgatactttgacttggaaagttacaacactaacacaagtcttaacacatttaacattcgcatgaacagactcagagcgaaagtcaaataaaattaaacatgtgctactttttttcctcacaagaacataaaaattatggaggggtacttagctgggaatttaaaaaaagtaacacaatttttccttttagtagtccttgggtagttatgatagaatagtttccactttttgtttctttgaactgggattttggtccaaagttttgtttgtttctagtatctgcttctgcctccccctctatcagatcggcttcctccacggccaccacctcttggtgctccgcggcttgaactgctgtangaatcacgtggaggagggtaccccctttccatagaagggggaagccctctttcttgtctgccaacccgatcacgaccacttgagtagagatcacttcggctgcttgagtaactgtctcga

SEQ ID NO: 536889 - DNA, 432 bp, Homo sapiens
ggatccggttgcagtgagccgagatctcgaggtcgagccatggccctccagcctgggtgacaagagcgaaactctgtctcaaaaaaaaaaaaaaaaaaaaattatgtttctttctattctttgatacagtactttagtgttactttaaaaaaaatcttggctgggcatggtggctcatgcctgtaatcccagcactttgggaggttaaggtgggaggatcgcttaagtccaggagttggagaccagccttggcaacatagtgagactctatctctacagaaaaactttaaaaaattaaccgagtgtggtggtgtgtgactgtagtccagccactccaggtccagctacttgggaggctgaggtgggaggatggctttagctgggaggtcgagctgcagtgagtcatgatggcatcactgcactcagcttggg

SEQ ID NO: 536890 - DNA, 174 bp, Homo sapiens
accgttatttcgtcatagctgttcctagaggtatccccccacgctcatgcgcagagtctggttccgtctcaaacttggttcggaagtcatctggaggcagacgggcgttgtctgatctgcggagggacaatccttggagttctcatatggtggcaccatagaatcttagtcccg

SEQ ID NO: 536891 - DNA, 302 bp, Homo sapiens
ctggccgcgtttacactggccgcgttttcactgccgctgttacactggccgcgtttacactgccgtcgttacactgccgcgtttaactgccgtcgttacactgccgtcgttacactgccgtcgttacactgccgctgtttaactggccgcgttacactgtccgcgttacactgccgtcgttttcacttgccgtcgtttacactgccgtcgtttacacttggccttgttttacacttgctttctgtttttcattgtcccgtttgttttaacactttccctttgttttaacaccttgtcctgct

SEQ ID NO: 536892 - DNA, 530 bp, Homo sapiens
  misc_feature (23)..(23): n is a, c, g, or t
  misc_feature (46)..(46): n is a, c, g, or t
  misc_feature (54)..(55): n is a, c, g, or t
  misc_feature (59)..(59): n is a, c, g, or t
  misc_feature (72)..(72): n is a, c, g, or t
  misc_feature (87)..(87): n is a, c, g, or t
  misc_feature (312)..(312): n is a, c, g, or t
cggcaagctgttcccgataccgntccgcatttaaaggtgccgatancgcgagcnntacncgaagcctgccgncgtattcaggcgaanggttatacccttggcaacgtcgatgtcactatcatcgctcagcaccgaagatgttgccgcacattccacaaatgcgcgtgtttattgccgaagatctcggctgccatatggatgatgttaacgtgaaagccactactacggaaaaactgggatttaccggacgtggggaagggattgcctgtgaagcggtggcgctactcattaaggcaacaaaatgattgagtntgataatctcacttacctccacggtaaaccgcaaggcaccgggctgctgaaagccaatccggaagactttgtggtggtggaagatttgggctttgagcctgatggtgaaggtgagcatattctggttagaatcctcaaaaacggctgcaatacccgttttgtggcggatgcactggcgaaattcctgaaaattcatgcccgtgaagctcttcgctggg

SEQ ID NO: 536893 - DNA, 274 bp, Homo sapiens
aaccgtccatccaccaaaaccacaagaagaacaggaagccaaaaaccagtgagagtcacaagagatggttctaacgctgctgccttacactctctcagtaatctggcgccgtgctttagattcgtttactagttgtgtgggcttgggaaaattatttcacctctcagtgccttagtttcctcatcttcaaaatggggataatagtatctacctgacaggttgctgtgatcattaaatgagttaacttattattattggtgggtcagaacataag

SEQ ID NO: 536894 - DNA, 124 bp, Homo sapiens
caagaagagtagcactctatacgggatattgatttcacggagcgataggtgttcaacgggacccctatctgagtgggggtcataccatagggagacgagacagggatttgacctgtacatgtgc

SEQ ID NO: 536895 - DNA, 124 bp, Homo sapiens
ccctggaggcaatatattgaggatggggatattgctagtgatgaggatggatagtaatagggcaacgagcctcctagtttgttagggacggatcggagaattgtgtagtgcgaataggaaatat

SEQ ID NO: 536896 - DNA, 175 bp, Homo sapiens
cggcaagatccattcaataaggcttctccatggcacattacagtcagactgtcaaaagtcaaagacaaagagagaattctaaaatcagcaagagaaaagcacctagttacttataaggaaaccctcatcacactaacagcagatcagatttttcagcaaaaacgtcacaggccag

SEQ ID NO: 536897 - DNA, 155 bp, Homo sapiens
ggggaattgaagtagatagaaacgactggattactccgagtctgaactcagatcacgtaggacgtttaagtcgttgaacaagacgaaccctttagatagcggctgcaccgattggggatgtccatgatccaacagtcgagtgtcgtaaagcccta

SEQ ID NO: 536898 - DNA, 476 bp, Homo sapiens
tggcacttggagactggtgagactatgtgtacccactcaggccagtgtggcccagaagaactggtacatcagcaatgaaccccaagggacaatgaggcatgtctggttctggcgagagcatgagcgatggattccagttcgagtatggcggccaggggtccgaccctgccgatgttggtcatccagctgaccttactgcgcctgatgtgcaccgaggcctcccagaacatcagctaccactgcaagaacagcgtggtctacatggaccagcagactggcaacctcaagaaggccctgcttcctccagagctccaacgagatcgagatccgcgccgagggcaacagccgcgttcacctacagcgtcactgtcgatggctgcacgagtcacaccggagcctggggccaaaccgggatttgaatacaaaaaccaccaagtttgcgatggggtcccggaggctcgaaattccgaaattca

SEQ ID NO: 536899 - DNA, 261 bp, Homo sapiens
tcagctccttacagggcctgcctctctacttcttctggcttcgtccccgggagtgtccaacgggctctgtgggtcactgtccccttcatcttcagcaagcctatcaggaaacttctatgcgcttcctgcggacatatgggtggccaggaaggttgtttatgcaacagagccacaaaacacggttctgtcttcaccatgcagctaaacactgggctgcccagggagttgtaaccctccgcatgggtaaacccttggttcatg

SEQ ID NO: 536900 - DNA, 431 bp, Homo sapiens
ctcccaaagtgctgggattacaggcaggagccactgtgcccagcctaatctctttttttgagacagggtctcactttgtcaccaatgctggagtgcagtggcaccatcttggctcactgtagcctcgacctccctggtttaagtgatccttgtgcctcagctccccaagtagctgggaccatagcgtacgccaccatgcctggctaacttgtatttttagtagagatggggtttccccatgttgcccactggtcttgaacttctgagctcaagtgatccaccgccttggcctcccaaagtgctacaattacagacgtgagccactgtgtctggccatttttaaacgttttttagggaaagtaaataatagctggcgtggtggctcacacctgtaatcccagcacagtggcaggatcacttgagccccggag

SEQ ID NO: 536901 - DNA, 1165 bp, Homo sapiens
ctaaaaacaaactctgaggccaccagcagatcatctttaagccagagagtgcctacaggttttgaacactattatcatctaggtatatcattgcattgcgcggtaggcttcaaaaccgtgtaggcactctctggctaaaaacaaacgtctgaggccaccatgcagaatcagtctttaatgctaagcttactatttttcacctaatttactatggatgacggagatttatggctctgtgtgtaagcccaggcatggatgtgcaggaggacacgagtctcggctcagctgcgaacacgtccggactcccaagttcaaggacgattctccgtactctcagccatccttggtgctagctgtggattacgaggatggcacccaaagccaatgatgcccatgtgcctaaatattgcatgtacctttaaaggtagaagattggggttgcaacgcaatgtttggcacagtgcgtggactctacaagactcgcagatcatcaggggtgagatcataactccgatctccctccgagcaccatctcgcagagaaagctatcagttgggcgaattataacaagtgcaccattgaaggccctaaagcagcagtcccccggggcccgttacattctcgttaaaacagtcctgaaagagttacaagggggacacggcagttgaacgaacacttggcgctcccaagagaaaacaacggattgtcgcaagtgaaaaggggcgagattctgagatggggcacaagtttttcccccaactgcaaaacgcgctacagtatggggacgtatccgattggcacgagtgtgccggtaaacccgcaccgtttcatatcgataagttctaagcggataactttagagacaagccgtctccgttgagtaggacccgcctgttcaagggcaatataggatctgagcaccagcgttaataagttccaccaagacgtagtgcgcccaccgtagaaggggaaacacgatggagaaagtagtcatggtgggtgtaagcacaaaggaaagttggcggcgttaaacgataggagagccgttagctgacagtattcccccagtatccgagagaggagataaaggggtaccaaaaaggcaagcagcaagtatgccgtataggaggcaccaagtctataccagcactgggaagaaagatct

SEQ ID NO: 536902 - DNA, 433 bp, Homo sapiens
gagtctctgcaataaaaactaaaagtgttgataaagccgatgccaaagatccccgcttattgatgagattggcgcagtcggggttctctttccctcttcctccatttatggcgaaaacttgaaagtctttttttgtattcgtaagtctgctgttatgcttgagtgtatgaggaatgcttatgtgaagtagaaaagatgcgtagatgcaccaggatgttgtggtagtgttttcagtcgggttgtagagatgtttggaaagtagtcagtttgtccagctgtttcaggcagaataccttatgctgttcccaattcgtcaaaaggaaaagtcatctgacaagaatgtacttttttctgtcctccaaaagttggagtttctgtttgtttgtttgcttgtttgtttgttttgattgtcagaataaagtattttaattca

SEQ ID NO: 536903 - DNA, 151 bp, Homo sapiens
  misc_feature (46)..(46): n is a, c, g, or t
agagtggagaataaggaggagtactatatgtctgggcacacagcanctcctgtctagctctggagagctgaagagatggcgtggaagaggaggagggagaagagctgggcgacagtaaagctttctaacttcccctttctttttccaaccg

SEQ ID NO: 536904 - DNA, 207 bp, Homo sapiens
ttaaactaaaaaaacctttttttggggagaaattttaggcctttaaaaacctggattttttttttttaaaaaagttaaatattccggaatttggaaaaaggtttgtttaaagtagggcaaaaccggtttaaagggtttccttttaaaaaattaaggattttgggccctaaaaatttggttttttaaaaaaaaagctctggattttga

SEQ ID NO: 536905 - DNA, 1209 bp, Homo sapiens
tgctagccggggccatgtcggcgggttgcggctggcggctgagtgcgtcgtgtggaggaggggaggcggcgaggaggcgcagttcccgctgcaccgcgatcgacgctgcggagcgagcccacccgtacaggttgttcctgtcgtattccctgcttgtttacgaggtcacaatactagggatccactttgatacaaggaaaggctcggtacgacgtagaggctatggcgccccatcgaagggactacatctagagtcggccgaccctcgtacactgtcggatctatagtcccaatcatgaatcattaaaccacatcagcaaaaatacaccacaacacactacacaccatcaataacacaagccacgaagacccctccaaacaagaggaacacagtccctgcccgcgcaccaaacacacgccgcccgcgagccagccaggcccgcgagacaacccccaaataacaccaacaaccagcagagcggaagagagacacccccagcacagtgacgagacagaaacacagaaaacgagaagacagcaggacgcacgcgagcccaacgacaaacaccttgcagccccctactaccgagccagataccacacaccaccacacaacaatacacaatacaaccacaacacccatcactaatacacagtacaacttaaccaaatctcctcacccaacacctacaacacctacacctaaacccacctacacacacaaacacactacaacaccaccaaacacagactctccatacaccacactaccaacccacacaccttaacacctcccccacacactcccaacgcaaacctcacgcaatcatccacaccagcccaccacactcccaccctcccacatcacactctcacacaagcacctacaccaacaaacaaccactaacccacctcacccaaccaacaaagtaacacctaacactaacaggcacccgacaggagcgcctcgccgattcagcactcgctcccgttacacacagttacggacacccctcgacgacagtgttcagcactagtccgcgtcgcttaccgcctcttcttctctccgcactcgcgcaccgcttcctcaccctctcgtactgacgcgccaccggacgcccatactcctcccagctagtactggcgcccgatccccctccaccctccgcacgcccgccgccgagggcgtcctacaacgcacccacaacg

SEQ ID NO: 536906 - DNA, 494 bp, Homo sapiens
ttggtccgtggtatgtgtggaggatactcatcagctcgagacatcttcgtgctaaaaggagaataggtcgcatgatctatccagccatctatcaagccacccaagccaactcatacttctgatttttcctcaccccaatatattcaactatgacagagacctgctagcgcgggctgctctgcaatatgatatatctatcgtctggcttcggccttagaccagcacttgatgacttaaacaagtacaagcagaggcccctttgtcatgcttctgccctcagtcttgccttccctattctattcaccagagggctatgagactgagctttctaaaacgcaacgctaatatgaccgcgtctccagtctggaagccttcactgaagccggacacaaaagggcacagtagttataaattcccagttcagatcaaagtcgagaataggcatgtccagagagatagagagtagataaggggttgcaagggctgaggtagag

SEQ ID NO: 536907 - DNA, 338 bp, Homo sapiens
agtgggtccatcatccagaaagagctctccttgtagtctgtagccatgtaggtctaagtgctgcaaagagagggatggagtcatccttcatacattctgaagaccgacgcactcgcatccatcgaggcacgattgtccctccacgctggaactacagggatactgctaatgagttacaggcaggtacagggctatggggaccatgattgcttctggaacgcttctgaactgtcataccacacactccccttggtcaggcagatagagctggacacgatggactccagagtctgactacaggttgaactagtatcgcatccccaagagcgcttggcagg

SEQ ID NO: 536908 - DNA, 521 bp, Homo sapiens
gagtttgagatcagcctgggcaacatggcaaaaccctgtctctacaaaaaactacaaaaattaggcccggcatggtggctcaagcctgtaatcctagtactttgggaggccaaggtgggtggattatgtgaggtcaggagtttaagaccagcctggtcaacatggtgaatccctgtctctactaaaaatataaatattagccaggtgtggtgatgtgcacctgtagtcccagctactcaggaggctgaggcaggagaattacttgaacccaaggaggcagtggttgcagtgagcctaagattgcaccactgcactccaacctgggtgacagagcaagactttgtctcaaaaaaaccaaaactacaaaaattagcagggagtggtggcatgtacctgtactcccagctactcgggaggctgaagtgggatgatcacttgagcccagaaagtcaaggctgcagttgagtcatgatcctgtcactgcattttaacctgggtgagagtgagactgtgtctcaaaa

SEQ ID NO: 536909 - DNA, 134 bp, Homo sapiens
aattcgagctcggtacccccccaattaaccctcactaaagccccaattgaccctctcatatggaattccgatttgtgactcttggaggagtcagtggatatctgatccccttagtgagggttaattcgcggccg

SEQ ID NO: 536910 - DNA, 110 bp, Homo sapiens
tttgacgccagtgcaaccagtgtgagagacagctttccactgggaatactggtccttgccgaatttacgtcacagaaatgtcctgaggttaaagtgagactcatgtaaca

SEQ ID NO: 536911 - DNA, 892 bp, Homo sapiens
acggcgaactgacgctactatgggccgagtggctagggaacgacgcccgaagaatgggagctgactgatatggtggtgtgggtgacgggagcctcgattggaatggtgaggagctggtgtgtaccagtggtctaaaccataggagtgtgtctctgtgtgctgtcagccacaggaagagtgcagtgagctggagaatgggtgaaatggaagatgcctagagaatggcatagtttaggaagaggaagaagatatacgtatgtgttttgcccctgtgacctgaccgacaactggttcccattgcaatgcggctaccaaagagcatgttgctccaggaggtggggtagaactcgagcattctggtcaacaatggtggaatgtcccagcgtgctctgtgcatggataccaggcttggatgtctaggaagaagagctaatagagctgaagtagcttagggacggtgtcctttgacaacaatgtgtgctgcctcacatgatcgagaggaagcgagggcaacagattgttgactgtgaatagcatcctgggtatcatatctgtatctctttccatgggatactgtgctagcaagagatgatctgacgggttgttaaagtggcttcgaaagattgcacatagcaggtatactagttctaagatttgtccagactgtgcagtcagttgtgtggagatgcctagtgatgaaatgctaagataggcataatgcacagtcgatagatgacaccagtcgtgttgggttagtgtactgttggctgactgagattgggtccaaacacttctgggagcaaggggatgacggggggtataacattggaagggaatattggggaaataaaaaaagggaaatatgaggaaagaaaaataaagaagaaaaaaa

SEQ ID NO: 536912 - DNA, 953 bp, Homo sapiens
ggcagatactgagcttcagcgtctcggttccaatgccgtggcgccctccaggaagttcttcgtggggggaaatgggaagatgaacgggcggaagtatagtgtgggggagctcatcggccactctggagacgcgggccataggtgccgggcgcacagcgaaggtggttggggctacaccaccatgactgcactgttatcggattgtcggccggtgaggaaactaaaatccccaaggattgcaatgtgtggtgcaagcagctaacggctaccaaagatgcaactagatggggctttgacttagggggagatcgagccctggtccatgatcgaggatttcactgcggagcacgtggtggggtggtcctggggctactcgggagagaaaacgcgattgtcgtcttggggccgacgtcacgattgagcctgtacttgggcagaagaagtggcgccagtgcgtctgtgcagagggatcgtcgggagtaatcgcctgcattggggagaagcgagatgaaagggaagctggcgtcactgagaaggtcgttgacgagaccgtagccatcgtgtcgatcgcagataagcgtgaaggactggagccaggtcgctcgctgggctatgagccctgtgtgggccattggggactggaaggactggagaaccccctacagggccagcaagtgccgcgagaacgctccgaagatgggtaggaagtgcaacgtctcggatgcgggggtcacagaccgaatattagtggcgcgctgtgactggggaaccggccgagtcggcagccagcggaaggggaggctcctggggggggtcccaagggaacgggagtctcaagcaacaaggccccttccacccccgcgcacgagaatgcaacaaggctcccacaagagggggcccagggcgcagactggatcagagggcgcgcccaaagaagcaggccgggagccacg

SEQ ID NO: 536913 - DNA, 316 bp, Homo sapiens
gcgacggtagcagcagcatggccgcgatctataggggtatagaggggggaggcacacgattccgaggttcctttaattctcagaggatggggaagatcctcgcaggagcagattgggcttagcacaaaccccttgcttgatctcggacaaacaaagtgtttgtgagagagatctaattagatatgtgaaccaaggcccacccgggaagcacagggttgatacccttggttccctctgcaacttgggctctctctctgcgctgtggacccaacgacgacgcggaggagtctcatcatcgagcttctggggcccctat

SEQ ID NO: 536914 - DNA, 877 bp, Homo sapiens
  misc_feature (155)..(155): n is a, c, g, or t
  misc_feature (193)..(193): n is a, c, g, or t
  misc_feature (228)..(228): n is a, c, g, or t
  misc_feature (256)..(256): n is a, c, g, or t
  misc_feature (280)..(281): n is a, c, g, or t
  misc_feature (361)..(361): n is a, c, g, or t
  misc_feature (364)..(364): n is a, c, g, or t
  misc_feature (367)..(367): n is a, c, g, or t
  misc_feature (371)..(372): n is a, c, g, or t
  misc_feature (399)..(399): n is a, c, g, or t
  misc_feature (433)..(433): n is a, c, g, or t
  misc_feature (439)..(439): n is a, c, g, or t
  misc_feature (456)..(456): n is a, c, g, or t
  misc_feature (534)..(535): n is a, c, g, or t
  misc_feature (539)..(539): n is a, c, g, or t
  misc_feature (543)..(543): n is a, c, g, or t
  misc_feature (553)..(553): n is a, c, g, or t
  misc_feature (565)..(565): n is a, c, g, or t
  misc_feature (578)..(579): n is a, c, g, or t
  misc_feature (581)..(581): n is a, c, g, or t
  misc_feature (636)..(636): n is a, c, g, or t
  misc_feature (642)..(642): n is a, c, g, or t
  misc_feature (681)..(681): n is a, c, g, or t
  misc_feature (683)..(683): n is a, c, g, or t
  misc_feature (685)..(685): n is a, c, g, or t
  misc_feature (770)..(770): n is a, c, g, or t
  misc_feature (816)..(816): n is a, c, g, or t
  misc_feature (866)..(866): n is a, c, g, or t
caggcgctccgggctcgcccgctaggtcggggccgcggcgtcccccaccctaagtcccacctccggccgggcatgggtacccgggtcgggcctgcctcggtcctgggcccactcactggtccagaagcagctgtaggtgcccaccaagacccatntacgacgctgctggccaggagtccagccctatacaggnaggagctgctcttctggggtatcgcgtatccacanaaggatgaggcagacttggtgacaagantggtctgagcagcgcttccagagnnagaactgagcccagtgagagcgcaccctggggtcagcctggattcctgggtgtgtccccggcagccacacacagccatgnacnacncaanngcactcctcttcctcatcctggccaanggggcccaggcctttcgtatctgcgccttcaatncccagnggctgacactggccaangtggccagggagcaggtgatggacaccttagttcggatactggctcgctgtgacatcatggtgctgcaggaggtggtnntttntttnggcagtgttntttttttctctnttttttttttttnntngatttgatggctctgggccctacagcaccctgagcagcccccagctggggcgcanacctancatggagacgtatgtgtacttctatcggtcacacaaaananangtcctgagttcctacgtgtacaacgatgaggatgacgtctttgcccgggagccatttgtggcccagttctctttgcccagcaatntccttcccagcctggtgttggtcccgctgcacaccactcctaaggncgtagagaaggagctgaacgccctctacgatgtgtttctggaggtctccngcactggcaga

SEQ ID NO: 536915 - DNA, 1210 bp, Homo sapiens
gggaagcctttgagggtatcacacagacaccacccaccttcctccagcctgatgcgcaccatgcccatccttgcagcccagcacaccatgcaggtgtaagggacgattggagatttcttcccagagagtctgtcccagaaggactgtggcttgtgtgatgtccaatctcgacctgctccggcatcaagtgcattcaatccacaattatgcacgacgaccatcagaacacgatctttggatggatgacggctcagattacacaccatggagacttaggcatgagtgcggtgcccatgatgactggagggtggatagaacaggatgactgcatgagagcagactggaaggaagatgggagatagactacagagagggagtggactgtaaggatgatatgagaggagcatggccaagaaacaaagatgagcagatcaacatgaggaaaaaaaggcagggcacaatatgacacatactaatacatcaaataaaattagatagatccatataagaaatataaagatagatacagactaccctgcagaaacatcgatcgaccagcgaccatgcaaaacgcagatgcgatcagaaatccctgacacacagagcacaagaaatgggaccaatgcgccaacctcacagagaccgcgcacacaaccgccgccacgatcaacacacccacagagacatcggcgaacacgcaaagcaaaaacaagcacgccgacaaccccaaaatagaagccacggaccttggcacaacgacaagagacgaccaatgcgaaacaaaccacacaaaacaccgagaaacacacaaggcggcacaacacacgacaccaccaaaaacaaaccaaaacaaaccgacacaaaaccccggaacgcaagcagaagagcgcgacaacatggagagacatcacaagcaagacacaacacacaccacgagccaagcaacaaacagagggcagaaggaacacctgggaaacacacgccagcagggcagggccgaacgcacccagacaaaaacgacgagaaagcaaaccaacggaccccaccgcccagccacccaacaacagcaaagcacaaaaacacaacgtaacaaccccacacaaacagatagaagaacacacgtggcgaacaaaacaagaaaaaaaccaaagagcacaacaaaagagagagaaaacaaggacaacaacatgggaggacccacaacgcagga

SEQ ID NO: 536916 - DNA, 110 bp, Homo sapiens
gcaccattgactaccagcacgagcccatcaagccctggaagtctgtgtgcgagcgggccggagggtgggagcccaaactaagaaggaccgcaactcggggccggaggaac

SEQ ID NO: 536917 - DNA, 857 bp, Homo sapiens
  misc_feature (196)..(196): n is a, c, g, or t
  misc_feature (201)..(201): n is a, c, g, or t
  misc_feature (315)..(315): n is a, c, g, or t
ggagactgaattgtcagtgagcggagtctgaggtcgctgtggactgacccatcggggccttgcccgagtagtggtactagtcggattccttatgatgactacccggtgtgttgtgctctgccgtgactagtgagaatcctccacgtcatggattcctcctcatgagagggtacacgctacccggactactaacaantgagnttgactccagtttcttgccaccgtaatgcatcactacgtgatagaaggtctcctggagtctcagattgggatttaaaattcctgaggaggaaaggcctctccagcatagtgcantgttcatcgtccaacggttggattccgtgacatctgtatgcgcatatgagctaggactagtggcataggggcaccttgttctagctgtgaatggatggtggattgccaagatattgagcgatcagcagggctagttgcatgatcctgaatgagcagctcgtgagaatcagcatgcggtgtgcgcttctttccctactattatcatctgccaaaaagagaggactgtgcactagaacgttgcggcccacagcccttcatgtggactctgtcatgacatgctatgtagtacttcaggggagccacttctgttttcagtccgctcccatggaatagtgagtagggaggagtggggagacaggctaaccaatgcattacccgatacatgattgcgcttttgagtaccctagtgtctaggtggagcttcattccctgagaggaggatgactgatatctagggataaacttagcctgttagggaaccctagttaggaaaagaacaactggcatttactggatttcatgcactggtcccttacatttgt

SEQ ID NO: 536918 - DNA, 133 bp, Homo sapiens
cactaccggcggaatgattcggggcgggggtacttgtgtttgagtagtttgaatggagtcgcgctaagctctcgtacatctgatcacaggcctcaggctctgcaacctgggtattctctccccccacagtatg

SEQ ID NO: 536919 - DNA, 675 bp, Homo sapiens
gggtacctgtgatgatcttatcccgaacctgaacttctgttgaaaaaaaaaaaaaaaaaaaaaaaaaaaaaaaaaaaaaaaaaaaaaaaaaaaaaaaaaaaaaaaaaaaaaaaaaaaaaaaaaaaaaaaaaaaaaaaaaaaaaccaaaataacccaaaaaaaatttaaaattaaaaaagtttttgatatggcactcaaatttcggcttatttggcccattcccctttaaggggactgttttaaaattcaattggcccttttttaaaacctcctctattggtaaaacctcggggtcccccaaattaatccccttggaaaaaattccccttttcccaattcgcctaaaaccctaaaggccccctaggtttgccttcttcaaaagtttggcaacctattgggcaacggaaagttgaagggttaacaattggtctaaactggggctaatctttcggtaaaacccctcattttttaaacaaaagccctaaaaccgtcaaattcctttataaatctaatcaatataccgggtaaccttctcatttttatcccattctgccactaaagccccttatttaactaatcgtgccttcaaactctcagggcattccgtttttaacgcgatggcccaaatggtcaacttcccccaaaggagttttcttgctctcagggttctctttt

SEQ ID NO: 536920 - DNA, 106 bp, Homo sapiens
aggttgaatgacaagacccaattactgcttatgaagacataaagccagcattgatcacttaatcccgtttctcatgtccagccagacaaaggacttcagttaaggt

SEQ ID NO: 536921 - DNA, 359 bp, Homo sapiens
tcggaccacggcaggttgtactggtcacagagactaggaagggactgatgtgtaaaagaatgcctggacgtcaggcacctcagactgtttgcctattttacgacaagaattatttagattttgcaggatggaaaaattcaaagtgccattttctggctatttggaactactgtcgagtttgtattggggtcaagcggcattgcagaagcaaaataaggcatttaggttttaggtcaggtgtgagttggagaggttttaagtttttgagaacacaggctaagggagcaagaaggaggaatggaaggtggaaggttgcccatagtgcaagcaggcaaaccctgagtacaacctgccggtgg

SEQ ID NO: 536922 - DNA, 402 bp, Homo sapiens
gtgctcttggtctccctcagaggagccagcagccccaaggccttggtctccagaaggccaggctcaccctgcatgtcctgcagagaggacacagttggggagggtgcaccaagggccaggtaggctccctgtcatagtagcacacgtcgtctacactctccaggaggctgatggcaccaggggaaatgagacctgagaggtgtagtcggtctgtagaaagaccttcttttcctcagggtcttggatatttcttcaccctccctctgcttgtgtctccatctggcccacaaggaggctgtctcaggctaaatgtggcttatcgaagctgtggactggtctgataaaaatctcgggcccgggagtcaggaaagaaaaaatacattaaaaagcacaaaaaaaaga

SEQ ID NO: 536923 - DNA, 259 bp, Homo sapiens
ttttttccccccccccggggcttcttttgtccccccagggtttggccccccccccccccccggggggggggtttaccccgcccggtccgggttttctgggggacccccaccggtgggttttttcttcgcttttccccccaaaaatcccgggtttggggataccccatttttttaaagggtttttttttttttttttttggggcccttgggttaaaaaaatttaggggccggggcccttatttattccccccccccttta

SEQ ID NO: 536924 - DNA, 1242 bp, Homo sapiens
agcgggtcctggcagcgcctccggaacgcataggtggaccggtccccagcccgtccatgggcgttgtggtcggcaccgacagagttccgtcatcccgtgtccctgccgactctcgaatgctagcgtcggcaccgctcgtctctgtacgcgctgaccgacgggaagcatcagtggaccggcccgggtgcgcccgcacagaccgtccgctcctcgcgtccctcggtgtcctccgcgggccggcgcgatgcggcatgggctcgaggaccggcgagggataagggggcatggggagctaggttgtgccgccgacgcaggaacaggacgtcactgggcgagggaccgagagtaactgaactaaccgctgagggaatacgtcgccagggacatacgaacagctgaaggacgcgtgtgtggcccagttactagcgacagaatagtcgatcgactagttcgtttaaaggcatactgggcgcccattagaacgacgcatagcaccaagaatgacgtggccagggcggaattccagtaaacagaagaagtccaaagcattgcgtgatacttctaggatgggcatttgtcctccaacgaggaaaaggctgtaaactgcacagttcccttgtgatgtaccactagtagctactcttcaagtgccatgtgtaaattagcgtgaattggggatacgtgaaaggacaacatacactagacccacggtctaaggttgggaatactttattgcataataaaaaagggagggtgggcattagaaaaaacattggttggatggtattggtgagcactggacattagtaaagaccaatttcggacggactggtgacttgaattacagcgtagtttggaaacgggacgaattagacattggaacgaaacaacacctaggtttaccagggggattgaatggtggagaaaggggagtgaagtccccattgaaaagaggcaagtgcactatccacagttctggataggagggtacccaggtagagcgaccgatattagggtaacacaaatgggttagagggagctaagtggcataccaggggtagccccggggggatagggaggtttcttaggaagaggaaaatcccattagcgggcgttagaggaggcaacttccttttgcaacgcaaacgttgggacttgttttatcgcacgggggacaattttggttgagttacacaagaaaaacggttggtattgacaagcagccttggggaaaacaccgtg

SEQ ID NO: 536925 - DNA, 224 bp, Homo sapiens
atctgagacagaccccgaatgacctgaccggagagcactcgtgcatctatgctgaacacgctcacatgattaggatgaagctgaccagtggaaggctggcttgcggccttctggatagattgccgacggcggttcctagccttgctctcctaccagttcagtacctttctctccttccctggctctgaacatcattcagaacaggaacatggggaagccagccc

SEQ ID NO: 536926 - DNA, 425 bp, Homo sapiens
ccaatccacggggtttttggcagggggaggacaactggcccacttctcttggagttgggcacgagaccggaattcaaattcctgttggatgtgaaaccggggttggagcaggagattgcacctccccccccctgttggagggagaggatgcccccctgactcagtccaaaaaaaaaccggtgcccccccgtcagggggggtcccattgtggaaagggtccaggagggcagggtcttctcctcccgggagcgggtcccccagaccccccgttgaggattcagctaccccggccggccccccaggaggcaggggggcagccgccccatttgccccccagtttcgggcctttccagcctcagccccctgtttcggtcccttccccatggttccttgcctgatgccaataaagcttgttggctccgcta

SEQ ID NO: 536927 - DNA, 284 bp, Homo sapiens
attaattggagtcagtatctctggtttgcagttttctattaaacagcatgaaaaatgttttcaaaacttagctagaataataactgagatttctgttgtcagatgttcagactgacacattacatgatgtttgagaaaaatataaacaaatatttctcaagtagtttgttcttcacaacctttttaagtatgcctacagtgctaagtcccattatagctacttggttaaagtcatttcttttacgtattcatctagacttcctcattgcaacacggtctctcac

SEQ ID NO: 536928 - DNA, 770 bp, Homo sapiens
agcggtcccgcgcctttgttgcgaaagcgagggggcgaggtgctgcggtgctagagcgcggctgcgaccggacgctgcgggcggggaggaggatggagactgtggcgtccgtcgtgcatactggttggtggctgctgcgtgagaaggtgtgcggtgtacggcaccatgcgctctggcggaaggctgggcggtggtggacgagtcatggctgggagactcgcctcgttctctgggctccctgaagtctcaggggagccgtgacccatgggatcaggttgatgcaggcctgtgtgcttgcagcctagcgcaaagagcatgctccattgcccaggcaggcggcaggggatgccatgtggcctggggtgcgcttctggtcgccgggtacggctcgtgaccacgtgtggagtaccgaattgcgtgcagcggccaatcggtattcctgttaactttgtgactggtgcatgccaaccataagctgtcaatgcggagaagcacatgggggcgtcccttcgtgacgtacctgatcatcccttgaactcagtgatgaccggcagcgaaggcatgacgggacgcgacgggggcgaaccgaagcagtccgggcggcctaccgtgcaaacagacaccccatcgagagggacagcgtaacttgtctcggggttaccatcgtatgactattagttttatccgaactattacttctcttgaaatgggctgaaaatgcaggtgagcgcttcacaggatttgcgtgcctcttagggagaaagcaaatg

SEQ ID NO: 536929 - DNA, 182 bp, Homo sapiens
gagacagggtttccctgcattgcattgcccaggctcatctcaaactcctgggctcaagtgatccttgatctgcctcggcctcccaaagtgctgagattataggcatgagccaccacacccagcctacaaactttatttcttgaattttaagccacccttctgtagtctctcgcagccgtata

SEQ ID NO: 536930 - DNA, 339 bp, Homo sapiens
  misc_feature (8)..(8): n is a, c, g, or t
ggggcccnaaaccccccccaggcctttttgtgggaaggccccagaaccccttgtagggggtttcaattttggcatggttcccccgaatgtggccaagggggtttccccctgtgtccttaagaggggggggccttgaggaaaaaccgtgcctcatttacccccaggggcctcttcctccccatggaatggggtgtttttcttgccccaatttgggccgaaaaaggccaaacccccctccccccccccaaaggtcagtaaccagcttggttcctcccagggtttttcaagggcttgggggaaaaataatttttttaaaccaggaagttttgttgtttttta

SEQ ID NO: 536931 - DNA, 344 bp, Homo sapiens
aacctgcgcctgtttttcagagaaacaaagttaatgatcctgtctgtgtaaccccctggagcgatctatcagtgtgaacacagctgtgcactttgacgggctccacctcgtacgcgtcgagtccatcttggcgatgacgatgtcccatggtccttgtacgtctctcccagttgatcccagataggagccaactgtctgcagtgaccacaccatggggcatagaactccacaaagacgtattttttctcatcaaaagccacgtcttcacagttcttcccaacaagcaccttgacaggctgcttgtcccaatcctccggcagctcctggctcatcaggtggggctt

SEQ ID NO: 536932 - DNA, 589 bp, Homo sapiens
ccaggacatcatccactgcactctagctggcgctgccaaggctgtgggcaaggtcatcctgtgagctgaacgggaagctcactgtgcatggccttccgtgtcccgcactgccgaatcgtgtcagtggtggatcgtgacctgccgtgctagtggaacctgccaaatatgaatgacatcaagaaggtggtgaagcaggcgtcggagggccccctcaagggcatcctgggctacactgagcaccaggtggtctcctcctgacttcagacagcgactaccgcaccttccttccacctttgacgcatggggctggcaatgtgcccgtctaagcagaccgacctttgtcaaagctcatatgtccatgggtatgacaaacgaactgttggtctacagcaacagggtggtggaccatcataggcccacatcggcctccaaggagtaagacccctggaccaccagccccagcaagagcacaagaggaagacgagagaccctcactgctggggagttcctgccacactcagtcccccaccacacgtgaatctcccctcactcacagttgcatgtagaccccaatcagacggggagggcc

SEQ ID NO: 536933 - DNA, 320 bp, Homo sapiens
agacaactagggtagttttgcaggtggtaagccattctgatagttgtaggtaaagaagggcagatttattagagaaatgtgaaaatatgttgcagtgggcagctcagcagagaaggggctacctgcaaagaggcaagggctggaggaaagttttatagagtcctgctgaagggtgctacgtgtggaatgaggtcattgtgcccgcaggttgttcgtgattagctgtctctaacaattgttcatacaataattgttcattattgttctcaacttggggctctccccaacctggggacccttccttattgttgctacccact

SEQ ID NO: 536934 - DNA, 109 bp, Homo sapiens
cacgaggtttacccatgtcttgttttttctggagacagtatggccactgattacagggcaccttcaaaggagcttgcaacttcaaacttggtctccatgaacaacatgg

SEQ ID NO: 536935 - DNA, 547 bp, Homo sapiens
ctgcttcagcctcccgagtggcgggcgcctgtaatcccagctactcgggaggctgaggcgggaaaatcacttgaacccaagaggcggaggttgcagtgagccgagatggtaccactgccctccagcctgggcaacaagagtggaactccatctcaaaaaaaaaacaaaaaacaaaaaacattcccttggtcttcccacctggtactggtttggtttttggtttttaattatttctgggacagaatctccctctgttgcccaggctggagtgcagtggtgtgatctccgctcactgcaagctctgcctcctgggttcgggtgattctcctgcctcggcttcccaagtagctgggattacaggcacatgctaccacatccagctaattttaggtattttatagtagagacggggtttccccatgttggccatgctggtcttgaactcctggactacaagtgataccggccgcactgcaggctacccaaagtgctgggataacaagtgttaaggtaactgcaacccagcccaagaactactcccaaccta

SEQ ID NO: 536936 - DNA, 356 bp, Homo sapiens
tctctccacactggatcacgggctctcgcctgatcactatccccctccatcccaggactgccaatagctgaatttcatcccttatcaatcctgggaaatgaggacagagactgagaagcatccaaggctggctgggtaactgacaggcaatatgtgatgcggacggtcagaggccaaacactacccagacaccgagcatcactcagttccttgctgggagctgggagtctaaatcaaagttcatacatctgatttgttgatgggcatccaacagaggcacttcggcaatgctggcgccctgcagtgacagcaccactgtcttcacagaatcacggcacgtcctgttagggggcacc

SEQ ID NO: 536937 - DNA, 400 bp, Homo sapiens
  misc_feature (23)..(24): n is a, c, g, or t
  misc_feature (78)..(78): n is a, c, g, or t
  misc_feature (82)..(82): n is a, c, g, or t
  misc_feature (215)..(215): n is a, c, g, or t
  misc_feature (309)..(310): n is a, c, g, or t
  misc_feature (318)..(318): n is a, c, g, or t
  misc_feature (351)..(351): n is a, c, g, or t
tccagttctggtcccactccgtnnctataatacacataggtcactgtctagtgagggcgctcaggaggagggcagggngtgngaggcttctgtcctgcacaggctggggacagggcactatgtctgaaggggtagggatgtggatgcaggaggagtgtgtattggacccatatccagcaaggacacagggacccagtggctcttgggcaggggcngccaggctgtatttgtagttccaagagatggactggtggctatgggtaatggtggttgaggacaaggctgggaggcagaagagtgggctgaagnnctccaagngcaggcgagcagtgggagaattaggttgttggncaagggtggaaagaggtatgggtgcatctctgctgacgggcaggtttta

SEQ ID NO: 536938 - DNA, 411 bp, Homo sapiens
cgcatcatggggtctggagatgagatatctggttacacagtgaaactgtctctactaaaaatacaaaaatttagccaggcatggtggcaggtgcctgtagtcccagctgctcgggaggctgaggcaggagaatggcgtgaatccgggaggcagagcttgcagtgagccgagatcgcaccactgcagtgcagcctgggagacagagcgagactccatctctaaaaaaaaaaaaatattaaccatttcattcttcttagcccttcaagcccccgaacggggttttctgacatatcatctggtatacatccttactcttcggttaaatcccagagggtacagagaaggtgtacgtaacaggtaaaggagagtaagtgcactgtgagtgggtgctgatgaattataacaacaggt

SEQ ID NO: 536939 - DNA, 118 bp, Homo sapiens
acatatttgtacgccgttatcccccaggacactgactgccttctccagctccgtgtcgcagtctgacatctccctgcttcgcctgctggcggggcctgatgcctcctcctgtccctct

SEQ ID NO: 536940 - DNA, 859 bp, Homo sapiens
  misc_feature (191)..(191): n is a, c, g, or t
  misc_feature (212)..(212): n is a, c, g, or t
ggaaaaacaaagagaagaagaaagagaaggagagaaaggagagagacagacaaaatctatgcataggtaagagcctcggatgttaaatcggaccgaggtggatgctcagatgtttagcaggtttacgatgcaagcatcgtttacccggactcatggcaccagatccatactattctgtaaactgaggcggngatgccaaaaattggaagcanttactctaagatatcaaaagattgaagcaagccatgaaacctctgcgcggagagagccgagcccgagcggcggggagcagcacgtgtcgcactccgccctcttttggcgacacctaggcctggccctcccgagacctgtagcgcggcggagcaagcgcggaaggctgggaggagctgcgcggagactgcgcgtcgaccatggagcccgacgggacttacagagccgagctatcgatggagtattcgacttctgcacagtgaatgtacacaacatgctgtaccccaaggaagacaaggagaaccgcattctgctctacgcgtgaccgaaactgtgattaccagccaggaggccgaacacaagctgcatactatgtcaacaagatcacgcacacgaagtggcacgaaactgcacccagatatatcggcgacgtgtaccaggaaccccacgttgccgggaccagaggaccaaccgttgcccaaaagtgcggccacaaaggagggatgtgtacttccaagtcaacaacagatgcgcggggacgaggacgccatgacgccattacctacgtgtgcaccggccccacactggcgagacactgtggacgagtgacctcctctatacccgagtgtataaccacagcatcctggtg

SEQ ID NO: 536941 - DNA, 692 bp, Homo sapiens
  misc_feature (615)..(615): n is a, c, g, or t
ccacgcgtcgagctaggcatggtgtcacacacccataatccaagctactcgggagtctgaggcggaaggatcgcttgagtccacagaggtggtgagctaagatcgcgtcactgcattccagcctgggtgacagagcaagactctgtctcaaaaaaaaaaaaaaaaaaaaaaaggtgtgaacccggatccctcacttttttaaaattttattttttagaaagaagtgttaggtgaccaaaagtaaactgtaaaaagagtaccactttcacctttttggcaagaagctgcattaatacatgatatgaaggggttggaatggcccaatttagcacttctgtgcatagtccctttcacatttttttaaggttttatattttccaaagaattcttggtccactctgatatgtgtagtcctacatagtggctatatccatgggtcttaagaaagtaccctctatacccagtgggcttacccaagttatcacttctttataatcacctttatttcacccctacaaataaaagggattcgtttccgacaacattaaacttctaacgtgtcttacacttcactttgggccggtgtgtgggttcccactataatcccagcattgnggaggtaggccagaggatggccagaagagtcagacccgcgcgaatgagagaccccccattttttaaggattactccg

SEQ ID NO: 536942 - DNA, 162 bp, Homo sapiens
aacgatcacaaagatacatctcttaagggggtggaccccaagttcctgaggatcatgcgctttgcccatgaagcacaatcaaaaccgggcctagagacatgatcaggcctaacaatgccaaggccatggagtgcacgtgcgcgagagctatcaaggtccctc

SEQ ID NO: 536943 - DNA, 407 bp, Homo sapiens
gagagagagagagagagagagagagagagagagagagagagagagagattgtgagtcagtgagactacgcctctcttctttccttcttcgctcctctctctcgttgccgttttctctacctttttctctgtttcctttctggctctctcctgcttcctttcttctttcttcttcctttttatgcttcctcctcctttgtttgtacaccgtcctcctcttttctcttctctccttttccttgtcccctccttctttcttcgtttttcttcctttcttcttctcccttctctcttcctctttctcctgttctttctcttgtgttcctttctctcccttgcctctctctttccttcttcttgtcttctctctgctcttctctttccttttccttcctttttcctctttcc

SEQ ID NO: 536944 - DNA, 296 bp, Homo sapiens
agaagggagggagggagaatgaggacggacggcctagccaggccaagaatgcaatttccccggttggtgggagcctgggagacccctgtgccttggacgggacaagggtcgggggacacgaaggattgagcaccgcgaaccacttggcacagttctttcctaacagtttgacagtattttctccaaggtacaattccgatccggattgtatcccattaagcagggtgtcccttgtgtcagtgtttgggaaagagtatattttaggggggaatttcaccctaccccaaacctggcgg

SEQ ID NO: 536945 - DNA, 106 bp, Homo sapiens
tgcgttgagaggtcgtcgtcctccgggcagcgtcagccgcgcgccactgctccacgaagcgccgggccttgtggaagttctgctcacccaaccgcatcacccgggt

SEQ ID NO: 536946 - DNA, 392 bp, Homo sapiens
tagtcagtataaactttaagataatttattctatttctgtaaagagtattattggtattcatagagatgcattgaatctgtagaccgcttagggaagtctggacattttaacaatattgattctcccaatccatgaacatggaatatctttccattttgttgtattttcagtttcttgcatcagtgttttatagtttttattgtagagatctttcacttctttggttaagtttattcctaggtatctttttatatttgtagctattataaatgggattactttcttgatttctttttcagattatgtgctgttggcatatagaaatgttgattttgtatcctgtaactttactgaatttgcttatctgttctaatagttttttagtggcaat

SEQ ID NO: 536947 - DNA, 246 bp, Homo sapiens
caggcatgcgccactatgcccagataatttttttgtattttttagtagagacagggtttcaccatgtggccaggctggtctggaactcctaacctcaggttatccacccaccttggcctcccaaagtgctgggattataggcatgaaccaccgttgcctcgccaaagatgtaatttaaatagttagagggacttgcatgggcagctccgtgcatagcattttcaccccagagcttctaatctgttt

SEQ ID NO: 536948 - DNA, 387 bp, Homo sapiens
  misc_feature (144)..(144): n is a, c, g, or t
  misc_feature (150)..(150): n is a, c, g, or t
ttttttttgggtccccccccacaaaaagtctttttgtgggggggggggaggacttccccccccgccccccccaaattttggggatgggggggacacaaagcccccccttgtgaattttttgggcccccctccccccctttttanaccccnttgggggttccccccaaaaacacccggggggggggtttttttgggctttgggggccccccccctttcccgggggggggggggggggcccccccagaaaaaaaaaattttttttttttcccaaaaaactttttttttccccgccccctttaaggggggggttttttttccccccccccccccgggggggttgggggggattttttaaaaaaaaaaaaaaggggttttgggccccccca

SEQ ID NO: 536949 - DNA, 1191 bp, Homo sapiens
ggagtcctggaagcggagctccgaagctgggactggttccttcgcagccatttttctgtccaaccaaacaggcgatgggagacgggaagccaaccaagggctgcataggcaggttgaaactcacgaaaggattaaggacaccttgtatagcatagcgtggttcttcagccacccaattgaacaaacacggtttcttgacagctattttccattggaccaagggggatgggtgaccaagatttctacaaacatgatagcttcttcaaactagcgaaatcttcttggcagacactcatattggggcgcgacagtcattatgttaataacaaggccttccatggatgaattactggaagggaacaggcatggacagtggcatcatggacagaacaccaaagtgtggtctcacaaaccgaaaacgttttccagaagaaaccaaaggaatactaataatctttacccaatatacggcaaaaaaaggtggggcatacgggcaataccattggcacacaaatgtgcgccattggcccattcaaaaacgcgggggcacaccagcatttggcccacgagaaggacttggacccaacagacagtggtggtttccacaacgaaatgtgctagctacacagctagaaggttttcaatacgacggtttattagatagaccacttcatgggacgaggccaaaggttggcaacaagggttgcccacttccaaagcagcacacgcggtggaaagaaacagagattcaaaacgtgggaacgacaacggaatcatttacgtcgttaatagggcatacatggtgacaataaccatatataacggagagcatagtggaacagagagtataagttggaaggggaacaccctatacatgggaaagagtagattaacgtctatagtcatggcaagagaatttccaagcaagcagggggattagatggcaacaacagaggacaggacacacaaaggtggggaacaaagtcggcggatggagacagtcaaaaggtttcatacacgcacacacaccaagggagggggacgcactaacaggtgttgtaacacgaagaccacttaaccgaagacggcgacagggacacattatataagataaacgcagagatttagcaccacagagaggtgacgttagacataaacgacacaccacaggacaggagtctcaaaacacac

SEQ ID NO: 536950 - DNA, 128 bp, Homo sapiens
ggggggtggggggcaatggatggtgccctatctgggtagaggtagtgttagtgtggtgtgtgctggggataggcagtgcgcctcctgctcgcccccagcccacccagccaaaaatacagctgggctga

SEQ ID NO: 536951 - DNA, 219 bp, Homo sapiens
gagcggctacttggtaactgtatataagaatagtagacttgctcagtgatgtggttcaggaacacgataaacctattctagaagcacttgaaagatattaaagtagaagtactacagatatctggccagcctatagagttttgtctatagaatttcactattgaacccaatagaatattttacaaatagaagtgccgacaaaagacatacaggatagag

SEQ ID NO: 536952 - DNA, 335 bp, Homo sapiens
gcaagtacttagtccagtggtatgctctctaatctattaggcacttgtattcaagagtccttttcatagtcttgtccataaatctccttgcaagaacaagcaatttaggacagtagctgatattacaatactttgaggaagaatcaaagcaactttctgccagtcttcctgaaatacaaaaatgacatcacggatgctacgttggattatagaacgcaaaagttcctaatcctggaggagcaatgactctgatcgtcaaggatgtggagctttcctcgccagtggctgagatacgagcagagcaagcatagagcccattatgcttaggagtaatc

SEQ ID NO: 536953 - DNA, 267 bp, Homo sapiens
atgtgtcctcacatcgatttcacgacaggaatgtgatacggatctcaacaaccagggaacccagtccggcacccgccatctgcagcagcatgactgactaatctttcacctgagcccacactgtacaggagtgacttcacatcattggctatcccctactgattcgtcatataatgcagtaatcactccctcctttcaatggtgcattataatataccccataggacagccagtctcctatagggctctccttggcattatttgtaa

SEQ ID NO: 536954 - DNA, 771 bp, Homo sapiens
gggccctggttaaacccggccccccgcgggtatggatcttcgctggactagacggtaccagctgctggagtgctgcaggcaggcactggcataggttgtcaaggagccccatcagccaaatgaattatttacaagttttcaagaaaggagactgcaggcagctgttggaccagacagaggatagaagcctccaggagaaataggcagtttttcaagggtttcctggtattaatgagttcatccatgaacatgtattttgatacaatttaaccaacaaaaagtataaatcacaacaaaaagaacaaacacaaaaaatataaaacacacaaaaaaaagaacaacaacaacacaaacacaaaaacaaaaaaaacaaaaaaacaaggaagacgcagggaaaataaacataaataaataacaataagtaatgagtaagtcaaggaacaaacaactaataaaaatcgaaaaaaaaaaaagaaaaatatgtaggaagaagaagagccgagatacgatcaaaacacaagaagtatgagaagagaaaaacatatctatatagaagaatgaagactgtacagaggtaccagagaagagctcaacgaaatgaacatcaacaagagagaagaagatgaaagaaaaagacggaaggaacgagaagaagggtaatccatattgctgaataggacagaacaaatacaaagagcagatgtatgatggtgaggtatgaactagcaaataatctgaaggtcgagaacagaacacccagaccaaagacgc

SEQ ID NO: 536955 - DNA, 553 bp, Homo sapiens
ggccgggcgcggtggctcacgcctgtaatcccagctctcagggaggctaagaggcgggaggatagcttgagcccaggagttcgagacctgcctgggcaatatagcgagaccccgttctccagaaaaaggaaaaaaaaaaaacaaaagacaaaaaaaaaaaaaaatataggggataattcccctcaaaaaaaaaaaaaaaaaaaaaaaaaaaaacgtgtgtgtggcggcgcgcgccgcgcggcccccgggaaaagccttttaaaacccagcgcggggggggcgcgggggcgcccagagaggggaagggaaaagggggcaaacgggggtcccagaggagaaaccgggggcaagagagaaagaggcggggggagtttctccaccaccaatataaaaagcgcccgcgggggcaacgggagaggcttttggtgaaaaacacccccgagagagggagcttcgagagggggcccaaaggcggggaatattatacacaaaggggggaccccaagggagaactcggagaatattaaaaatataacccccgccgggggggttg

SEQ ID NO: 536956 - DNA, 189 bp, Homo sapiens
aacagcagctggcagacaacttctaggctcccttgccatttaaggtctcgaggaatggggagacattggtagggggccaggtagggtgggaaggacggattttttcctctttgtctctatctctctttctctctagtctttttctctaatctctacatagttaatagcaatgattttagtaaacaaaaa

SEQ ID NO: 536957 - DNA, 479 bp, Homo sapiens
cctcgtaccccggcttattacgaggctggttgcggcggctgtgcgccgggctcccagttcccgagtgcccgcggtcccgcgagcggagtgggaccagccctagcagaacccattgcgccgcgccgggacgcccgcggagagagccactcccgccacgtcccatttcgcccctcgcgtcggagtccccgtggcagatctaaccatgagctacccttgctatccccgcccccaggtggctacccaccagctgcaccaggtggtggtccctgggaggtgctgctaccctcctccgccagcatgcccccatcgggctggataacgtggacactatgcggggcagttcaacgcaagactatctctcgggaatggggccaacatgtctgggacatttggaggagcaacatgccaagctgtacactggggccctggagtggtaaccacagtgacactggtagggaagccccaacaggctgctacct

SEQ ID NO: 536958 - DNA, 135 bp, Homo sapiens
tactccatggcttgctggggccaacattggaagttatttaatgggcagactgcgactgaccttttaaagccagtgggatttgccgtgtgtcacatgagcctggaggatagaaaacatgacatcctgctttcatta

SEQ ID NO: 536959 - DNA, 452 bp, Homo sapiens
ccaaatggcccacagtactcaggaccctcacgagccgtgcaggtgtgcggacctgggagccagcagggcctgccaggcagcctaggtgcagagcggctgcaccatctaggcgtgtggcgtgtggcgtgtggagtgcacgctgtgatgtttgcaccatgacaaagtcgcctaatgacgcatttctcagaacacgcctggtcgttacacatgactgcactttgtgtggctttgggcagcctcagctgaaacatggtgatagggacacttacgcgtcaggcgcggggactgcagggagagtgggaacattagctgcggcctccagtgcatgccagggacaacagcaggggctggcaaaaggctgatggtgggcgggtggggggtttgaacctgaaacttttgctacctgatctcgcttgaccccgagattggcttttataaacagtaaaccgtga

SEQ ID NO: 536960 - DNA, 383 bp, Homo sapiens
ctccacgaggctatgccggtcttcccgcatcttctcctccagggttggttgttggttacaagatcgtgtcacccggtcattcaggacagtaatttccagctcaaggtctcccttctctttgaaaacttggttgtagcggctcctccaggattccagagtggataaagcgtcagcgacatacatatccttgtcagcgagttggacgtgtagctgctcagcttactcctcgctcttctcggatcgctccttcggggcacggagtggccttctacaagctctctgttgcctcggtcctccttctgcttccactccttcagctgctccatgaatgcctccacttctgccttaagctgggtggtatgatgaagggtccttcatcatac

SEQ ID NO: 536961 - DNA, 130 bp, Homo sapiens
ggcagacaccaaaattgccaagtcaggacattgcacagaattctattcctcatccttttttttggagacggagtctcactgtgtcacccaggctggagtgcagtggcgcgatctcggctcactgcaacct

SEQ ID NO: 536962 - DNA, 117 bp, Homo sapiens
taacgggggcgagtatatgcagcagtccgggaagagtcatcgaggatcgactcagagctcgaatcgctatcatcgcagctaagtcacggcacgtcatctaaagattgctcgagatag

SEQ ID NO: 536963 - DNA, 765 bp, Homo sapiens
gaagagtttttttaaaacccgtggggaaaagattaccctccccccccgggggtgtgcccggggggaggttttttatgtgggatttctcccaaaaacccggggggggggttattaatccccccccccgggggggagggattggaatttttttcttcgcgccacgttttttttttttcaggaaaaccccaacttggggtctccctgggttaaaaaaccattcccccccccaattggccccgtccccaagtttggggaaaagggttttcccggaataaggaaaaaggccccccaaatccgggttccagcctttttaaggtttgaataaaaattatttttggttgggccacaacaaaggatgggccccctttggagagaaggtttcggaccccgctttgaaaagcatttggacacgtgccagaaaagatcaacccacccccataaaaggtccatgtgtcatatctggggcaaggaactgagcatccaatcttcctttgtcagacaagtggcacctgtcacttagttggtgaggcaagtatagtcttcattctcacagtcagtgtctatcaagctctcagtgtgtcccgagacggcaacactggcactggttggagggtcctggtcatctggcaagtatccccttttaaacttctagaggacgagtccgctatctatattgagggtgacacctatttcccgttcaagtcagtagcatatagggattggtaagcaaccccctctccgtttctctctgcagcaacgctaacc

SEQ ID NO: 536964 - DNA, 398 bp, Homo sapiens
  misc_feature (337)..(337): n is a, c, g, or t
cacgagggcccgccgggcgactgctcgatcggcggcgcctcgtagccaccggaggccggctcggaagcgctgtcggcggcattcggttccgagcccgaacgtgcatccgatggtggggttgaccctgcgttctcacccggattggtcatcctgcaaacctagcgtacgtgctggtacccggggtgattcgagtgcggggcggcgccgcgtgcgcacccgccgggggttagggttgtggcatcgaacccgcaggttgcgtgcccgtctgcacaggtcgtgcagcgctgacgcgaacgaaggagaacgagtagctatgaccggtcccctccagcccggnaaggaccccgtcggcagaccgggtgtgcgtggcccgtcggcattgccgaccccacccaaag

SEQ ID NO: 536965 - DNA, 169 bp, Homo sapiens
ctcgcttcttgagcatcttgggctggaagttggccacagagcggcaagcctccctcgcccctgcacattcttgaaggcggcaagaccgacggcttgcagttcccaggaaggcgtttgatgcttcaagaagcgagaggagcagggccgcttattatcgtacagggtcttg

SEQ ID NO: 536966 - DNA, 904 bp, Homo sapiens
cggacgcgtggggggagggactgtcagcctggaggtttggagactcagttctggcaatctagtgtgggtcaagccaacttcaggggagaggctgagaccagggtaggagtctacaggagcagacgagagatgtggggtgccgtgcacagagctccatgtatcagcttgggaagttcgaaggaaggggaggcaggaggctgcttagtctgctgccatgactgggccccatgaatggtggctctcaagcttctgtgctacacaggggtgtgtggttgggcgagtgtccttgtggattggtacctaattggccttggttgggaagcatatgccaatgaggtgcccgctcggtgcccgtggggctgccagatctgtcattgacctcattgtgtcgccgcttccgccccgaaggaggctgatcggctgccctgccagttgacgcaattggtggaagacgtgggtgggctctgatcccaggcttcccggcaggctctggctttggcgcagaggcgggttctgagtgacttacgggcccctcattcggttgcctgggttcctgtgtgtgtggcacgggtaggggtggaccctgtggggaacgaggggtccacgggcctgctcttgcaggaccttgtggttccgttgcgtaggagtgcttcaggtccggaaagtcgttgttcttaagccacgacaggccgcgtaagctggagcgtggcttttcacggcggtgtaggtgggtgagggcctagcttgggtaccgcgtgcggggctggttccccagacccttggtaacgcgagggctcgcgggaggcaccgaggggcggggttccccccccggtggctccgttggcgggccccgctctccctgcgtcccctgcctggtctgcgtcctccgcattggtcctggccg

SEQ ID NO: 536967 - DNA, 774 bp, Homo sapiens
gaagcgatctagtctggagtgtgagtgtgattcctaggggtgtatgtttgatcccgtttcgtgcaagaataggaggtggcacgtgctgctagggctgcaataatgaagggcaagatgaagtgaaaggtaaacgaatcgtgtgagggtgggactgtctactgagtagcctcctcagattcattgaactaggtctgtcccaactgtatgggatggcggatagtaagtttgtaattactgtggccctcagaatgatattcggccctcagcggggaggacatacggctatgcaaggctgttgctatagcttgcaagcaggaggatagtgccgatgttgcaggtttctgagtagagaaatgatccgataatataggcctcgcccgatgtgtaggaacgaggcagataaagaatattgaaggcgccatcggccgtgaaggtagcggatgatgcagccataatttacgtctcgagtgatgtgggcgatgtgagtgaaaaggcggtgtgaggcgctctggtgagtaggtgcatggaattaggaaatagtcctgtggtgatttggaacgatcaggcaggcgccaaggagctgatgcccgaagtttcagtcatagcaggagatgctggatggcggtggggaggtcgcatgaatgagtgcctaattacttctcatagggggtaagttttgcggccgcaatcccgggcttgcagcacctgggagaaggcgaccgtgtgaaggggctgttggcccccaaacttctgtggccccgggaatgggaatga

SEQ ID NO: 536968 - DNA, 800 bp, Homo sapiens
gatcctacctttacccttacccctgaagctggagccaggacaggatgactgggcccaagggccctggggggtgagcaaaccggtccacgcagagcccgaaatgtacgtgacaagggattcatgggggcttcccctctgggtggcgtcgacacaagggaggacacgtgacaaggggatcctgggaggtcgcggttacgtcccaaagggaagagggaactaccgcgacgctgagggagacttcgcgactagcttcgtggaagttgattcgatcgaggcaaggtcttactgacttctacctgtagccctccgctctgagagtgcaagacgtggtaacaggtgagaagtcaggcccttgacctctccagggctatagacggaccgtgactagggccccagggtcttgactactcttccacccccgtttacctcaggagaagggccagccacagctcacatggcctatcttgggccctactgggcacagagcaacaatgatcgtcattgcagatctcagtcaaaactgggtccactagctttcccacaccagcttcaagtcctaggggccatgggcagggctcccagcctgcaccgcctcaccactgcacagtggggaatgattctctcaggcatatgccccgaggccgtcgtcgtcctcagggtctggacttggtcagtggcacttcaccagtggagctgccttcccagaggagaaggagccgtgcgccagggcagggcccgtgccatagacttctccgaacccgccagagggatgtaaacacctcgaggcagcacactacggg

SEQ ID NO: 536969 - DNA, 957 bp, Homo sapiens
gctgcagtttggctgggggttcacttcaggtcctactcatctggttcactactgcacctggagatgacactcgaggaggctggagaacagcaaagatgggtgcctgctccttcctctgggatccctgacctcgagggacactgacctgatgccagtaggaatgctcacatatagggtgtctgacaagccctgctggagagtctcacccagttgggtggcaagagatgcaggaggacctgtttaaccaagcactttggctgtcccttggtggagggtgtatgccgtgctcgggggaaacccacttgtcttgggctgccggattccgcagaactagcaggaggaaagactaagtctgatggtctgtggagacaacggcaaccctcccactaaaggctcaggcccagggagatcagagttctgtccctgagcccctggctggagtaggacgttcctgcaggaggccccgccagtgaggagggataggtcagagtcaggcctgaagaggcactctggcacagctgacacagcgtggtgctgggctgtgggaatacctcttaggacaagcatccagctacctggtcggtggaagtgcgctggagctatggagatggttgtgccttccccgcctggagtagtgattaaggagtagagtccaggtgggcaaaccgtcaaaagggagtcagcaaggtaagaatagagggaggtgcagtggggggtgggccatcctcaccccaaggaacccgggtaacggaaaccaagcgagtggaagaactcggcactggcgtgggaccaaggccaaggggggcacagcggggggatacgagatcagtcgggcaaggccacgggaaacgcaaacccgctgaaagagggcccccgggaaagggcacacggtcccgagggacgtataaaggaagcggactagacacccagccttgaacacatatctgatgagagggg

SEQ ID NO: 536970 - DNA, 351 bp, Homo sapiens
agcgcctggggtgtacgaggcagtcctcagaaccaggacctataagtgtgctagcgagctatggcgacgaaggccgagtgcgtgctgaagggcgagcgtccagagcagggaatcttcaatttggagcagaatgaaagtcttggaccagagaaggtgtggggatgcattaaaggactgactggaggcccgcctggattacatgctcatgagggccgagataatacagccagatgtaccagtgcaggtcctgaatgtaaacctctatgcagcaaggtgggccacaggatgtattggcatgttggagacttgggctatgagactgctgacgatggtgtggccgatgtgtctttg

SEQ ID NO: 536971 - DNA, 130 bp, Homo sapiens
ttagctcggtaccccaccttggatagccttggcctggattcactatcagtaatcgatatcggcgtgggcatcgaggaacattcggggcgccgcgtggaccaagaacagatcgattggttcacctcgatta

SEQ ID NO: 536972 - DNA, 110 bp, Homo sapiens
atacacaggaacaggacccgtggctccagtacaggacaggtgaacagcagctcaaagagcccatcagggagcatcatggggaagcggatcttcatccaccaagccctcca

SEQ ID NO: 536973 - DNA, 102 bp, Homo sapiens
tactggattgccccaaccaaggctgcacgggatgctatcaaagtatactgtgatttctctacgggcgaaacctgtatccgggcccaacccgcatcacccgtt

SEQ ID NO: 536974 - DNA, 648 bp, Homo sapiens
  misc_feature (192)..(192): n is a, c, g, or t
atctggccggaactattactgattcctacaagattacctttccgggcctttaactcatgcgaacacattgcatcagtatgccggtatgaatccttccacgaagaaagccacctttcaagtgaaaccatcgcgcatctcagaataaggccagcatccccaagccggagcagtaaactgtgtagctttacttgnacatagtcagcagttccatagaatgggcttatgtcgaagatgtttctcaacacaatatctccaatcatcgcgttggtgactacatcaatgaacctcactccaagagtcttgaacacatattgcaaggatcgagagtctctcgagtaacgctcaatcacctcgctatcagcattcactcgggaagcatctttaccaatggcattggcccgttgggtgatgtttagtgtggacagcatcagagtggaatctcccgagtgacgacatgcatcttcaacatgtccagagctggcatcaaacataccccttccatctttgcctgcagcgtccctttctactttgtgggccccgtcacatcattttgtcagcaccactgggtgctcctgagaagctcgagtcgcgtgtactaccaattatttcctctcatctcaatagatcccgggccgaaatcctgcagcc

SEQ ID NO: 536975 - DNA, 888 bp, Homo sapiens
tgatgaattagaactctcgtatgctaagaatggacaagatcttggcgttgccttcaaaatcagatcaacggaagttcttgctggatcggccactgttgcccgacatgttctctgccacagagctgtgcagtatgattttacattgtggtcagaatggaacagccatatctaccaagtacctgaagatgtatacttccactccaggaacgtccccttatacgcgatctgagttagagagaccaaagggggcctgaatgagaacgaaagattcgtgaagttgtggatggatgattggcttgccacggagctggactagctacggctggtgttacgtaaacgagtgcatgcagaaatctccagggaagagtagtcacatctcgttgggcacaatatactattatgcgatcaagactgactcggtggcgaggtcttgaatgaccgctaatggcagatactggcaagaactgaacacagcgtgtttgcacgagagccccccagtgtcttgggaaatttattggagattggctgcccgaaagaagcgaactttgtattgctggatcagacaatctgtgtcgtgctgctggcccatgcaggaggaataagatgtgcctgtttgcaggcgttccagcgtagaatacgctgtgtgtagttatgcgccaaagagactgacacgactataagcaagagaatacatgaagaaaagcatgaagatagcagggagaagacgagcttacacagaagcattgcggtcctcacagagatgtagaaggaaacttgtagcctcccaataggttagctgagatgcttgcgcatgaagatatacctattgttgaaccttcagaaggcaagaagccccataacactcttggagcagtataacggaagaaa

SEQ ID NO: 536976 - DNA, 259 bp, Homo sapiens
gagaagtcacgaggtcgtgtatttgcaagcccctgggggtgttgaccgagtggctggaaaccttgatagtgtattaagcttcaaagttaatcttcttcaaatgataaatctttaattaaaatatctaaaaaatataaagccaactctttgtagtctggctttatttttgcgcaaaatatatacaaattgaaatatcttttttagcacttaaatatttaaaaagtggtaacttaattaataaaacaaaaagaaaatgagg

SEQ ID NO: 536977 - DNA, 330 bp, Homo sapiens
aacgctgtcactaaattctgactgtacattgcctagcgagctaaagcacaacatcgtccgcgagcggtgtctcactcctttaatcctagcacttcaagacgccaatgcgggcggactgcttgaggtcatgacttcaaaatccctctgggcaacatggtgaaaccccatctgtactaaaaacacaaaaattagccaggcatggctgggcgcggtagctcacgcctataatcccagcactctgggaggatgaggcaggtggatcacgaggtcaggagatggagaccatcctggctaacacggtgaaaccctgtttctactacaaatacaaaa

SEQ ID NO: 536978 - DNA, 431 bp, Homo sapiens
ggccattctcctgcctcagccttccgagtagctgggactataggtgcccgccaccacgccaggctaattttttgtatttttagtagagatggggtttcaccgtgttagccaggatggtctcgatcttctgacctcgtgatccgcccgcctcggcctcccaaagtgctaggattacaggcgtgagccaccgcgcccggcagcaaattttaagccaagaaattgaatgttgccagaaccccaggaaccacccagcctcttcccatatgaccacttccccacactctccaccttccttacttctatggtattgatggatggttgggtgacatggactccagtatgtgccatgaaggatacgaagatgaagctgtcatgaactctgctctcgcagaagctacatgtcaaagttggtctatttttaaacttgatat

SEQ ID NO: 536979 - DNA, 519 bp, Homo sapiens
cgcctgaatggctgttagtctgaatctagagttatacccgtcgcattctgaatccaagaactcgcatgttctgaaacattccaattaaaagatatcctccagttcccttcaaagctggatggtgaatgtacaataaagataaaaatcaacaggatactggtattgatcatgataaagagttcaaagggggcactgtctttgcaagatgatgtatcataaagtctcattgggaacccatgatagtgaggtggcgtgttgcaaaggtcgtggcttgacagctcagggctgttggtctgggtctcgttcatcctattatcttaccaggctatactttcacacttgcaatcaaccgggattaaagtcgcatatcttactcagtcaggttccttaaagctggcccgaaaaccttcttctctacggatgttatgagattcttctgaaggttctatgactttagagaccccttattattattgaccgattctggaagtgtgttccaattattctatcctttatcgg

SEQ ID NO: 536980 - DNA, 185 bp, Homo sapiens
acgctgtgtagtctgagctcgctgtattgggactgggcatgcgtgtagacgtatcagcacaggcgcgctgtgttgatctactcatacgggtcttgctaaccgaccgaagcttggtatttcagcgtactgatgcgtttcacagagataggttcgatcccatggtctcgtctacgcagagtgcgcaa

SEQ ID NO: 536981 - DNA, 478 bp, Homo sapiens
  misc_feature (403)..(404): n is a, c, g, or t
  misc_feature (427)..(427): n is a, c, g, or t
gcggccgcctactactactaaattcgcggccgcgtcgacaggtgctgtccctctgggagaggcaggctcagggcagaccctgtgggagttgggccctcaggcctcatccaagctgctgaccatgcgtcacggctccctatttctgtgtgaggagaattgttcctgtctggtgactgtcatcaggagggtgactgtggatttccacaagccaggatggacggcaacttccccagcatgagaaagagccacccaggattggcttggggctgttgacagtggcctgtccctcgctatgtcatctgcctcaccacaaaccaccagcagaaggttcagaggccagggaaagagaggggagccactgggccaggcctgatggtgcacacctgtcatcccagcactttannaggctgaggcaggaggacggctnggacccaggagttggagactagcctgggcaatacaatgagaacctgtctct

SEQ ID NO: 536982 - DNA, 348 bp, Homo sapiens
aaagttaactttgtcatgactgctgtatcagcacatgatccatatttgctgtcacgcttactctacaacgtttattcaattctgtatgaacatccggaagcaaaatcatagtgcacaaatacatttcaggtgtggtcaaaaataagtctctacttggtaaatactaagcattaattttttatagccagtatacacaattctgcggtaccttatagtacctaacggatactaaaggtgtagacactgtataaaacagaaagcactaggatacaaatgaagcttaattactaaaatgtaattcttgacactctttctatcattagcgttcttcacccccacccccaccgc

SEQ ID NO: 536983 - DNA, 270 bp, Homo sapiens
  misc_feature (10)..(10): n is a, c, g, or t
  misc_feature (65)..(65): n is a, c, g, or t
  misc_feature (149)..(149): n is a, c, g, or t
  misc_feature (170)..(170): n is a, c, g, or t
  misc_feature (181)..(181): n is a, c, g, or t
  misc_feature (187)..(187): n is a, c, g, or t
atttcccgantccttgcgcttcccaggtgaggtgacaccccaccctgcttccgctcagcctctgngggctgcacccactgtccaacctgccccggtgagatgaaccaggtacctcagttggaaatgcagaaatcacccaccgtctgcancgatctcgctgggacctgcanactggtgctgntcctantcggccatcttgaacctctctcctgatccctgagttttcagagagactgatttgagtaataataaaactctggtctcctgctc

SEQ ID NO: 536984 - DNA, 1137 bp, Homo sapiens
aaaggaaaagactcatagtcaacgattgtcgtcatcggagcacgtagatgcgggcaagtactaccagtacgtggccatcatgatcgtataaatggcggttggtatctgacgaaagagaatcgattgaaaaatttgaggaaggaggctgctgagatgggagaagggcatcctgtcaaggtatgcctgggatctaggcatagaagctgaagagactgaagcggtgaagcgtgggtcatcaccacttggatatcatccattggtggaaacttctgagagccagcaaggtactactggtgaacgtactcaattgagtgccccaggagcaccggagacctgtatatcaaaaaccatgacttacagaggataatttcagggctgaactgtgactgtccatgagttgttgactgcgtaggtgttggtgaagtgttgaaggctgagtatcgtccacgaatgggcagaccacgagagcatgcccgttctggcttacacactgggtgtgaaacaggctaattgtcggtgtaaacgaaagtggattccactgaggccaccatagaggcagaagagatatgaggaaatagtcgcaggaagtcagcaacggaccatcaagacaaaatcggcatacaaacccggacaacagcacgcagtacgtgccaactactccgggtcggcaatgcgtgaccaacatgcgtggacccccacgcgccgtaacacgccttggcgcccacggggactggaacgcgacacgtcacggatggcaaagacagatggaaaccaagcagcgtgagggccagagaacgaaccatacaccgaaatcgaccaacgaacagcccaagggactgcccctcaaggagtctacacaaaccgggggcaaagcacggaacagctgccgcatgacacaggagtccaaaaccggcagaaggccacactggagcacacacagaacaacgcaggcacaacggagaagagccaccaccagacgaacacaccgcggaccaacggcgaagtcaacacacaacacgagagcggacaacaaagacacaaaaacaaaaccagcgacgcagcacaaccacacaacccacacaaaaaaacgacacaaggagaaacaaccagaatgccgcagcgcagcactacaccaga

SEQ ID NO: 536985 - DNA, 110 bp, Homo sapiens
ttactgtttcctgagctgtaaacgacggcgagtcataactgtcgcctgagtgtaaaaggacggcgagtcttacctgttccctagactgtaaaagaacgcccacgcttacc

SEQ ID NO: 536986 - DNA, 233 bp, Homo sapiens
  misc_feature (4)..(4): n is a, c, g, or t
  misc_feature (7)..(7): n is a, c, g, or t
  misc_feature (46)..(46): n is a, c, g, or t
  misc_feature (218)..(218): n is a, c, g, or t
  misc_feature (225)..(225): n is a, c, g, or t
aaanagnttagtaaagagtgatgaaggagagtataggtgtgtagcnacaaacaaatcaggaattggctgagagttttgcagcacttcaccttaacttaaaaatgtaatgttttagtgcctcagtcaattattaagcaattgatctgagtgctttcaatattttccgaaattaatgtggatctaataaacttccaaacaggtccaccatttttgattcntaacctnggagaccc

SEQ ID NO: 536987 - DNA, 369 bp, Homo sapiens
atcaatggctgtaccttcgcgtatgcgtgatcttgaaatgggtagatctagttgcacccatattcaatcaaaatattttcttggaatgaagaaatgtggctcatgtatctacaaaaagtaaaatttgcagcttctcaggatactctgcatcttcttcacaacctttaccccaattgcctggaacttagcagtcatttgcttgagaatctaatgtttttcactcatgatccatttcaacttggtgaagacagatcacatatattttgtttgttattgaatccccagtgccaggcacatagtgctcaaaaattatttgctaaactaataaagattcactaaaaaagaatacacacagattcactaaaaaag

SEQ ID NO: 536988 - DNA, 390 bp, Homo sapiens
  misc_feature (360)..(360): n is a, c, g, or t
acgtttgttaaaggtaaaagttcatgtgaatttcctttttaaggaaatcatgggctttataactgtctaagcgcctgtaagtttcaaccggtttagtggtttctgctttcaccctgtgcatagcaatgaagttgttttattccaagttaaatatacaaagtataaaaatagatgaataaccagaatactttgtaactattgagtggtacatataattatgtgcatatattatcacatttaatcatcaaaacaatcctataatgtaaagtctactattcccattttctagatgaaagaacagaatagacctacaaagtaacatgttcaaagtcagagctgtgactgaaaccaggtatctgnctcgttgcagtcctttagcagtatgccttc

SEQ ID NO: 536989 - DNA, 201 bp, Homo sapiens
  misc_feature (67)..(67): n is a, c, g, or t
tgagattgcgccactgcattccagcctcggtgacagagcgagactcccatcccaacacaaacaaacnaacaaagaaacaaaaaaacagttggccctcccagactccctcctggcagtaaatcgtgtaggcctctgcttgagctgggtcttggatatttggttcatttagaagttcctgtcgccgcagcctcgtgccggtcc

SEQ ID NO: 536990 - DNA, 629 bp, Homo sapiens
atcaacaaacacaaattgagggcggatcggatggatcggatgggtgctgtggtgaaccaatgtttcagttccacaaagggtctgtcgagcgtggagacatgtgaatggtacttgggagagatgagtgcgagaggagggccgcagggtgatgtaacccaaatgaaagggggtagaagttagcaaaacccaggaaacggttcaacgtggacgtattttgaggcaatccaccggtgctttcaccaggatccatctggacatttccctcagcgatgatatatcccagaaaggcgattgtagagcgggggaacttacacttctcgggctttcacgaaagttggttctcgaggaggtgctgaaggacctgtctgacatgaagaacgtgttcttgggcagaccgggaaaaaaatcaggatgtcgtcaaggtagattgaacacaaaacggttgagcatgtcccggagcacatcgattacctggaaagacggtatcccgaacaggtggtaggtctagctggaaaacatggtgacctctgcgcagtcaaaagctgaggagagagtgtatgggtaagatcttaacataatgtaattagacccggtaggcaatgctgctaagttgggcgccaacggaccga

SEQ ID NO: 536991 - DNA, 595 bp, Homo sapiens
ggcctaagcgcctttactttattaacgagggcgctaaagatggacaacatctttgacgccctgcatggaacacaaacataggtttatggttcggctgggcactgtccagggaccagggacttgtgtaaacgctcttcactcgctttcctaaacaactgtcagaaacgacgaagcctctctctgattactcaagaggaattcgtaaggtgagactttcaaaaacaatgattgccatgcacattgctatctgctactgatagagcaggcaatgggtacttacgcatcctcatgagggcggcttggcacagcagtaccatttgacgtatgaccgttcatgcccggcttcgtggtaatgacggcaccgcgacaacgagttgccataagtattcagaccctcactgacggctcgacgttggtttgtcacatgccttgacacagatcgtaagagagcccttgacacgtgcctttaaaaaagacatagtttagtcttatgagcggggcttttattatggccaagctgaaggcgctctttacttgcttgataacttatagttagcggctgcctttcaccacatgtcatgattggcacatctct

SEQ ID NO: 536992 - DNA, 145 bp, Homo sapiens
acgagatatgggtagctctgacgggtgcattggaaggatggtctggtaagatgttgttgcggtcagtacatgatagtcccctgtgctgggggaagacggaggccgttgtgcgggcttctccaggtgggctcctggtgacgctcct

SEQ ID NO: 536993 - DNA, 361 bp, Homo sapiens
aagtgttctcaagactgatggttttgtaaggggcatttccctctttgctttgcacttctccttcctgtcaccatgtgaagaaggatatgttgcttacccttccaccatgactgtaagtttcctgaggctccccagccctgtggaaatgtgagtcaatcaaatctctttcttttatacaattacctagtctcaggtatgtctttattagcagtgtgagaacagactaatacacccagaaagaaatccacatacctacagcaaactcatttttgacacagatgccaagaacacatacttggggaaaaggcaatctcttcgataaatactgctgggcaacctggatatccctatggcgcagtaa

SEQ ID NO: 536994 - DNA, 405 bp, Homo sapiens
  misc_feature (66)..(66): n is a, c, g, or t
  misc_feature (328)..(328): n is a, c, g, or t
ggcggacctgcgtctcaggattaatcaaataatgtatttttcccagcacaagctgtgtaacactgncaggacatagtacctgcttaataaacgttacgctagtacatgtgtacatggtcgttttccaaatgcagactcattcaaacatgctccccttagtttcctctgtagactttaaaggaccagcaaagaatatgatacttgaggatggagatcggttgtctttatttgtgtcgtgacaagagtgctgagtttaagggagtctgtgctgtgcctgctttctccaactaatgctaataatgagcccaggaagagcaacatcagcatngacagaggatttgtttaaaacacccattcatggaccctttccaaacctgcagaatcacattacatagagtgagacag

SEQ ID NO: 536995 - DNA, 262 bp, Homo sapiens
gtgtgtgctgggcaggcgtctcggcatgcacaggggggtcttagatggcatgctgatggctctggcccagacagagggtgctgtgcgccacgatctttacagctaaggctggagacatctcatggatcacgggcctgccagtctcatgatacagcctggctgctggtggacgagatttaagacagtggtcgctggagagacggcagaagtcccgatgctgacataatctgtgtgtgcgctcgccgatgatgagcctcccaag

SEQ ID NO: 536996 - DNA, 1770 bp, Homo sapiens
  misc_feature (148)..(148): n is a, c, g, or t
  misc_feature (1477)..(1477): n is a, c, g, or t
  misc_feature (1770)..(1770): n is a, c, g, or t
gtgaggggggtcaggttcagcgcgtcgggacatcctaggatgttccgaggacgttcgaggcgctggctgcgtcatagtgacgccgggcatgccacttgggcgtgattcacgtctaggaagcccaacacgtgtgtgacgagaaccgagnatggtggttgaactgggagttgtgcctgaccggcgaagtacagacggacttgcgttgcagcatctgggctggaatctccatgcagtgtacgctagcacctctgagggtcagagcttgcctagggaatccgtaattatatcaaaccgaagggtattcgatgcttacaaggacgctggggaagcctacatgtgtgacttgcggatagctcgcgaaccggcgctctcgtgtgcttggttcgccatgaactaccgccagttcgcccctagaggcgttattgaggtcaacgcaaccactagcttccatgttgtgaggtgaccactgcgccacccttgcacggctacagctcgtgggtaccagtgggtgtttagcctgccgagcgagcacatgggatgggcgagggacacccatggggttctgggcgtacatgagtgcgttacgatgcgcggcggacacggcagctacttgtggcggcgacgcgagccccccattatgtcatctgtggcggccttgagagccgcttgttgcccagccacgcggacgtgaatgttcacttaacgctagtaaaggcttccggccacggggcgctcgaggttagcggaagtggaggcacttgtcaccggccttgccctttagttgggggaaaagctcgctggtcggttacccttcccacttttggggccagacttgggccattcggcgcttggttcttataccagccttttggctttgcttagtgttttcgcctgatcttttgctgcgcgaagttctccccccaactgatgcccatggggagcactgggatcgctggcttttttaacttccgagttggcgcctttcagttcattcctcctttggagggggccttccccctttgggtgggtttggggctccccatttcacacgagccccagctggcctttgggttcttttggggcgcccttcacacgcggtgaccgaggccccgggtgggatgtcccggccgattccaagttggtttcccgacaggcgattctcacggcgttgccaaacggacggtgagcgccaggcggcaattaacgcaagccgaacctccccctccttgggcattgttttccccctctcccgacatgggcgcggttggggcccttggacgcggacccacggtgggtcccactctcttccgacgaccaccaggggttttcaagaagttcacaccagtgtccggtgtaacttccaacgcggcctctcctttgccagagccactcagctcttttggcggcaaggccgggtcacagtgtcgctgacagtcccgttgacctcctgtcggagaaaccaccaaacctgctgttncaagataaaggcctgaagagagaactgacgaccaaaacacgccacaattataagaacaagatccccaatacgaaacagaggggtgtcaacaacgaggtgaagactaacgggatgactgccacaacatctccttggtaagatagcgaccacaacgaactgaatgacagtagatgcacaactgatacaacatcagaacattagagattagactgacagcaacgactcagcatatgtataaatgatatggcagtgttgttctttttttctgtgctctcgttactagatgtcagccn

SEQ ID NO: 536997 - DNA, 203 bp, Homo sapiens
  misc_feature (13)..(13): n is a, c, g, or t
  misc_feature (35)..(35): n is a, c, g, or t
  misc_feature (101)..(101): n is a, c, g, or t
  misc_feature (137)..(137): n is a, c, g, or t
  misc_feature (168)..(168): n is a, c, g, or t
gctaaccaaaatnttcccgactggttcccccaatnttcattagaagctggtaatagggagacccacgtaacaagtgacaggtaaaggttacaacaagggcncatcatgaacatgtaaattcgaagcaggggctgttnccggaatactttagggaaacatcaggattanggcataaggcctcatcatgatggcatgttgggggt

SEQ ID NO: 536998 - DNA, 386 bp, Homo sapiens
  misc_feature (13)..(13): n is a, c, g, or t
  misc_feature (163)..(163): n is a, c, g, or t
tttgaaccctaanaacagcttaaacagcaacaagtgcccaaaatttgaggtccttacctatgtgccactttaccctgaaatcgatccctcacatccctatgaggtattattatcccctgccttttcagatgaagaaactgaggtttacaaagcctagttaaanggcagagcccacgagatttaaacccaggtttgacacccagtgccccactcctcttcacccactacccatttgggagtaacctgcccttcccaggacaaggaaggatagtcctctgcttttcccagaattagcaaaggttctgattgacttgataaggtagtctcaattgatacggatgataggactttgaggagggaaaggtaataaagcttacacttggtca

SEQ ID NO: 536999 - DNA, 1356 bp, Homo sapiens
gtggccgggaggactgtgcgacagacggagtctggcgtggccgcaggagtgcggagtcatggagtaaatgactactaccagacgttgggcctggaccgcggcgcgtcggacgaggagatcaagctgggcctaccgcacgccagtgcgctgcggctaccaaccacggcacaagaacccatggaagcccgggcgcccgacggccacacagtttccacggcaccactcgcttggagggacctcacagaaactggtgctcacaggcggaagcccggccgacaaagcgcagaacgaattcctcacgacacctgactaacgcggggcaaagcgcaatgggcccctcacaaagggaggaagagttgcgcccccacatggtctgtggccagggaacacgcggcggccgaggatcgaggttgcacagaaaactaggggtgcaaccaccttctcgattgtataccgatgctcgtataacacacaccatttctccccatctgtgggaaacgaaaccccgcctcgtacaacttggccccatcgtggttagatctggacctacgaacagcgtatacaaatatcaccagggtagtggggaacacgagccaaacttatccccacttttatgtagtgaacccagacccaaattaatatcactagctgcgtgagtcagccaacggagcgacgaacacaactagagccagacaactgcggaaccacagtggcgccaacaattcgggcacaccaaagttcgtgcaagcagtcgaacaacatcccacacaagatatcaacacagtccagttggacagccaatcgccacaccgcacatataaccttcgagaacgccaaactctagagagcagtcataggcagggcagatacaacaacacgcaaaccacaagcgcgcgagtgcaacacacagcattcataatggggagcccaaccggacaacccccgccggggacaatctccaagtaggcccgaccaactaaaccagcacacgtcgccacagcgaggtcaaccgagtcaggaaacagcaagcagacaaagaggtccaaggagccggagcagtcagcgcacccacaccgacacagctactagactacgccacccaaatcgagagaaaagccgtatcttctgagtgaacgtaatatacgtccgacccgcagtgctcgggagcgcagcgcaatcgccacttctccactacgagacaagcaacggagaacgactgtgcgagacgcgccacgaaagcgacacaacgctcatctgtgaacacccagactagcagcccaccccaagacagtcaacgacggcggcagtaacatgagcaccccgggaaacggggacaaacagcagaagctacaagtg

SEQ ID NO: 537000 - DNA, 745 bp, Homo sapiens
  misc_feature (9)..(9): n is a, c, g, or t
  misc_feature (107)..(107): n is a, c, g, or t
  misc_feature (141)..(141): n is a, c, g, or t
  misc_feature (147)..(147): n is a, c, g, or t
  misc_feature (164)..(168): n is a, c, g, or t
  misc_feature (174)..(174): n is a, c, g, or t
  misc_feature (181)..(181): n is a, c, g, or t
  misc_feature (188)..(188): n is a, c, g, or t
  misc_feature (196)..(196): n is a, c, g, or t
  misc_feature (221)..(221): n is a, c, g, or t
  misc_feature (226)..(227): n is a, c, g, or t
  misc_feature (229)..(229): n is a, c, g, or t
  misc_feature (232)..(232): n is a, c, g, or t
  misc_feature (257)..(257): n is a, c, g, or t
  misc_feature (278)..(278): n is a, c, g, or t
  misc_feature (342)..(342): n is a, c, g, or t
  misc_feature (346)..(346): n is a, c, g, or t
  misc_feature (353)..(353): n is a, c, g, or t
  misc_feature (356)..(356): n is a, c, g, or t
  misc_feature (388)..(388): n is a, c, g, or t
  misc_feature (391)..(391): n is a, c, g, or t
  misc_feature (402)..(402): n is a, c, g, or t
  misc_feature (429)..(429): n is a, c, g, or t
  misc_feature (447)..(447): n is a, c, g, or t
  misc_feature (456)..(456): n is a, c, g, or t
  misc_feature (458)..(458): n is a, c, g, or t
  misc_feature (465)..(465): n is a, c, g, or t
  misc_feature (583)..(583): n is a, c, g, or t
  misc_feature (702)..(702): n is a, c, g, or t
aaaatatanattcacggaatataaaattcataaataacatggaggaaaactgtaaacagtgctacgaaatttagcaacaaatacattccttctagacagggttcganatctcttgttggtttctactccatcacttctggntttcangacaacagaatggatannnnnaaaggnggatgcngggagantctaagangcctctacccccaaagcaaaaactnttctnnangtnctccccttcctctcgcctccaaagngccaatttggaagttgttgtnacatccacctcccctactttccattttgttttgcttttgccatcagatttttataatgtttgtntctnataaaantantctagtgacatgttaaccttaggtagccagangcnaaacatttggntgccatcttggggtagtccagattgtnaattgttacatgcaaganagaggtctngngcatggnagggtagtgtctcctgggggccacagtttgccctagacagggctattccaaaaagtcatttgtttctttaattgattcaaagaaccatgttgccaccatgaggcaggtctggaacgtnggggagggtaaaagacaggagtctcccagtattacctaccctggacagagcagagcactggcccgagagctgagagcctgagcatggagcttccttgattgggaggcagaagaaaaaanaaagaggaagcgagaacttggattgtatctccatggccctgga

SEQ ID NO: 537001 - DNA, 146 bp, Homo sapiens
gcagctgaaactcgtgagagaattccagcatggtatatgagagatactttcgtatcttaatggtagccaaacgaaaaattgaggtccttatggagatgatgcacagatttatttttaaaaaataagacaacctccgggtgcggccg

SEQ ID NO: 537002 - DNA, 308 bp, Homo sapiens
gaccagtctaatcaggatccactgcaacgtacaacaggcattataccatctgctggcgcattgatgatgtgtgagcacgcttattacctacagctataataattgtcaggcctgctttatctacaaagcctatttggaagtgtaatcaagctgggagaatgtaactgagaatatacatggcttgcaagaaagtaaaccacgatccttatgctgatcataggctatggctgccaccgagataatgtcctgtcttctaagatgtgcatcacgcctggtacatactgaaaaccctattagaactggcttgc

SEQ ID NO: 537003 - DNA, 150 bp, Homo sapiens
cagcagatctctgctcttctctttcagaccctatctgtgcagtgtgacaaagtagagcacgcccatgctcaacagtattattccctaacgaccttctcatatcactccctccactctctaaccaagcacccaaagaggattagaactagc

SEQ ID NO: 537004 - DNA, 109 bp, Homo sapiens
ctgtagatcgctcggaagggtgtcttgagattatcatcctgctcagggtggaagcggccccggagacgctcggaggtgtcttgatattatcatctgctgagggtggagc

SEQ ID NO: 537005 - DNA, 233 bp, Homo sapiens
tacaagagagagggtcctctcttgctcttacagcaactggaccctgtcgttctccatctactcagtcagatagtttcaagtgttcctgataactcctctccttctgttaccatcatctgctcattctttctttgcatttcctgcaacattttagctagaagcctgtgcagactcagctttcacacgttccacttcaatctccttttctttttctgtgagggtcagtatagata

SEQ ID NO: 537006 - DNA, 300 bp, Homo sapiens
aaccaatttttatggctccaaaaataatgtaaaaatttctagggaaaaaattacagataatccactactcagagatcacaactcttaaccttagagttgctccttttagctttatttttcttcagcaaatgtctgtgtatttatttacattctcttttatagactcgggtcattatatatataaacatataaatagtttcggatcctattttagcactaattatatcttccgagacactcaaatttcttccctttgttaaactagtgatacatccttatttataaaattagaaaatgcac

SEQ ID NO: 537007 - DNA, 294 bp, Homo sapiens
gcggtcctccagtccggatctccttctacgatctcttacagatagaagaacgtctcgggtcttctcctccgatcctgatacttacatcaaagaatttaaatatcttactcaatcttatgaactcacttggcatgatctctactttatcctctcttctaccctccttccagaagagaaggaaagagtgtggctcgcagcacaggcatatgccgatgaccttcatcagcaggatcctactaagcccgtaggagctgctgctgttccctgggaagagccttcctgggaataccaatc

SEQ ID NO: 537008 - DNA, 170 bp, Homo sapiens
tttgagacaaacctgggctaacacagtgagatcccattcaaaaaatcttataaaaattggctgggccatggcggtcgccacctgtagtcccagctacttgggaggctgagatgagagggtccttgagccagaggttgaggctggcagtagctatgatctgccactgtttc

SEQ ID NO: 537009 - DNA, 424 bp, Homo sapiens
  misc_feature (346)..(346): n is a, c, g, or t
gtgtgctgaggtgatctagaggatcccgagctctctctgtgggggagagggtagagccggagcaggacatacggtggaggatcatgatgctcgtggtggaggatcatgatgctgtcgaggagggagaaaatccacggggtcaaaggaagaggagtcatcggctgggtctgtgggtggggtgacgggagatgagtcgggtttggagctgttgagtaggatgaggatggtagatcaggagtgggggaaaggggggtggtaagggagaatgccgatggcttggcccatggagagagcgtcgggtagggaggtcgaattctgaagatcgtggtcatagatgtaccacaantcagactcttcctctcacttcagcaaagaagttatttttaaaagcacttgggaagttcctcctccaccccacagagag

SEQ ID NO: 537010 - DNA, 611 bp, Homo sapiens
tagagcacactgtaatcgtgactgatgagaagtatcgttgataacctgctacaaaaaaaaacacacaataaatataatgccacatgccaaagaacacaataatcctatatttcagggccagatacaaaactcctgccaaatctttgtaatttattgtgcaaatcagaaggttatgttgcttctgcttgattaaaaactagaaggggcagacacacaagaccctcttccactacaggcaatataaggacaccagtggcatgttgtaccttacaacaagaaatttcttaaaaaacctgtgtttctcaaagatggtactaatagttgtacacaatacagccaagttttaaaagcaattaagacatattaaactgtgcagcaggtacttttcacatttatgtgcaagggaagatctcatgatgactacaataaatggcacctatttcttccctggcatagggaggtactaagaaactaaatgatcgtatggcacatgcttgaatcataataagatgggctaaggaatctataaagtatggaggtaggaagaccccatatgtcccggatcaaaacattcctcatatagaggtagtctagtgaagctgttacatgta

SEQ ID NO: 537011 - DNA, 290 bp, Homo sapiens
gttgactgtcctggccacgatattttgatggctactatgctgaacggtgcagcagtgatggatgcagctcttctgttgatagctggtaatgaatcttgccctcagcctcagacatcgggacacctggctgctatagagatcatgaacttaggcatattttggatcctccaaattaaattggatttggtaaaggaaggtcagcttaaggaccattacgagcagatccttgcattttgtccagggtacagtagcagagggagctcctattattccaatttcagctcagctga

SEQ ID NO: 537012 - DNA, 484 bp, Homo sapiens
  misc_feature (170)..(170): n is a, c, g, or t
ctggttggcgttgcaaagggggtttatcggcctccaacggatcccccccaaaattttggttgtgagctgggggcccaaaccccgttttatgttaaaaatgaccggtccattgtccatgggtttccttagggggataaactgcccaccctgtggggggggatccttttaanaatttgttctctgtcccgaatgtgagaatcctggaacagatttgcatggccatcccaaaaagccacccatagggaattcttgtaaagcctgtggctatcggggcaggcttggcccccctcataaactttgccccttctttttccaaaacccccctgagaatagggcccggggggccgggaagaaagaaaaagaaaaaaaaacccgaaagggccaagcccaggaaaatgggcccggttccccccgtgggacccccccccccccccccccccccccccccccccgaggccttttataaagatggggggggttccca

SEQ ID NO: 537013 - DNA, 283 bp, Homo sapiens
  misc_feature (135)..(135): n is a, c, g, or t
  misc_feature (261)..(261): n is a, c, g, or t
  misc_feature (270)..(270): n is a, c, g, or t
attttagaatttctaagggaatttaatgaattctaacagataaccactgactatgagaattactttatatagataatcttgactgtaaaacattttgaccagtgtttacaacatgtcataagaatccccataatncactagagatttgaagaattggcttgtatagttataccaccacagtagaacattctacttgagagattcagtatcccctaatgtgtgtattgataagtactaaaacccaaattgtgcaggtttctnacatgtctngcttgttgctgtg

SEQ ID NO: 537014 - DNA, 273 bp, Homo sapiens
cccgtccttcatcatacctccatagcaacattacagataggaactgttgaaaaaatgtcatcaatgtgtcgaaaccatggtgaaggctaaagaccagcaagctgcagaaccacatagaatgcgagtattcttttaaaggaacttgatctggaaaagtcaagagaagagagcagaaagcaggctcttgctgctaaaagagaaaaaagaaaagacaagagaaacaagaaaaaagaggaacagaaaaggaaacaggtaggtatgatgaaggacgga

SEQ ID NO: 537015 - DNA, 154 bp, Homo sapiens
cctcacactgggttcgagttcaagacagcctggtatacatgtggtgaaacccgtctctactaaaaatacaaaaaaagtagccagttgtggtggcgggttcctgtagccccagcaactcaggaggctgaggcaggagaatcgcttaaacccggga

SEQ ID NO: 537016 - DNA, 886 bp, Homo sapiens
  misc_feature (255)..(255): n is a, c, g, or t
  misc_feature (518)..(518): n is a, c, g, or t
  misc_feature (594)..(594): n is a, c, g, or t
gtgcagaaccccgtctctgcacgccaggcgccggcctgtacccatcctagtggtccatgacgtttcatgcagtctgggaagagaaagatgtgcgccgtggttggagcacgcccaaaggctttgaagtggaaatacgagtgcataggcaggctaccgggaggtgggcaagtagcgttgtgccggaagagagatggcgcgccacactggctcgaagcctagactctgtatctgatcacatatgtgactggttcaaanacacgcacaccgatcacacaagactgtacgaagcacttgtggagaaaccatacacgaagtcttgtcgttgatagcccgtgtggacgacgtaagcgtcttgaacgaatagctcagcacgcttgagtggtcatgaaccaatgtcacgacctgatgtgctgacgttttccatgaatggtggcattcgcgttcgatgcactctacggcacgtcgggactgggcaacggatagagcacacattacaacacaagatacatacttgcaanacgcagtgcggaccaattgagctgcggtaggacggtgctgtcacttgaacgaatgtccaccttgatactcgggatncttatgcaaacaagcttaggaatacaaaattgcgcatgcatgcgactttggcagcagggagattcaattgaacgagcaatgcagccaagactcagcttcaatggagccaaatctgccatagctgtttctttctttatctgtgcacttacgtgtgttcaattatctgtatccataaagcattttagcctgcagctatttcaaagttgtgtaggactcaattaggagtcatccctttggcttaataacataagaggctgttgtggctattacacacacactgccgagacaggcg

SEQ ID NO: 537017 - DNA, 146 bp, Homo sapiens
ccccgagacaacatcgagtcttctacttcagcacctgttacccacgtgcacatccccgttgtggaggacgggaagatggaccggcagatgttcctggccacatggaaggatattcccaactgagaatgacggctacgtggcgcctg

SEQ ID NO: 537018 - DNA, 328 bp, Homo sapiens
  misc_feature (186)..(186): n is a, c, g, or t
  misc_feature (259)..(259): n is a, c, g, or t
aaacgacccgaagacggcgtggccaagggtggtgagaaccggagaaccccaggacgcctcactgcaggctcccctcctcggcttccttcctctctgcaatgaccttcaacagccggccaccatgatgtcgcccttactacacctgagcgctccagcttcaacgaaattacgtggaaggcttccacntagggtccaccatggagttctcccaccaccttcaccatgtttccatggtggtacagcaccagtgacgccctcngaggttgctctggcgatccccccacagcccctggtcagtctgccctcgtcactggtcttcgggtcgttt

SEQ ID NO: 537019 - DNA, 409 bp, Homo sapiens
  misc_feature (193)..(193): n is a, c, g, or t
tctagaggatcccgtgaatgatcagagagttggtattctccagatgcatcgaacaaatcgcggggatttggcgaagcacacgtatgaaaaaagctcagacggcgcgtcttattgatgtttgaggggtattactcatgggtagagactggggaggcgtccgcgccgcgtctgccagtggtatcgagatcacgtnccgataccagggcgtcccggttgccgtgagcgtgtccagctcaaagccagcgccgctattatacagaaggcagagtttgacaaggctgcgatttgagcacgccaattctcgcgggtacattcgattacgctctaacctttccctaactccaagaaggctttgggtttcaagactccggaagatagccagagcctgggcgtttacttgggtttgagt

SEQ ID NO: 537020 - DNA, 1370 bp, Homo sapiens
  misc_feature (1122)..(1122): n is a, c, g, or t
gcacacaccatgtaccctggtcattgccgacaggatgcagagatgtaagatcactgccctggtcacccagcacaatgaagatcaaggaatcattgctcctcctgagtcgcaagtacgtccagtgtggatcgagcaggctccaatccgtgggctctcgcatgtcctagcgttacacagcctagaatgtaggatcgatgcgaagctagaggagtatgcacgagtccaggccgcctccaatcgtctcacgcgctaaagtgcattactatggcgagacgtagtgactatagttgtgactgttaacatccgtatatcgttgacgaaaaccctaaacgttgcagcgaggaagaactaaggattgagcattggcaataggctgttatttagtatgtaaagcattcgtcttaagtactcagggttgccctatttttatatttgttgggcatagagcattctcagggatgtgaagacaattgggacccggtcggacgtgggtggacaaacgatacgaccgtgattggagaatcgataggttttcacccacgaaatatgtgtccacaattggtgggtcgagaggggcacttcggtagtacgcgcatattgggttgcgtatttgtgtcaaatcatgtccgatgctcaagattatgaggatgcgcgtgtttggtatccacaagcgaaaatatccccctgttgcccattcccgtaaaagtacgccaccaccaatattcctcatcataggggcaaatagtggcgcccagagtcgcttcatcctcagagatcccaaccacagagggcggacaggtggtatagcatattggtctttccgcgtttgtaacacatagatggtaatgcgcgacaaattgtttgggttcattgcgttatcggcctttgaattgcatgtgtcagaagtcaggggtggccaaacttgggggaaaatatgattgaccgcgctttcgggtgccccccccccgttacccccccatctttgtgtgtcccccccgaaatttggagaaatgcttatgcaacggggcttgtgggtcctctcctggaagattggtgtgttggaacgggccacgccaggggggtttacccgtgttaccaactggactgttgtacaaaccccgngcttgaaatttaacaaggtgtgcagcacgccgttagaagggcaaacacaaacaacacacacagccaccggaggggcaacacatagtatggggtgcgcggaaaaaacaaggggtacatgaaatggccgcagagtcggccatacgacggtattcagaacaccacgtgttttggtaaacgaacggtggtacacgttgggggcggccccccaaagagacgcgactaatacacgaaaagcacggttacctgta

SEQ ID NO: 537021 - DNA, 140 bp, Homo sapiens
  misc_feature (6)..(6): n is a, c, g, or t
ccgganaatgtagatactgtgctgtgggcaaatttaaagttgaactaagatatatatcttgcgaccatccagctatcaccaggctcggtaggtttgtcgcctctacctataactcttcccacagttatctacatttccgg

SEQ ID NO: 537022 - DNA, 301 bp, Homo sapiens
ggggtgggccccccctttgggccccccgggttttcccctttttccccccgcccggtttttgggggggattttgggggggaaacccttttcccccgggggccccttttgccttttttcggatttttttcccccccccctagggggtttggccccccgggccccaaatttgggtccccccggcccccccgggggttaaccccctgggaaaaaaattttttggggccccggggggcctttttttttttttttttcccaaaagggtttgctttttttttttccccaggggaatgggggggaatta

SEQ ID NO: 537023 - DNA, 124 bp, Homo sapiens
atatttcaatcgaacaaaaaggaaactttttttgaacttattgaggctctacttaagtacatcgaaacccttaatgcttctggggctgtgttgatttccttgcctggctgggggtttgattcgc

SEQ ID NO: 537024 - DNA, 118 bp, Homo sapiens
gagcacaaatgtcagtcaaagagagctcagcagcattgctgggagccaaggcatgtggagtttatataaatctagggcaggtcgatcttggcccaaccctatggttaataggcctctt

SEQ ID NO: 537025 - DNA, 453 bp, Homo sapiens
  misc_feature (267)..(267): n is a, c, g, or t
tagcaacctctgggacttgtcccttgctcaccggataccccgcgcccaggattatggctgagccctggcccaccaacctgcctgggaagtgcaaagtggatggacgggtttaaaggggaggggcgaaggtgctgtaaacaggtttggccagtggtgggggagggggccaaaaaggcggctcaggttgcccagctttgtggcctcaggactttttgcctcacccgtttcagcccagggcccctggagaatgatcccctttgagtcctntgccccttccaaggacactaatgagcctgggagggtggcagggaggaggggacagcttcccccttggaagtcctggggtttttcctcttccttttttggggtttttgttttgtaatttaaaaaaagctattcatccctgtaattattattattttttccaataaatgggccctgggcccaggagga

SEQ ID NO: 537026 - DNA, 581 bp, Homo sapiens
tgagcggactgggtgactagagcaagaccatcctgtctcaaaaaaaaaaaaaaaaaaaaaaaaaaaagggaaaggaataaataaagattaacggctctttgccccgcagcctgtgcatcatctcgacactggcgctcaccaagtacacaagacgccctctgcatactcaacttacctaagacgaggttttacgcacaggaagtgtcggtagtagcaacaagggcgcgtcgatcaccgtgaacccccggtgtggacacattggttaaacccggcctccaacagacccatgagcagcgcttatagtaacatacaggcgtaaacgcagcggcgaccagccggcgcgcttccagaagacagacaagataggaacgaaccgccgtggagaacacagccgacgagcgcgtcgctccgaaacaacacgctcgacggcggcgggagagggcgacagcaaagggggagagagcagcaaagcagcgccagaaccacaccagtccggagcaggagcgacacaaaggaagggcaaaggacagaccatacgggcgcaagaaggagggaagcgtagcgcgacaccagagcaaaaa

SEQ ID NO: 537027 - DNA, 262 bp, Homo sapiens
gccccggttgttgggaggtttctattctaggaggagggcaaggggatcagaaagttaaaagtaaaccatgtatataaagggcacgctaaaagatatttattaaaatctttttttttaaattacatttttagggtagggttctggggtgctggttatgttccatttcttgatctgggtgctgggtgtattacctgtaagaatgcaagctttcagcacttctctggaggtatgctgtacgtcaataaaaagttcaaaaattaaa

SEQ ID NO: 537028 - DNA, 1128 bp, Homo sapiens
cagagttgtcatagttatctagcaggtctggagggcaagctgtgcagaggcatctaggcgttgggtccagagaccaacgaatctgtgcatgagcattcctatccagaagctagcaggataacatactgagcaagcgttcgatccataccacagattgccatctcatggtgccagacgagaactatcaaagtgacatcgtgcatggtgccagggacgctcagcatcgtgaagacatagagctttgatgatcttgtcccggaggtttgaagagctgaaaaagaaaacataggtctacttaaatcaggcaacttacacagtatagggagtgagactgagcaattttactccttgtaacgaaagaatctaccatgaaattctagtaggtcaatctgttaagccgtcactcagacagcaacactaccctctggagctctcttcctgcatcctccagaatatctgagtgctttaccaggtacatcagatatgatccgtgagactaaacaactaggacgactgaggccaagagccaacttggactcctgaggaggctgctgctaggtaccgaacacctgtccagagtgactcccaggtacacctcctgggcccgagcacaaggatccctccacaggagtgtgagaggactggggagaaagcacatgagggaagaccaccaaagatggatggacagagggagagagcacgaagtgaaagcatcacagactcgcgagagggccagcacttcgaaccacacaccgtctgtacaggaggcaaggggcgagtgggaatccagacacacacggcggaaccaccacctaggagggcacgggacaggcaacacgatcacaggaacccaagacaggaccggaagcagaacacccagtggacagaacagacacctaccgcagagaggaaccaccggggagccgccctcacacgaagcacggaccagaaggacccgaagaagacggggagaccaggaaccaacagggaatcagagagagggagcaacacacgaggagcggcaagacgaaccggagagaggtgaacataccgccgaaggaacaaaaaagagagcgcgacagaacccacaaggacaacagacgctaagaggcacaccacgggcatgag

SEQ ID NO: 537029 - DNA, 279 bp, Homo sapiens
gccccggttgttgggaggtttctattctaggaggagggcaaggggatcagaaagttaaaagtaaaccatgtatataaagggcacgctaaaagatatttattaaaatctttttttttaaattacatttttagggtagggttctggggtgctggttatgttccatttcttgatctgggtgctgggtgtattacctcacagtgcaaaacagctcatgaaggagactcttaagggcaccacccaaagcctccctctggcagcctggcccacctccactcccag

SEQ ID NO: 537030 - DNA, 224 bp, Homo sapiens
  misc_feature (148)..(148): n is a, c, g, or t
  misc_feature (169)..(169): n is a, c, g, or t
gattatgatgaggaagccccctctgctttaatccacacaaggaacgtaccctgaagtaacctgatgttaaccaatctgctgtgtctactatgctgtttccttgttcctgctagtgctgctttacaaatgcagaccattctatcatacntggcagggcttctgttttatnttgtaggctggatgctacccagttcatgaatcgctaataaaagccaattagatct

SEQ ID NO: 537031 - DNA, 658 bp, Homo sapiens
  misc_feature (1)..(1): n is a, c, g, or t
naggcagggccatctgggacccaggcagtatccagtatggttcgaactggccctctaaaatggtcctgtgtccacttaggggcctgtggtaagcctggcactcaagtgtgcattccctttgtgtagcaatgccatcacgcaggctccacggatctccctgtgccagtatcagggcccacaagggtctgagccatctctcgtggctaggattacagcaggtggtgacaccgtggactgatggggattgctcacttattctgtctccacgttgggaagctcatctggctcccagccaatcatgcttgggttatccacgtcgctaccctgtccctcagtgcctcatgtgttatctgtcacttctatagtgaattctacacctctagtcggtcatcttgaaagactcgggcccttatatcttcgacaatggctacaagtagaaaatgtgaggcctaggaaaaagctagcttctataaaagaaatgtgaggctcaggggaggatagcgggctatagtgtcgctaataaaactaatctcaatggtttccaataagaggaacaggtaggcctggcgcgcttgctcagacctataatgccagcactgtggcaggccaaggcaggcggatcacgtgaggtcaggagttctagcccagtcgggccaac

SEQ ID NO: 537032 - DNA, 145 bp, Homo sapiens
ctgtctgctccctcagaggtgcctcttgatgtgcagggccaggtggggagacctggaaaaacacctgggtgggcaaatgagaagcacagaacaagttaggggcccatcccttgtttttttctggaccagcgccctgacctgcctg

SEQ ID NO: 537033 - DNA, 510 bp, Homo sapiens
cggccgctactactactaaattcgcggccgtacgacctagaggcgagtaagtgaggaatttagctatggagtgagtaggtaagaaatttagcaatgaggtaaggaggtaagggatctggtcatgaggtaaggaggtaagggatctctccatgaagtaaggaggtaagaaatttagctatgagataaagagataaggaatctgtccatgagataaataaataagggatctggccatgagatcaggggtaagggatctggtggtgaggtaagcaagtagatttcccattcaaggcaggcgaatggcaaatgtagaccctgaggtgataatgtgcttactgtatttgaagaacagcaaagaagcaaagtgagtcacatggaagtgggggaggtgcattagaaagttagtagagggctggtgctatggctcatgcctgtaattccaatgctttgggaggccagattgggagggttgctgggcccatgagggttgtgctgcagtgagctatgatt

SEQ ID NO: 537034 - DNA, 406 bp, Homo sapiens
  misc_feature (39)..(39): n is a, c, g, or t
  misc_feature (406)..(406): n is a, c, g, or t
ctgaaaatgtccccctgcatatcggctctgttggaaaancccctgatttttaagcagacctgtttcatttcaacatgggttacccccaggaggtggtcttcataaaaatgtttcttggaggcccaggcgccgtggcccacgcctgtaatcccagcactttgggaggccaaggtgggcagaccaccttaggcccaggagttcgagaccagcctggccaacatagtgaaactccgtcgctactaaaaatacaaaaaattagctgggcgtggtggcgggcatctgtaatcccagctactctggaggcagaagcagggagaatttcttgagcccaggaggcagaggttgcagcgagccgagatcatgccactgcactccagactgggcaacagagcaagattccgtctcn

SEQ ID NO: 537035 - DNA, 148 bp, Homo sapiens
gattcgggccgagatgtctcgctccgtggccttagctgtgctcggggtaactacctctttctgggcctggagggctattcccgcgactccaaaggttcaagggttactcaacggaatccagcaaggaatggaaggcaaatttcccgaa

SEQ ID NO: 537036 - DNA, 538 bp, Homo sapiens
tttagtagagggtggtttccacatcttggcaaggctggtctgaaactcctgactcgttatccaaccgcctgggctcccaaagtgttggaatacaggcgtgagccactgtcccagccaaaaagagaaatttctacatgaacaaggcaatttcagtgtcttacagcggccaaaccatgacgtgaagaatgagataggagacaggagatcaccataagcgtccctgatatagcagcacacattttcacgtttccacttaaatcgttttgcacaaagtcttcgtcgctcagatgagatgagatatgatttcctagagatgtaaaaataagaatgaatgtggcgcccccttcttccagatgtaatagaaagctctgccctatcacaaggggggtgttgaagcgccccttgtgttttaactgtatttaactgagcacaagatgcacaagctgagggtttcccaccacagcttgtgcatcttccctgcagatcgcagacctgtttccaggctgatgtttctggtgtgtaattgctagcgtttctg

SEQ ID NO: 537037 - DNA, 115 bp, Homo sapiens
tgagaaactcggaaaaatcacacagggactcacgtgcttttccaataatcagtgagaaatgccatcttccaggtagtcccggaacgtgtggatcaggttgatggtgttggtctcg

SEQ ID NO: 537038 - DNA, 192 bp, Homo sapiens
  misc_feature (147)..(147): n is a, c, g, or t
atagagcaacgaatatagacctggtactattctgaattcccaccttaaaagattaattctttacagaggaactgtttacaaagaccacttataactttctgagtgtccttccaaaagaaacaatttatttttctttccccttaccanttaatggccaaaaaaaagtttagaagaaacgttattatacaacaa

SEQ ID NO: 537039 - DNA, 586 bp, Homo sapiens
  misc_feature (580)..(580): n is a, c, g, or t
gatgtactttctttaatatatggaatagtgtagtcaaaacatccttgcgccagtcccagcatctgtgcagcaattcctattctaccttcattgagactccctatggcatacttaatagccatgtccaatttgtccccaagatattggcttctggaaccttgacattttcgaatgttaacgggcaggtggaagaagctctgagccccaatttgttttcaggtttccctatatgaaggcccggagtatcacgatctactaagaaggaggtaattcccttatatccaatggtagggtctacatttgccatcaccagaaagagccctgcgtgctcagcactgctgatccacatctttgatccattgaggacataataatctccctctttatcagctctggtcttcaaagcaaatgagtcactacctgctccagcctctgaaaggcagaaacttcctactttttctgtagtgagctgaggcaaataggtggccttttgttcttctgttccatgttttctaatcagtgtgttaattaatgtgttctggatctcacaaaagacagccacagatgcatcaactttggntaattc

SEQ ID NO: 537040 - DNA, 211 bp, Homo sapiens
tgagccggtaccaacaacttcgtcattctgatttcccatctcaaaaaaaacaactgccaggtatggatcttcgggcaacaacttcgtccatcgtgatctgtcttgaggtctggatcttcggcgtgtgcagcaacaacttcgtccactcagatttgcggcgtttgggtcctcggcgtgtgcacatacgaagagaacagcagatctccatctc

SEQ ID NO: 537041 - DNA, 380 bp, Homo sapiens
  misc_feature (332)..(332): n is a, c, g, or t
  misc_feature (368)..(368): n is a, c, g, or t
  misc_feature (380)..(380): n is a, c, g, or t
tgtggtggctcatgcctgttatctcagtactttgagaggccgaggtagacagattacctgaggtcaggaattcaagaccagcctggccaacatggcaaaactccatctctacaaaaaatacaaaaatagccaggtgtggtggcaggcgcctgtaatcccagatactctggaggctgaggcaggggaagtgcttgaacccgggaggcagaggttgcggtgagccgagatcacaccactgcactccagcctgggtaacagagaaagactccatcgcaaaaaacacaaataaccggaagccttgacagactgatataattatgtaattaggccgntcgccgtggctcacgcctataatcccagcactttgngaggccggcgcn

SEQ ID NO: 537042 - DNA, 356 bp, Homo sapiens
cggttgctagtaacacatacaattacagagttcaccttttaggcccacacgggagactgaggctcgagactgaggaaggcttctgccgtccggggttggagctcctgaggaccaacacctgctcaacggttcggcccctgggctccctgagatgctcaggccggaaagaagcgggatgatggttcccgagcgtcctcctacaagtttccaaggccccaccggcggttcgggcccctggagacccgcggggctctcattggcgcatccgggcggacattcttttcagtggctccagctcctgggagtcgatgaggccacactccttgaccaaatagtggaagtgcttgttgcaggtg

SEQ ID NO: 537043 - DNA, 310 bp, Homo sapiens
tgacggccccatccgggggtcagtggggggatgagccagagggcaattgataccagaccttccgacagtactgtggggccgagtgcacctggcacgtgcgaaacccactgtccgcttgatccatcatgtaggagcgcctgcttgccaaccaatgcccgttaagcgttgctagcagctttttcagggccccggccctgccatgccgcacgctgacccttccttcccccccatggcttccggccccacccggagtggcattgtcgtggcagccaactttgccattaaaactctttgccaaagtttaaaaaaa

SEQ ID NO: 537044 - DNA, 124 bp, Homo sapiens
  misc_feature (1)..(1): n is a, c, g, or t
nacaaaatgagaaggagttcagaaaaagaatgatcatgacagataaagtgtagtaatgcaacacagttttatgtctaggatttaaatatgtatgtgaaacaatacactacattcctggaaatat

SEQ ID NO: 537045 - DNA, 198 bp, Homo sapiens
attatcgtacagatataataaagccaaacaaagaaatggctacctctttaaaaaagttttaagactcagcaaaacagaacaatactggaaataatcttccctatctctcaaacactaaaagtcacatttatttatttattttttgagacggagtctcgctctgtctcccaagctggagtgcagtggcgcgatctcggt

SEQ ID NO: 537046 - DNA, 252 bp, Homo sapiens
  misc_feature (74)..(74): n is a, c, g, or t
  misc_feature (94)..(94): n is a, c, g, or t
  misc_feature (101)..(101): n is a, c, g, or t
  misc_feature (123)..(123): n is a, c, g, or t
  misc_feature (137)..(137): n is a, c, g, or t
  misc_feature (200)..(200): n is a, c, g, or t
  misc_feature (203)..(203): n is a, c, g, or t
tgcagggcagtatccgccagttcgccgctgccttgtgctcaccgacttcggcatcgcagtcttcgagatcccgnaccaggagtctcggggcagnagccagnacatcctctcctcctgcgcttngcttttgcttccgnatggcgacctcaccgagttggcttcctcatcccgaacttgtgctggtgctcaaggacggacantgngaacacgttttcatatctcgacgccgccaacttgacgtcacgcgcctgc

SEQ ID NO: 537047 - DNA, 803 bp, Homo sapiens
gccgggcgcggtggcgcgtgcctgtagtcccaaagtgctgggattccaggcgtgagccatgcgcccggcagccctgtgtctttcaaagaacctcggcccagtgatggctgatctcactcccactgtctcgtagaattacactccttcctggggatccctctttctgcagcctggtcgcttgggagagtacagggaagtacctgcagttgaccccgtgccccacatgaccttggtccagggcatggatgattccagagcccgtaactgtgtgggatcctcacttgaccagcccagccccagtccgtcaagccagggctgggcctgggctataactttcgctgggctctcccaagaccatcagcagtgcatccaggccccctggggcccgtgggcttgcatgccgggtttcttccagtcaagtccctgtggtctctgagcctcccggcaaggggctgctcttgttctgccgcccctcctttgggtgtatcacgtgtcggctcacagcccccattccatgggggagccttccggcatctatcggtctttctcattgtcccctatctgttcttgtcacccagggaaggcgggtgcttgtacgtgtgttaatccaggtgtcactttcacacttaagagacttcctgggcaccaatcatgtattcacgcgtggctctttggttttcaatcagaattgtgtgcaagcttgttaaaatgaagcagacagataatgcaaaggactagaaagacaaatgtgaacttcggatacacactgacacactcaaaaaaaatagcgataaaaaaaggcg

SEQ ID NO: 537048 - DNA, 371 bp, Homo sapiens
cgtcgaacttttatatccagttttgttatgatcattatatacgagcccgaatgtttcaaaaataaattcttagtgaattaaatagtgaatgagagaaagacaaatctgaggaaaaagaggagtcaggataagaaagattagagccagttccatacaaagatacagaagtagtaaccagttcacaaaagcaggacttaaggagctgaaaaagcagagaaagagaaggaagccgcaggagaagggagaaagcaacaccatggaagtgttatgcaggccactgagggaagagagtaagagaggtccacggttgaggaccacatgagccagattatcagagaaggaagcaaggtcaaagggtcaagtgtcgacgc

SEQ ID NO: 537049 - DNA, 1072 bp, Homo sapiens
  misc_feature (539)..(539): n is a, c, g, or t
agcgttgggggaggacggaagccactgcatctgttggctcagggccccagcctgtgcgaaacagaggcgcctgggctgttgtgtctcctgtctgtggccgatctctagtttagaaggtagtcccatcttggatgggccgtgggccgagatcccttctcgtgttgtgctctccaggagacgtatgttgtctcccttcgtgaacagccgagccgacgctggcctgatacacggctctgaggactcgttgccttggctacataagcgtgtgtagcgaagtgaggccctggggggccaaggatcgactcctttcaacgttgagctttatgggagccccgaggattgaggctactgagatagattatcagacgtcacaaaaggacttctgcgtcatactttcacgctggctcccaattgagttgaaaaagtatctcgcattattgcactcctgcgacagttgtctccgcaaaagtgtggtcgtgtactatgccttgggaatggagggcatggctatgttgatgcaaaagacaagtgcccatggnctgtatggcctctatggcaagagtaacatagtttggatcatcctattggtacagccgtatactcctggggtcattggcccgtgtgggacaacctgaaggaccaaggtatgacttttggggccagtgccgccatggcaccatcgtcagggggtcttcattcgcgttcgtcaggtctctctgtgcaccctggggtaggacctcctgtcgtttgtacaacttacccaagaagagttgcgaagaggtgcttggtcactggcgcatagccatttgctgccttgatccatgcattgtagtggtggggtccggggttcagccaaataggtcccttccaagagtcccctggggaccacgcagttccctcatggaaggggtcctttacccccacgaaacgagtccaggactagggagaagccatcgttacccgcctctccttctggggattggaggggaagcaaggaaagctggcaggtgaaaactggaaaggaaagcccaagcaggcaaggccgaacaaggtgcatgaacggctcggggag

SEQ ID NO: 537050 - DNA, 331 bp, Homo sapiens
tgagccggtccccagggtagactaacctcctgccacagcctccctagtagttgggactacaagcaggctcatcaacacccacctaatttttgtatttctagtcagaaggttttgtaaagcctcctgggagaatagctgaaggcagctgctttataaccctgaggcagagggcaaggagtaggtacaacagagtataggggaatttatcttaaacaggcttgtttacttttattgaccaggaactgacctttgatcatcagtgcgagtgatgttccctgaacttttttggttttatttttccttccttcctacctgggttaggtctacctgg

SEQ ID NO: 537051 - DNA, 109 bp, Homo sapiens
gctatggttctggtacatacatgataggattgaggatatttcccattattatagattatcatgttatgattataatatatatgatgatgatgatgatgatgatgatgat

SEQ ID NO: 537052 - DNA, 912 bp, Homo sapiens
taaccttcccttataagcttgcctgtgttgggttgacagtgagggtaataatgacttgtggttgattgtaaatattgggctgtaattgtcagtccagtgtttaatctgacgcaggcttatgcggaggaaatgtcttcctgttcctttatacttaccattagtcctcctatagggtgatagattgggcccactggggtgtgaggagtccagttatatgttggggatttctaaggtagtgggtgttgagcttgaacgctttcttaatggggggctgctttaggcctactatgggtgtaacattttttactctctctacaaggtttttccctatttgttccaaagagctgtacctcttgggactaaccgttaattttccagggggatttagagggtcctgtgggccctttaacagttgacctaagatcctatcttgggacaacccagtctatcaccaggctcggtaggtttgtcgcctctacctataattcttcccctatttggctcacatagacgggtgtgccctttagctgttctaggtagcccgtctggttccggggggtcctaaagcttttggtcttctcctttgcaagtttatttctaaggttattccatttatgtgcgcgaaaggggtaatagggggttaagccgcttggcgtaatatttaataggcgctggggattaaattctcacacctgttgcccccttgcggggacatataatctcttattgctggcccgggttcacaattctaatcggaccaataccttatatgtggggcagcaagcgtctgtggtacggttgttttgttcagacagagggatgtgtgttcccccgccggctgtttttcccgcagggtattaatctggcgggttatacccccgtgttctccggattatatttcgggacacgctg

SEQ ID NO: 537053 - DNA, 646 bp, Homo sapiens
gtttctccttttttcttatatttttatattcaccaattttttttttttcttaaacatatttacctctcacatttcccctaccatcccatataatacacaccaaaaaaacacccaaaaaaaacccaccacaccacacatcacctacatccacaaacacccacaataatcaccctatacacctaaaatacacctacctccaaaacactcatcccaccaccccacacccaaatcaaccatcaacctacatacctccctaccaccaaccaccccccccataccccacctaccaccagaaccaccccattaccctccccccaacctcctaacaccaaccccacaatcacaaaaaccaccatcccccaacctacttaccacccaccacccaatccaatcactactccaacacctacaacacaaaaacaatcaccacacaacaccccaaaacaccctaatcaacccaacactcctctcaatcaccataaccaactaccaccaccaaacacatcacaaatcaccacttaaccacaccaccacactcccctcccacatcacacccccaccccaacaactccaatacacacactccacaacactcataccccaacatcaacacatccccttaccccaacaacacctcacaaccccc

SEQ ID NO: 537054 - DNA, 1386 bp, Homo sapiens
  misc_feature (1096)..(1096): n is a, c, g, or t
tactccctatgttggtgtggtattctgtgttgtcctccacttgtgtgtgggtgccctcttgcccggtgggtcacttgtgtagcggtgtgcgcggtggtgttttgtgcactcttttggttgactctccttgctctgttacactcgtgtttttggcaccaaactgggggtgctccccgcgcgcttgtgttccttgaggtccgtcctagcttttttgggggcgcggcctcttctttgcctcgcattggtcaccctaggtttgtgggtaatacctccgctgatttggttggttcctgttggtcttttatggggtgttttttgctgttgtaccctatgtgttcttctggggttctttggggctgtttgatttttcgcgttttgggggactttctcggtgtccctgtctctgttggacccttgtctctttgtcgtgtctatgcacagggtggccctcctatttgtgcctaccttcattccccgtggggtgcctcaacttcgggcccaatgcgccaagggaattccatttggtgtgtcccccgtttttgtgaatgggggctttgaagggccgacttgtgtcccctcattgggatgccacttcccaaaggccttttcttgttccgtcccatggaattgcccccagtgtgtcttgtgggtcttgggggacccacatgtgtgtcccaggcccttttcttctcctcgtaccccttttgagtatcccccgttggcccttgggggccccatgcgtcacaacccagtttgggcccccagggattttctccgctccacacccttggcccattccctttggcgcaacgcagctttgggaactcccaaggttttcccaccggagaattgggaagatatgttcttttcgtagaaaaattgtgcctcttttggaaccctttgggaaggctctcctgagaaagagcctctgttagatctccacaggcttctgggccgtatgtcccatagtgctggagcctcgtttccttcctgtgggcttcctccacactccctcggctgtccacacagtgtgaaacacaacggcactctcttggaacaacatatcctggtgtttttaagaaagaggggaacttgnccatgcacagatttcctgtgaaccaggtcccacaggcccttttgggcatgaaccacacctgggccccgggtgcaagccggagacccccccgaagcccctctctcccacgtaattcccacatccccgcacatgcttttaagggacagcgcctcttttccctttttgaggaatttctgttctcggggcttgtccttcctttcccgctggttttgaaagtaattttccttttttacattaattgcaccataaagctaaaaacttgcaatacttgaaacaaaaagaaaaataaa

SEQ ID NO: 537055 - DNA, 851 bp, Homo sapiens
  misc_feature (714)..(715): n is a, c, g, or t
  misc_feature (755)..(755): n is a, c, g, or t
  misc_feature (836)..(836): n is a, c, g, or t
  misc_feature (849)..(849): n is a, c, g, or t
agaaggtgaccgttaggaggaggttggagttgaagatgaggaagctgaggctctacgggcaaccgggtaacttaaggatattaaggatgacgttgtggacaccaaaaagcagaagaccaaggagaatgactaggcagcaaaaggaaaaataaccttacgcaccgtgacctattcaccctccacttcccgtctcagaatttaaacgtggtcaccttcgagtagagaagcaggccccgcccgcccacagcgggcaatgccacccacagatatgacatgcgctctccaccacccctccaaaactacaacatgaattggcaacatgggaggaaaaaagaaccagaacttcccaggccctactttttttcttaaaaatactttaaaaggaaaatttgtttgtattttttatttacattttatatttttgtacatattgttaggggtcagccatttttaatgataacgggtgaccaaaccagccttcagagcgttttctgtcctacttcagactttacttgtggtgtgaccatgttcattataatctcaaaggagaaaaaaaaaaccttgtaaaaaaagcaaaaatgacaacagaaaaacaatcttattccgagcattccagtaacttttttgtgtatgtacttagcgtgtactataagtagtttggtttgtatgagagtggttaaaaagcgccaaaagataaaaggttttctttttttnntctcctttttgtgtcatatgaaggttgctgtttatttttntttggccctgtttagatgatattgtgtgaacacaatgtgtgtccacacaaataacacaggaatttttattttttgctgagnttgtttctaaaanaa

SEQ ID NO: 537056 - DNA, 177 bp, Homo sapiens
tcactacagtgctgcatttagctcactgaaactcgactactggttcaagtgatccgcctcagcccccaaatagctgggactacaggtgcgcgtcaccatgcctggctaatttgtcaacttttaaatgagatcatctgcaaggttcaagtgagggatgagcatgtgggatcctcatag

SEQ ID NO: 537057 - DNA, 249 bp, Homo sapiens
tcatagcatttgcgccgtgatagatatgatgccaatataatagggctgcaccacgcccatccgcatgccacatactgggccacgttcattgagggagatcttacggccaccggtatgttgcagaactccgtcccctcctcattgctgtgaggtacaaatattgtaacccgatgtgtctctcgagatattcttcagggagacaggctgacctcaggcttgctggcccatggcatgcaacatctgtgatga

SEQ ID NO: 537058 - DNA, 1811 bp, Homo sapiens
ggtttccttgcccgtacttttaacttaccttattttccccaaaacggtggctggcgttgagactcccgggagcatgtccaggttccccggccttagggtcttcccaggcacttgttctgcttgtcccttgccttcccccacctgtgaggcccagcttcggcatcgtacggggtggttctgggccgggtggcgcatcagggtcccccagtgcctgtgaccaggcccgcccgccccatcttacagcaccactgccgggcgtgtgggcagatattctgtggaaagtgttcttccaagtactccaccatccccaagtttggcatcgagaaggaggtgcgcgtgtgtgagccctgctacgagcagctgaacaggtgagtccccgccccccatttgggctgcaggtggggcaggctctccaggctgggttttctgtccctcttggccatggtgcctgaggcctgcagaccccagaggaccctcacagcacagcagctggaaggtcaagggaaacccagggtggccgcatgccctcggaccctgccccacactagggcaggtgggtgtgagagacagggcgccgcggctccagggaccgaggctgccccgacaaacctgttgcttgggtttgggtttgggtttgtttgcatttcaactttcggaataaaacttacagaaaagttgcaagagtagcacagagaagctgcggggccgcggccagtgcctcagcggtgggaacctgcggggccgcggccggtgcctcggcggtcggtgttttgtcgcagagtttactctgcctcccctctcctgcgcgtgcgtgtgttcacacaggttttattttgaatttgcatgagtgcagatgtcatgccccttggcactcagatcttcgcctgtgatctctgagagggacagtgctctcatggccacagcagtcactcgggactgcgctgccacccagtgctggcttctgctctgtggtccacgttccatttctgccgtggtcccagcagcgtcgctgtgggtctggcctgggttgcgtgtgtttcgtatgtgggccgtgctccctgcttggttcccttttcctggaacgtgtcactgcctccctgtctcgctccgtggacatttctgggaggtcaggccgtggccacctggccccctgttcaggtctgaggctcccacctgcttaggttcgggaagctcaggagtgaggccatgccctcctcaggacatcccatccaagccagccatgtccggtgatgggccgctgcccggaaagttccttttccttcttgtaactgagaagaacttgccttgagccacgtcaagtcccgtccgtcgcagccactgcccacaagcgtgagtctgctgtgagccagcggctccatggcagggcatcccagcgccattcctgccttcacacacacttgctgccgtttccctgtgctgggggctgtgcaggtctgcctcggtgtggacttttctcttaggaaagagccccaggtcggccgagcacggtggctcatgcctgtaatcccagcactttgggaggctgaggcgggcagatcacgaggccaagagatcaagacaatcctggccaacatggtgaaatcccgtctctactttttaagtattttatacttaaaatttttgtattttatacaaaaattagcgggcttggtggcagatgcctgtagtcccagctactcgggaggctgaggcaggaaaatcacttgaacctgagaggcggagattgcagtgagccaagatggcgccactgcattccagcctgggcgacagagcaagactctatctcaaat

SEQ ID NO: 537059 - DNA, 278 bp, Homo sapiens
tataatgtgataagagtgcaagcagaggaggaatcgaagtcaggagggctcgacatagctgaggggcctggggtgtgatgtatgacatgcatgcagggtgtgggagctcaggctgactgggttaggatccagcctagataaagtactcagctttattgagctacggattcctcttctgtaaaagaacgtccagctcataggtagcttaaaatgaaatgtgataatgagtgccaagtgctctgcactgagctagatacgtatttggaagccacgtcgga

SEQ ID NO: 537060 - DNA, 171 bp, Homo sapiens
gagaaaagccgtctcaatttgcgatccacgcggtcaggttaacactcttattattcatcattccttatgttatatactactgccccaactgcaaattgctaattgtttcacatccagtgctatactcttcacctacgtgatctatgtgaaccatcagtggttttgcccaat

SEQ ID NO: 537061 - DNA, 390 bp, Homo sapiens
  misc_feature (36)..(36): n is a, c, g, or t
  misc_feature (41)..(41): n is a, c, g, or t
  misc_feature (61)..(61): n is a, c, g, or t
  misc_feature (97)..(97): n is a, c, g, or t
  misc_feature (235)..(235): n is a, c, g, or t
  misc_feature (287)..(287): n is a, c, g, or t
  misc_feature (311)..(311): n is a, c, g, or t
  misc_feature (317)..(317): n is a, c, g, or t
  misc_feature (333)..(333): n is a, c, g, or t
  misc_feature (377)..(377): n is a, c, g, or t
caaggccgggagggattccccttaaaaggccagggnccatntggtggttccctaatcattntgaggtgtcctgggatgtaatggatgggaaatcctnctaagaagtcaacttttgtaataattagaaaagctcctagttctgaggacagagacctgttggagtccccatagtgggaatttttgccctggcatccagttcagatccctggagcttcttgactgaggggagattggntcccttggggaagagtgaagccttcaatgctgccacaagtgtaatctcagcnctttgggaggccgaggtgggcagntcatgnggtcaggagatggagnccatcatgcctaacagtgaaaccccatctctacaaaaataaagnaaatttaaaaatc

SEQ ID NO: 537062 - DNA, 204 bp, Homo sapiens
  misc_feature (111)..(111): n is a, c, g, or t
ctgcggcctgatggctccccacctggactctgacggtgctctcacggtgcacgctgggctcctgacgccttgacggtgccggccccctggggcttcacggactacccgggnatgctgacctggacggacacccggtgacggacgggccgactggtcactgttgaccgggtaccctgacgctcgacacttcgtaactcactgtgt

SEQ ID NO: 537063 - DNA, 151 bp, Homo sapiens
caggcggacactgattgacgttgccttaacttccacggatatctgggccctgtgagtcatgatgctgagaaccaaacagtagtgaaatacgatcaactgtgaacataatgtggcaggtcaggtggatatccagatctattatgttagcctc

SEQ ID NO: 537064 - DNA, 196 bp, Homo sapiens
caccggaagggagcgtgggcccctggaatccctgtttgctacactaaccagtaaacagattggctgttccaaggagcagctggcactctggaaatttataacttgtaagcaactactttcaggggaaattttccaaggtataggtctcggctacagagctttgttcctggcagaggacaccacctttttagtctgg

SEQ ID NO: 537065 - DNA, 202 bp, Homo sapiens
gcggggataagcgggcaggttcaggtgcgccccggtacgcactgttcacctttatctgaccaaaccgctctacacgttagctccatctctgctgcttctctgtaggctcaccattaacatatgtaccggtgccatctggggactgcttttaccaacaagactaaaggattacttggaggattataaattccaggaataaatg

SEQ ID NO: 537066 - DNA, 203 bp, Homo sapiens
cgcggtgatctagaggatcccgtgcgtacggacgctgtgccgcgagctgtcgtggagtcggtacacgtcaacgaggaatatggcgttcacgagagccgccgcgaccgcgccgtggcccaggccctggaagctgacggcgtgaccttccacagctacctggaccaactgtttttccagccgggtagtgtgcgcgtccgtagcgg

SEQ ID NO: 537067 - DNA, 601 bp, Homo sapiens
  misc_feature (188)..(188): n is a, c, g, or t
cgcgtcttctcaacattcagatcaatatgcatttctaactgaacagcagattagaaagagaatgaggcatcctttcactcagactttcccagttactcaagattgtattcaggaacgaagtcaaacccgggctcacttcttaattagaataaactagaatcaggtccattgcataactgctaattgtnttgcaccagggagccacaaaggaagctaaaactagcctttctaagttatcctaagtttttactatctaaccagcacttctgatttttttttcccttaaaactctaaagtacaggtgtcgtatgtctgccgcatctgaaaggctgccccggaaatcagagcctatctagcgggaatgtctgggcagtcacccccatcctgtgcgcagatagcaaagggctgctggcaggtgtcagacacacggtaccgcaacagcagtcccgaggtctgagattctcaatgtcagcaggtggctggagagtatcaccagagccactcaggaaccagccatgcggaatggctgggtttcttattgaacatgaaatgcttcctctttgggctggactgttttgctaaatgttagtgggtttgggca

SEQ ID NO: 537068 - DNA, 852 bp, Homo sapiens
gattgcacggaccggagcgaccctcaagctcactcttgagccttccctgttgtgttggagtgcagccgctccatcatgtccttcaggagcttgatgcgatgaattggtagatatttcaaaggtaggcgatatactcctgttctagacggagaagcatggtgattactcatagtatcatccttgtatgccaggtccggagatgatcggtcctgctgagactctgggcccaagtcccaccatatgcagaggtggggaatgttctggcgaacatcctctacgttctagtggtagaggctcgagatgctccactgacacaactaggtgttagagcactatcttgctctatagatgcaagcccatttcacaactatcaaaggtagctaggtcctacccttattgcatagcacttcttgtatagcattggggtctagccgtgatcgttttagcactaaggtaaaggcattatgggtacaagtcaagtaggtgtagcttcgtaggcgtcccagcaccaatgttttcggacgtccacgcctggagtgcatcagcggatagaatagtaggtaagatagtcggtatagcccctggtgggcatgagtggttatatggactacttagtggtggtggattgtcttacgaagctataggttctagtgcaatcaatgttgtgatcatgtaatggaagtcttctaaggaattaagcatggttaaaatgaacggattgtgttgataaaactgatttttaattgatcaattcatgaagaatgttctatagcactcgggtttcattcagccattgcaggagccttcaaggtaatctgggacggggcgagacggagacaaatacctgaaata

SEQ ID NO: 537069 - DNA, 345 bp, Homo sapiens
ctcagcatactgagtggggtaagctgtaaagaggccagaccctaaaggaccttagataccatatgctgaagattgggaggacgtttgggagaagcgggaatgacaagtaagcttgggagccatggtgtgccgagctcaccagtggagcacagtttgcacgccatgcagcatgccagcttcggaagattttctcactatggacatcagacaacctccactgaatcctaaccagaacctatgaggctactgaaaagttgtgcgatcctgcataacttctgtcacgcctgaaaacctcaggacactgaacctctcatctggaaaaaaataaaactttttacctataaa

SEQ ID NO: 537070 - DNA, 181 bp, Homo sapiens
tgtacactctgatgctaccagtcgatcctactgagttcaagtacggttagcctctggcctgggttccatgcctttgaattcaactaactgtggatcaaaaatatttggaagaaaaattccagtaagttccgttgtgcccccagcaactatttatatagcatttacattgtattaggtcttg

SEQ ID NO: 537071 - DNA, 463 bp, Homo sapiens
tcggccgaggccagtgtgcgctgatgccctggcaaggtcttcgtatgatgcccacctggcctgcctggccgccacgctggcatggggtgtagggccgggcaggtggggctgaggggatccagcctcgctgaggtgcagaggctggctctgtctgtttgccgtgacctagctgtctacggccttccccaggaatcctccaacggctgcttcccaagcatcagctggggatgggcccctttcagaatcacccccgaggatggcctcggtttccccctgtgccctgacagccgctcctggtatcagagctgctttccagagggcagcacagccagggccgggtgtctttagggatcagtttttccaagactccagaaggtgccaggttctccccttgagctcctgctcccccatcccccatcctcccagacctgggcaggagctgtgctgggagaaagggtggcag

SEQ ID NO: 537072 - DNA, 253 bp, Homo sapiens
ctctgataaccatgaggcttctcattctcacctgtcttgtggctgttgctcttgccaggcctaaacttcctcttagatacccagaacgccttcagaatccatcagagagcagtgagcctataccattagaatcaagaggggaatacatgaatggtatgaacaggcagagaaacattctgagagaaaaacagactgatgaaatcaagaactgtgttgtggcagagcctgagaagatggaatccagcatcagttc

SEQ ID NO: 537073 - DNA, 837 bp, Homo sapiens
ttccttggggagctatagttgtaattttggccggcgcatttttcccgcaagagggagcccgcaattgggcccctccttatacagggtggtgtggccaacctaaataacgggccgccttggtacttcttattccgctgaggtcgatccacaattgttgtgttgtgccacgagcggccccgcttcctaaatgcgggggttcccccccccgtcgtactgcgagaatagtcatgcgcgcccacaagaggacaaatttgtatggttaggtgcatcaaaagcccagtaccccttgaccaagagagtttcatggcccccgggttcgatatagttcctgtggacacatttctgtgcagattattgtaaacgggaggaaacgcgcggtccccgccaaccgtgggtcataaaaaggttgttggcccgccacagattgtttctagtcataacaggcttgcaaaaaatccccatcttgttaaaaaaaaatacgtgggacgtcttttgtgcacacgcgtttcctatggagaaaaactgtgaaggcaggtttttttgagggtgtcgcgttactcaccatttctgccctcctattactcacatttgagcaaaaatagatcttgttagtattcttcagcaggttttctgcggtcactctttctaattaatcttatctaggttatacaacctcccgctgccgccccaacaagatttacattgtatttctgacccctccggtttgaaccagaaagcaagacttctgcccccacattgagtacacaccaatacaactacttctgaagatctttgcggacccaaaaaaaagttctttaaaacccaacaaacataaca

SEQ ID NO: 537074 - DNA, 275 bp, Homo sapiens
tatgacgagcttacacaatagcttctatagtaaagatacctctttacggactccactatatgagtaccctaaagcgcatgtagaagcccccatcgctgggtcactagtacttgcggcggtaactcttaaaactaggcggcgatggtgataaatacgcgctcacactcaatattcaaaccccctgacaaaacacataatgctaccccttacttgttactataccctatcaggcctaattattacaagcgcgtcaggggaccgagctctgaatatcg

SEQ ID NO: 537075 - DNA, 116 bp, Homo sapiens
ctgtatatccatactatgcaaagaactcttacaactcaacaacaaaaagacaatctaatttttaaaaaatcatagaggacttgaacagctaattctccatagaagatatgcaaagg

SEQ ID NO: 537076 - DNA, 130 bp, Homo sapiens
caaaaatttttgggggcccccccccggggggggggggggggcccccccccggccccttttttggttttcccccccccccccccctgggggggggggggtttggtttttccccccccttccccccctttta

SEQ ID NO: 537077 - DNA, 1008 bp, Homo sapiens
ggaatgttcactgcgttcccgagcaggtgaaggtttttcatcgtagcggacgattgtgtgccaacacacacaccacgcccgtgggtgtaacatgagacacagaaagtgtttttgtccataaaaacatctgccggtgtatttgtcggtttttgaggctccccccgtcaccggtgctggtcccttcgctcgatgatttgtccccccccctctttggggggcgacccgacgccgcgactagaaatgtctgttgctgatcttaacgaagggttctcagagacacccctctctggtggggcccaacaccgtgtgggagagagccctctcttcttgtgtgcccacacaaaaagattttctgtggtgtggtggccccgccgccggtcggggcgtgaccacaccccactggtattgtgcccgacccaccttgtggggattgcttttggaggcgcgtgcgcctgcaatactccacaacggttcgccggatgtgtttgtgcgtgacaaccttcctcgtggccgccacaactggtgggtcatccccccctttcttgtctattcgtcatacatattctagcaacattttgttctccgcgcgcgcgctcgttgtcttctttggcctcgtccccgctgtggttcaccaccctcgcattactgtgcgagggagcttgtagcgcgcgaagacattctcgtctgtaaacacgcgggagagcgccccagtttcagagtggagagcgcgcgagagcttctccgctggcagcgcgaggaggtttccacccccccccccttcttcgcaccccggtgcccacgaacgacgcggcagaatctttcttccaaaaaaaaaaaaaaaaaaaaaacaaaaatggactgtggttggtcccaccaaggtatcaatccccgcctacttgagaaatgaacgcagggaagcatcacttgagccccggagttaaaaggcttccatgaccgatgatcaatcccctgcactcccgcttgggtgagaatgggacttttttttta

SEQ ID NO: 537078 - DNA, 90 bp, Homo sapiens
gtggacacagccacatattactgtgcacacaagagggttacaactatggtcgggggtacggtgacccggtttgactactggggccaagga

SEQ ID NO: 537079 - DNA, 519 bp, Homo sapiens
agaagacagaacacgtgtggcccatctttgatgtaactcattagacgagctgatcgttcctgtgtgccaccttccctagttcgaggttgtatttcttacttgttcctggacttcttattcccccatcaagcaaacatgattattagattgaagtatacattttactggttactttatttaccattgtttgctgtatccaagtttcccctcctttttggcagtatttaatgactttttgttgtttttttttcgagaaagagtcttgccctgtcgccaggctggagtgcagtggtgcgatctcggcttactgcaacctctgcctcagccccctgagttgccaggattgtaggcgcctgccaccatgcccagctaagtttttgtatttttaatagagacgcggtttcaccatgttggccaggctggtcttgaactcctgacctcaagtgatccgcctgcctttgcatcccaaaatgctgggattaaagacgtgagccaacacacccagctttgttttctttc

SEQ ID NO: 537080 - DNA, 265 bp, Homo sapiens
ttcccccccccccccctttttttttttcccctttggggtttcccccccccccccttttggcccggggaaatttcaaagggggcccttttttgcgccgggccaaaggttttccccgggcaccctgggccccaaaaaaccaacttttccctttggcgggccccccccccccccccctttggttttttttgtttttttttttccccggggggttttttttttttccccgggccccccccccccttaaactttggtttggcctttttta

SEQ ID NO: 537081 - DNA, 310 bp, Homo sapiens
gcaaaattttgggggggatttttattttaataaaaggccctttttaaaagaagctgattttgaaactgcttaagggcattgcgggtgctcccaaaacttttcatcggaggggatttatttttttcggggacatccctattttttatttatcacaaagattttccccctttttttccaggagcccaaacaaaggagggggaaaaaaataaccaaaaattatgtttttgcttttgttttcaaaccaagggggcggggattccaaaaaaaactttgttaaattttccaataaaccaaagtttgataccggtta

SEQ ID NO: 537082 - DNA, 1390 bp, Homo sapiens
gcttgccttcggacgcctggattttgactgtgctctcgcgagatttgggtctcgttcctaagcctggagctcgagaaagttctcccaggagaaagccatgatacacgttcgagcgccaagatcgtgaacgcccacactggcgagaagccggacgagttcgacgtccggcatctcccaggctctatctggagctggacgactgacaactcggacctcaacggctcagctcagggacgctgaatataacggacagctacaggaacattgaccgttggtggctggatcggaaagctactcataatctttagttcccggtatcctcacactgacaatctttccagagacaataccaagtccggctagtacgcagcaattggagacacaaagttcgagtcgggccagcatgtcgtcgtttcatcaggctcagaaggagcaattcatgccataacgcccaacatcgcacaaccagccagataacaaaaagataaggcaaaaagcgtcccagtgagacacggtacattcctgacaagacatgttgccgacggaatgcacacatcctctgacgagagctatggacatgacccaacaggcgcacattgaagaggcacaagacgacatccggcagatcaagacatagcatggacaagaccaggatcgatacacagagcgttccatatatgcgacaacaaccgccagcaagcaagaaaacaacagtgatgggaaacgaaccaaggtatatgcaaaccataatatagctagggatggatcctaagtcgacgaaccggcatcaacaggtggcacaggaatggtaacacgatatggaattccccgagaggttgatcacattcggtttgacaccagaacaacctactggaccgtacacacgttagaaccagagaatgcttagttaccacaccgtcggcaaaactacaatctaaagagctccaccggagcggagcacgataaggtttcaggagacgaacggacacgaaccagacgctgctaaaccagaggagaccatgtggcgtctgtcgaacgagtaagaatgacagccaagagttatcgacaccaccggacggccaaccagaagcggccacacaacaaatagtataacccaaacctactgtccctcacaccaaccatatccatcgtaaataaccaaccaacatacaaacataccacgaaaaaaccaaacatacaacacagttaatacatacttgtgacacctagcatagacaccaccagataatcgaaacaaccaagtattccaactacacacaaacaaaacaaaaaacacacacccaacaaactaaacaaaacatacaaaacatactacaaaaacactcctaaccaccctctacaacaaagaaagaacaaacaatacaactct

SEQ ID NO: 537083 - DNA, 110 bp, Homo sapiens
  misc_feature (8)..(8): n is a, c, g, or t
gatctggngacgacaaatgatgattttcttgaaatgatcccccctgctgtcactccaaaattaacactcaggataaatgtgcaaccccagagaacagagtcacagaattc

SEQ ID NO: 537084 - DNA, 208 bp, Homo sapiens
  misc_feature (16)..(16): n is a, c, g, or t
  misc_feature (49)..(49): n is a, c, g, or t
  misc_feature (55)..(55): n is a, c, g, or t
  misc_feature (71)..(71): n is a, c, g, or t
  misc_feature (76)..(76): n is a, c, g, or t
  misc_feature (78)..(78): n is a, c, g, or t
  misc_feature (92)..(92): n is a, c, g, or t
  misc_feature (94)..(94): n is a, c, g, or t
  misc_feature (107)..(107): n is a, c, g, or t
  misc_feature (116)..(118): n is a, c, g, or t
  misc_feature (122)..(122): n is a, c, g, or t
  misc_feature (136)..(136): n is a, c, g, or t
  misc_feature (147)..(147): n is a, c, g, or t
  misc_feature (149)..(149): n is a, c, g, or t
  misc_feature (178)..(178): n is a, c, g, or t
  misc_feature (191)..(191): n is a, c, g, or t
  misc_feature (194)..(194): n is a, c, g, or t
  misc_feature (206)..(206): n is a, c, g, or t
agaagaacactaaaanagtaatttgatctgtgaacaaattatgattgtntctgtnttattacactggagtnttttncnagtataataatttnanatataactttaanataattttnnntttntgggtataattaanaggttgtaagntnacctgttctagttccatcattctgtgtanagtgaagtattgnaangataatgtaaantt

SEQ ID NO: 537085 - DNA, 315 bp, Homo sapiens
cttccttaagggcagaaaatgaaaggagggctggccacagtggctcatgatggctgtaatcccagcactttgggaggccgaggtagagggatcatttgaggccaggagtttgagaccagtctgggcaacatagagagacccccatctctacaaaaattaaaaaattagccaggcacgattgcacatgcctgtagtccgagctactcaggaggcttaggtacaaggatcacttgagcccaggaaatcaaggtttttaattaacctttaataatgcaattgaatttcagccagggcgacgagcaagaccgtatctca

SEQ ID NO: 537086 - DNA, 443 bp, Homo sapiens
  misc_feature (50)..(50): n is a, c, g, or t
  misc_feature (164)..(164): n is a, c, g, or t
  misc_feature (226)..(226): n is a, c, g, or t
  misc_feature (413)..(413): n is a, c, g, or t
  misc_feature (433)..(433): n is a, c, g, or t
gcattttcacgatattgattcttcctacctacgagcatggaatgttcttncgtttgtttgtatcctcttttatttcattgagcagtggtttgtagttctccttgaggaggtccttcacatcccttgtaagttggattcctaggtattttattctctttgaagcngttgtgaatgggagttcactcatgatttggctctctgtttgtctgttattggtgtataagantgcttgtgatttttgtacattgattttgtatcctgaggagtttgctgaagttgcttatcagcttgagggagatatgggggctgagacggaagggggttttctacatatacaatcatgtcatctgcaaagaggggacaatttgaggaaaattcttggggcccaccccagaccccactgaatcagaagncggagggggtggggccccgncaaactatgt

SEQ ID NO: 537087 - DNA, 207 bp, Homo sapiens
catctcatccgtagggagaattggtgcgatgtcagaattctacaattcatgatatcttcatagtcaggaaataactctgatatgtaagataaactgcaacataagttggaaaaggatgtgatttccagtatttcaagtcattcaaagatcagattgagtcatcaccacgtgttatctgccgaggtaagccttcgtcacccagttcat

SEQ ID NO: 537088 - DNA, 185 bp, Homo sapiens
tgcatgctgccacacaattgtgggtgatcgggcaatgtggatcaccaccgccgcagacccaagaatggctatactgaaattgttggaaaataatcccattcggcttatgatcataaatgtaaggaggttgtggtgaaaagttgatacccctcaagtttagtcatttatggaactctgttaccaga

SEQ ID NO: 537089 - DNA, 297 bp, Homo sapiens
  misc_feature (288)..(288): n is a, c, g, or t
agctgctgcattcccagaacaccagcctcatcaaccagaagagaagatggatgctgacctgtcccagctccagacttaagtggaggaggcagtccaggagtccaggaattctgaggagaagcccaagaagcccatcacggatgccgccatgatggcagaggagctgaagaaggagcaggacaccagcccccaccttgagcgcatgaagaagacatggacaacccattaaggcctacagcacctcttgacgagccgaacagattcccctaaggcgcaaagaagaccttnaaagcttga

SEQ ID NO: 537090 - DNA, 1130 bp, Homo sapiens
taaacctttccttataagcatgcctgtgtaggggttgacagtgagggtaataatgacttgtgggttgattgtaaattttgggctgtaaattgtcagttcagtgtttaaatctgaccgcaggcttatgcggaggaaaatgtttccatgttacttatactaacattagttcttctatagggtgatagattgggcccaattggggttgtgaggatgtccagttataattgttggggatttttaaggtagtggggttgttgacgcttgaacgctttcttaaattggggggctagctttaagggcatacaatatgggggttgttaacattttttaacctcctcttcttacaagggtgttttctccttaggtggtccaaagagagccgtgtgtcccctctttggggactaacaggttaaattttaccagaggggagatttagagagggattcgtggtgggccacatttttaagagctgtgaaacttagagaatctctatcttgggggcacaaccgaggttattcccgcgagggcctcgagaagaggttgtgtgtcgccttaaaccttattaaaaattttttccccactatatttgttgggcgtcacatattagaagcgggatagatagaactacatttaaaagccgtgatcacatatagggtgtaagccacgaacagagagattaccggggggaggtgcctataaaggctttagtgggcttctccccttttgcccaaagtccattttctccataaagtcttagatttacaattttattcgccggaaagggtaataaagggggggaataaagagcccttatggagaaaaataatagggctaggagcagaataaaaattattgtacaacgtgtatatcccacttgagggggggggacgaacatatcttacatattagtggggcccccaggggtttgtccaaccagtgttctaaatcggcgcggaataaatctttaaatacaggggggcaacaagtgtgagtgttgcggcacaaacagagtcttgtcttactgtgcggtacaaaaacgggggggcaaagtgcgagttgtcgccggagcacacgaattgttgggtggcgctaaaggtacccctcttaatacgaacccaccgttgtggcct

SEQ ID NO: 537091 - DNA, 171 bp, Homo sapiens
tactggtgcagcgtggaatgctcggagcattgtaatgggtatggagacatgtcgatataagttatgctagcggtgagtggtacgaagttttttcatagcgatgtgtatgagttggtcgtaccggaatcaggcgtatgctgttcgaattcataagaacagggaggttagaag

SEQ ID NO: 537092 - DNA, 272 bp, Homo sapiens
ttttaaaatccctttttaggaatttccccttaggaaggaagtctgtgagtgggcatgatatgctgcttggtacttcgagcctttgtggctccccagacccagcagatattgtcagcgccagtgaagggacaataataagtccccagtcctcctttccctctttggaaagagccctagattgggggttaggggggctttcctgccctttccaatataaatatatagtcctcccttttttatccaaatagggtggggccccttaagaattcata

SEQ ID NO: 537093 - DNA, 873 bp, Homo sapiens
  misc_feature (811)..(811): n is a, c, g, or t
  misc_feature (813)..(814): n is a, c, g, or t
  misc_feature (818)..(818): n is a, c, g, or t
ccagtaccgagatcatgaataccctcccaaaggaagcggcgcatcgggcttggtttaaatctcaaaatgcatgcaattcccgtttaattaggaacatactaatgtacattaggggccaaggtttcaatatttaattcatttaaaaaagatacctttttacgagtggtaatgaaaatacacgtgactaaaagcagagcactgataattttggggggaaaaaacttaaatttattaaggaaagaaagaaattgaaccaggccattgttttaatatgcacataattaactgtagaactttatattgtgaaatttaattaaacatgttctacccatttgggttttgaaatgctaggtaaaatactaagttaaagatgtgaggaatcaatattatccttctggcatttttgtttcagctacataataacttttttagtaggtgtgtaaaaaagctcctgatatttttgccttgatctaaaggaaaatatgttctataaagggtaaatctattaattagagacccacacaactttctttcttgctagtgtaatcgttaaattgatttttccagtccatcatgtaattgttccagcgatggaatcctgctttccactcccattctgcttcatcaatatttcctgtcatttccaagacttttggaaaaaatgatgtccagaatcgacattgttgagcacgtagtttcgtcattattcttgttgactctgtattcaaggttagatatttttgttcagtgcttttgaagacaggccagcttgtgctattgttctgagtctcatttggattcctgtagcggngnnaatnagagagcgttgcagctaattcctgtttctttggtgctttccgttatcgcagcatt

SEQ ID NO: 537094 - DNA, 921 bp, Homo sapiens
  misc_feature (859)..(859): n is a, c, g, or t
  misc_feature (861)..(862): n is a, c, g, or t
  misc_feature (866)..(866): n is a, c, g, or t
gatgaaataaaatcatctgtaaagtaggggggggaagagcgtggaaatggagggacaagaggccagtttgaggtggggagttatgcgggacccatgtaagatatcatagcgagggcgagttccgatttaagtgggcaccgtaaagattgtaatctagtgggtacagtgtatcacatatttaattcatttaaaaaagatacctttttacgagtggtaatgaaaatacacgtgactaaaagcagagcactgataattttggggggaaaaaacttaaatttattaaggaaagaaagaaattgaaccaggccattgttttaatatgcacataattaactgtagaactttatattgtgaaatttaattaaacatgttctacccatttgggttttgaaatgctaggtaaaatactaagttaaagatgtgaggaatcaatattatccttctggcatttttgtttcagctacataataacttttttagtaggtgtgtaaaaaagctcctgatatttttgccttgatctaaaggaaaatatgttctataaagggtaaatctattaattagagacccacacaactttctttcttgctagtgtaatcgttaaattgatttttccagtccatcatgtaattgttccagcgatggaatcctgctttccactcccattctgcttcatcaatatttcctgtcatttccaagacttttggaaaaaatgatgtccagaatcgacattgttgagcacgtagtttcgtcattattcttgttgactctgtattcaaggttagatatttttgttcagtgcttttgaagacaggccagcttgtgctattgttctgagtctcatttggattcctgtagcggngnnaatnagagagcgttgcagctaattcctgtttctttggtgctttccgttatcgcagcatt

SEQ ID NO: 537095 - DNA, 926 bp, Homo sapiens
  misc_feature (864)..(864): n is a, c, g, or t
  misc_feature (866)..(867): n is a, c, g, or t
  misc_feature (871)..(871): n is a, c, g, or t
ctcccgctcaagcgcacggagtcaggatactggatccatctgttccactctctcaaagcacagggccgcgcaaccgggctttatgttacattccccaaatgacagtcgaattccttattatatttagagcccatcaagtgtcgtaacctgggggtgaccagggttctcaatgctttactccatttaaagaaagaacctctttttcccaagtgggtatcgtaattgcaaggtgcctagaaaacagagcctgtgatactttgtggggtgaaaagtccttaaatttattaaggaaagaaagaaattgaaccaggccattgttttaatatgcacataattaactgtagaactttatattgtgaaatttaattaaacatgttctacccatttgggttttgaaatgctaggtaaaatactaagttaaagatgtgaggaatcaatattatccttctggcatttttgtttcagctacataataacttttttagtaggtgtgtaaaaaagctcctgatatttttgccttgatctaaaggaaaatatgttctataaagggtaaatctattaattagagacccacacaactttctttcttgctagtgtaatcgttaaattgatttttccagtccatcatgtaattgttccagcgatggaatcctgctttccactcccattctgcttcatcaatatttcctgtcatttccaagacttttggaaaaaatgatgtccagaatcgacattgttgagcacgtagtttcgtcattattcttgttgactctgtattcaaggttagatatttttgttcagtgcttttgaagacaggccagcttgtgctattgttctgagtctcatttggattcctgtagcggngnnaatnagagagcgttgcagctaattcctgtttctttggtgctttccgttatcgcagcatt

SEQ ID NO: 537096 - DNA, 179 bp, Homo sapiens
gtgggtagtaagagaggaagggaatgtcatcggaagagcaggtggtattacagagccctaggtttaagatgaattcaggcatgcgggatccatagtctcatcttgtagtacaagtcaagagaaaataaattagtgtaggacagagttctactacaagatgagactaaggatccctcatg

SEQ ID NO: 537097 - DNA, 892 bp, Homo sapiens
  misc_feature (830)..(830): n is a, c, g, or t
  misc_feature (832)..(833): n is a, c, g, or t
  misc_feature (837)..(837): n is a, c, g, or t
cccgccatgcgggagtttcacaatctcccctctctaagcgaaccggcccgctgtgccttgtctcacgtctctcaaatgaaatcgcattctttttttcagtagcacccaaattatcgtaccctttgggggcccaggggtccaaaacttcatcctttaaaaaagaaccctgtccccgcctggtaaagcaaaaaccacgctcacttaaaggcagagcgatcgataattttcgttggacagagctttaaatttattaaggaaagaaagaaattgaaccaggccattgttttaatatgcacataattaactgtagaactttatattgtgaaatttaattaaacatgttctacccatttgggttttgaaatgctaggtaaaatactaagttaaagatgtgaggaatcaatattatccttctggcatttttgtttcagctacataataacttttttagtaggtgtgtaaaaaagctcctgatatttttgccttgatctaaaggaaaatatgttctataaagggtaaatctattaattagagacccacacaactttctttcttgctagtgtaatcgttaaattgatttttccagtccatcatgtaattgttccagcgatggaatcctgctttccactcccattctgcttcatcaatatttcctgtcatttccaagacttttggaaaaaatgatgtccagaatcgacattgttgagcacgtagtttcgtcattattcttgttgactctgtattcaaggttagatatttttgttcagtgcttttgaagacaggccagcttgtgctattgttctgagtctcatttggattcctgtagcggngnnaatnagagagcgttgcagctaattcctgtttctttggtgctttccgttatcgcagcatt

SEQ ID NO: 537098 - DNA, 255 bp, Homo sapiens
aagcctgcgcggaaggaaagcgccattagaagggaagaaaatgcatgagcaggtgtgtacaaattgtattatgggcggacagacgggcagagttccaatcatcctgcaaatccctgtggaacctctgtgccccaccggtagtgtcccagacatcttcttgtgtccctcttctcctcactgatgaaagacactggcgccatgggcaagcagttgggacttcctacgatatatttccgctggggaggtcccgagtca

SEQ ID NO: 537099 - DNA, 872 bp, Homo sapiens
  misc_feature (1)..(1): n is a, c, g, or t
  misc_feature (130)..(130): n is a, c, g, or t
  misc_feature (810)..(810): n is a, c, g, or t
  misc_feature (812)..(813): n is a, c, g, or t
  misc_feature (817)..(817): n is a, c, g, or t
ncgggcccacatttcacctcttattagcttgagagaagtaatggatgggtcgcagttgcgagtgcatgtaggtaatgcggttgcgccaaacaatccacttgggttttgcgaaccacagctatcacattgngggttgttataaacaagcacccccgtggatcgaaaactcaggcagcgcaccgttggtaaaaggcagagcacagatgtgtgggggggaacagtttaatttattaaggaaagaaagaaattgaaccaggccattgttttaatatgcacataattaactgtagaactttatattgtgaaatttaattaaacatgttctacccatttgggttttgaaatgctaggtaaaatactaagttaaagatgtgaggaatcaatattatccttctggcatttttgtttcagctacataataacttttttagtaggtgtgtaaaaaagctcctgatatttttgccttgatctaaaggaaaatatgttctataaagggtaaatctattaattagagacccacacaactttctttcttgctagtgtaatcgttaaattgatttttccagtccatcatgtaattgttccagcgatggaatcctgctttccactcccattctgcttcatcaatatttcctgtcatttccaagacttttggaaaaaatgatgtccagaatcgacattgttgagcacgtagtttcgtcattattcttgttgactctgtattcaaggttagatatttttgttcagtgcttttgaagacaggccagcttgtgctattgttctgagtctcatttggattcctgtagcggngnnaatnagagagcgttgcagctaattcctgtttctttggtgctttccgttatcgcagcatt

SEQ ID NO: 537100 - DNA, 735 bp, Homo sapiens
  misc_feature (21)..(21): n is a, c, g, or t
  misc_feature (64)..(64): n is a, c, g, or t
  misc_feature (128)..(128): n is a, c, g, or t
  misc_feature (140)..(140): n is a, c, g, or t
  misc_feature (673)..(673): n is a, c, g, or t
  misc_feature (675)..(676): n is a, c, g, or t
  misc_feature (680)..(680): n is a, c, g, or t
ctgaaaatggggcaggttcanattatccttaaaagcaccttttccgaggtaagaaaacacggantaaaccaagcccttatatttgggggaaaactttactttttaagaaaaaagaattgaccggcccntgtttaatagcncataataactgtagactttatattgtgaaatttaattaaacatgttctacccatttgggttttgaaatgctaggtaaaatactaagttaaagatgtgaggaatcaatattatccttctggcatttttgtttcagctacataataacttttttagtaggtgtgtaaaaaagctcctgatatttttgccttgatctaaaggaaaatatgttctataaagggtaaatctattaattagagacccacacaactttctttcttgctagtgtaatcgttaaattgatttttccagtccatcatgtaattgttccagcgatggaatcctgctttccactcccattctgcttcatcaatatttcctgtcatttccaagacttttggaaaaaatgatgtccagaatcgacattgttgagcacgtagtttcgtcattattcttgttgactctgtattcaaggttagatatttttgttcagtgcttttgaagacaggccagcttgtgctattgttctgagtctcatttggattcctgtagcggngnnaatnagagagcgttgcagctaattcctgtttctttggtgctttccgttatcgcagcatt

SEQ ID NO: 537101 - DNA, 986 bp, Homo sapiens
  misc_feature (43)..(43): n is a, c, g, or t
aatggaggagcgcgggaggtttgtagaagaaaaaaaaaagctnggccgcatctgcttgtctgtgcttttttaattatctcatattgacattcaattcttattttaattaggaaacataatattgtaaactatggtgtacagtgtttcaatatttaattcatttaaaaaagatacctttttacgagtggtaatgaaaatacacgtgactaaaagcagagcactgataattttggggggaaaaaacttaaatttattaaggaaagaaagaaattgaaccaggccattgttttaatatgcacataattaactgtagaactttatattgtgaaatttaattaaacatgttctacccatttgggttttgaaatgctaggtaaaatactaagttaaagatgtgaggaatcaatattatccttctggcatttttgtttcagctacataataacttttttagtaggtgtgtaaaaaagctcctgatatttttgccttgatctaaaggaaaatatgttatgagagggggagtcatctagtaagagacccaaaacaactttgttttcttgttggtgggatcgctaaatggattgttccacggcatgaagttatggcgccagctataggaacctggttgcactgacatcctgggtatcaatatttcctggaattcctaaaatttggaagaaatgaggccaggaatacgttgtgtgaacttatcggtgtgtttttttccgggctttctggtccaggatgtttgtggtgctcacagttgtggagacacgacgttggtgatgggggaagattaaatgaatggggagcaaatggaggagatacacacacgtgatttgccgaccggcttgcagttgcagcgaagtgggacggcgaggcgggtggatggtgaagacagataggcaatgagcgttttgttggtagagttaaacactggattatgaccagtgaaaggcagagtaggctgtccaaactacgcatag

SEQ ID NO: 537102 - DNA, 314 bp, Homo sapiens
gagggtgggagattctactccagtcctgcctcatctcctgcgagaggcagacgagtgagtttcactcagaaaaatttcatgtgaatggggccagcttgagctgccctgtgtccatggtgggtgtgccgatctggctgggaactatgatcactatgatgagttgaaagggtgtgagcgggtatagattggcctgtgagcgttacagtatggagcaagcttctaccttctttgcgggactcaaagcccctagttttccccactccacttgttgtcccatgaaggaagaagaggggttcctcctgaccacagtgcct

SEQ ID NO: 537103 - DNA, 960 bp, Homo sapiens
  misc_feature (43)..(43): n is a, c, g, or t
  misc_feature (799)..(799): n is a, c, g, or t
  misc_feature (821)..(821): n is a, c, g, or t
aatggaggagcgcgggaggtttgtagaagaaaaaaaaaagctnggccgcatctgcttgtctgtgcttttttaattatctcatattgacattcaattcttattttaattaggaaacataatattgtaaactatggtgtacagtgtttcaatatttaattcatttaaaaaagatacctttttacgagtggtaatgaaaatacacgtgactaaaagcagagcactgataattttggggggaaaaaacttaaatttattaaggaaagaaagaaattgaaccaggccattgttttaatatgcacataattaactgtagaactttatattgtgaaatttaattaaacatgttctacccatttgggttttgaaatgctaggtaaaatactaagttaaagatgtgaggaatcaatattatccttctggcatttttgtttcagctacattagagacttggcaggaaggggtggaagaaaggctactaaattttttcgggcctaggactagggagaaaataaggtgccaatacaggggttaaccctgttgacttgggggaccgccgcagaattgaatttaggcggtagggggggaacatagaatgggcaagagggcgaaaatatcgaggggacaatagatctaatgaggttggaacggccgcgtgccgatgcaatagacaatctgtcgcgtgggtgactgacgatgaatcaagatccgggccggaagagacgtgagttcacgtgttcggcggagttaaggctaccgtgtaggtccgtcacagggatgttatgtttgcgtcgggctaaanagttgtagcggtgtggtgatgnggaggggggttggagcggataagccctagggcgaagagagggagcgataggtgatgtgcggattaggagagtgagatgcgatgatagtgcagccgatggccgcgtattgtgcagttacggtgcctgtttgcggaggatt

SEQ ID NO: 537104 - DNA, 934 bp, Homo sapiens
  misc_feature (1)..(1): n is a, c, g, or t
ntgggtgggaaggtaaaaggagaagaaggaggggtgcgtagaatgtcaaggattattgaatggcttgcggtatcgaacaatttggattgtagggacacgctgtagggtgaggagtgaggggaggtggtaggatgtttaatggaggggggtcggatattatggtagagtgagggtcgaaggtgagagtgaggagttcgtaatctaaggcgagcgtcaggatatattatgatgtggtcaatttattagttaatcccctgataaggaatggaggtgatgagtgtcgctgtgatcgccaatgacgcagatgttattatagggggtagaatgtagatctgatttttgttgaattggggaacatggaaatggatgcggatggtgggaattgatggaaggtgtgaataagttagagggagatacgatgattggaggtggtaatgagaatactgggtgttataagagagcgtttgatggtgttggggggaaaaggcttaatttattaaggaaagaaagaaattgaaccaggccattgttttaatatgcacataattaactgtagaactttatattgtgaaatttaattaaacatgttctacccatttgggttttgaaatgctaggtaaaatactaagttaaagatgtgaggaatcaatattatccttctggcatttttgtttcagctacataataacttttttagtaggtgtgtaaaaaagctcctgatatttttgccttgatctaaaggaaaatatgttctataaagggtaaatctattaattagagacccacacaactttctttcttgctagtgtaatcgttaaattgatttttccagtccatcatgtaattgttccagcgatggaatcctgctttccactccctaacgcttcatcgaatttacgtaaagattgtgtttttttgtgtgtgcggcgttggg

SEQ ID NO: 537105 - DNA, 654 bp, Homo sapiens
  misc_feature (2)..(2): n is a, c, g, or t
  misc_feature (52)..(52): n is a, c, g, or t
  misc_feature (68)..(68): n is a, c, g, or t
  misc_feature (84)..(84): n is a, c, g, or t
  misc_feature (92)..(92): n is a, c, g, or t
cnaggcaaagattcggcacgagaaaaaaatcccagtgggaacgactgcaaanactttggtgtattcgnatctgatctttttcgnatattttntctctctttaaactgaaattttgtcattttcatcttctgtcttgatttttttcatttagactcatgtttatgtttttatgctttaagtcatgttttcagttactaaatagcatattattctattctgtgtatttatatatgtatttatgtgttttaagttccttccaaatttactttgataatatataaagataggagtagcacctctggctaaacctttttttcatacccacttatttccttagaatagatttctagaattactaaagataagtgcatgagcatttaatatacttgataactattgtcagatgacttgccaggaagtttgttcttagtaatatttaatgtactgggatatgtcgtgtttctcaaccccttttcctgcttcattgatttgcctgttccattacaaaccactttgtgtttaattaatacctttatgttattatatctggtagggcaagaattcacactacaattttataggactttcctctctattctcttctgtttgttcctataggtgatttttagaatcatttataatttcaaaaaaaaa

SEQ ID NO: 537106 - DNA, 909 bp, Homo sapiens
agtaaaatatataaaattaggtgagattcgggcgggaggtcggtttaacacggtagcttatcgataggaagaatgcggctgcgtggttatcgagtaattgatataaatatataaaaaacaagatggattagaggatcaaatgggggacgcgaatatgtgaacgagtagacggcacccgttaatgggtgcggatccttgtgagaataggaaccgtaggcgcaggtgggaagcgaaacgcattaagagtacagagcagagctacgggagaatgtggtggggaaaaaagtataggttgggtagataaataaaatcgatatgagctcagcaccatatttttagaagtcaacatataaaatgtggtagacctttatattgtgaaatttaattaaacatgttctacccatttgggttttgaaatgctaggtaaaatactaagttaaagatgtgaggaatcaatattatccttctggcatttttgtttcagctacataataacttttttagtaggtgtgtaaaaaagctcctgatatttttgccttgatctaaaggaaaatatgttctataaagggtaaatctattaattagagacccacacaactttctttcttgctagtgtaatcgttaaattgatttttccagtccatcatgtaattgttccagcgatggaatcctgctttccactcccattctgcttcatcaatatttcctgtcatttccaagacttttggaaaaaatgatgtccagaatcgacattgttgagcacgtagtttcgtcattattcttgttgactctgtattcaaggttagatatttttgttcagtgcttttgaagacaggccagcttgtgctaaagtctgatctcttgtgcctctaaggcctgtcctgttaatgtgagagagaaggatagaga

SEQ ID NO: 537107 - DNA, 143 bp, Homo sapiens
aaggctcagatggatcctgcacgaagccactagacgagatgacaactccgcaggcacacaactccgcaaactaaacaagaacgagatgatgcaatcttcagtgaaagtaagatggcatactaacatgagcttactccgtgaaa

SEQ ID NO: 537108 - DNA, 699 bp, Homo sapiens
  misc_feature (29)..(29): n is a, c, g, or t
  misc_feature (38)..(38): n is a, c, g, or t
  misc_feature (46)..(46): n is a, c, g, or t
  misc_feature (51)..(51): n is a, c, g, or t
  misc_feature (621)..(621): n is a, c, g, or t
agtacggttttaagggttggtttccgcanaccgcaggngccctcangggcnaaatcattgctgccagtgattgtggtctgacttgtttaaaccctcagacttttttaatgttaggtatttgtagcattaggccaacatgtattaagctgagccaatgaaaagtcccatcttgatgtattttcggggtttaaaaaatgagcccagttgctcaactgtttggttgaaaaccttgctcattttttaatggaagggtaagtgtcaccccctttttttgcctctggctgggccttgctaagggccaaggaaaaaaagacattttttagggggcagccagtccaaatgcccaaaaaaagaccagtttttgccctgattgtatgaaatttgacattttggccctttttttttttttttggccaatcagattttttatgttctaaggacatggctgctgtagaaaagcccagacgtggatgataaattatccccaaaagcagcatgacaaaatgcctcggggagcccttggaagggaaattgcagttttgttgaaataaaggaaaatcccttggtaaaaacccagcctgttaggcttgtgtgggcctccagtatgttccccaggggaangggtgggatttttcggccctttgcatcatccatctttttttataggtgggaaaataaacaactttgtgatcctcctga

SEQ ID NO: 537109 - DNA, 1013 bp, Homo sapiens
ggctcgcgcggtgcgagagggtgtgcggtgttattactcgcaggtggtctgatagagggcaagtgtgattgatgtatccagacacggtgtaggggccgctatgagaggagtggtgtgaagattcgcaagttcaatgtagtgtgagtgcattgaaattgtgccagttggtagagatatgttaagttctgaatgggagtggtggattgaaggtgagtaccatggtacagaagtttaacatcctgataccctttcccttctaccatgtcagttatcatgttgctcgaattatgcttgccagaatgtgtgaaagtgacacacggaaagcatagtttgcattactttatatattaaattgcattcagtggcttcgtagggaaatgttggattcagaacttgcacatactgataagtaagaaacacagtataatttcggtgtacatactccagaccatagatagcaaaacggtgctatcggtcaacttctgaacatgtttcctagtattaaggactttaatatagcaacagacaaaattattgttaacaatggatgttacagctcaaaagatttatttagatttgtaacctattttctcccttattatccactgctaatgtggatgtatggtcaaacaccttttagtattgatagcttacatatggccaaaggaatacagtttatagcaaaacatgggtatgctgtagctaactttatagaaagtgtaatataacaatgtaaaaaattatatatcggggaggattttttggttgcgcggaaagtggcctatcagttactggatctttttattatgtaagcaaatagccaatataaaatttaagtttttgttaactactaccttatgtgttttcaccggtacagacactaattcattacaatagctaaattgattgtttaaaaagaaatataaatgtgacagtggacttatttatgttaaatataccattattcagacaactcagtattcatttaatgccctgctggcgcgcgtcgtggc

SEQ ID NO: 537110 - DNA, 808 bp, Homo sapiens
  misc_feature (29)..(29): n is a, c, g, or t
  misc_feature (38)..(38): n is a, c, g, or t
  misc_feature (46)..(46): n is a, c, g, or t
  misc_feature (51)..(51): n is a, c, g, or t
  misc_feature (181)..(181): n is a, c, g, or t
  misc_feature (184)..(184): n is a, c, g, or t
  misc_feature (668)..(668): n is a, c, g, or t
  misc_feature (747)..(750): n is a, c, g, or t
agtacggttttaagggttggtttccgcanaccgcaggngccctcangggcnaaatcattgctgccagtgattgtggtctgacttgtttaaaccctcagacttttttaatgttaggtatttgtagcattaggccaacatgtattaagctgagcgccccccccacaaggagaaaaattttggnaanaatttaagaaggttccaatgaaaagtcccatcttgatgtattttcggggtttaaaaaatgagcccagttgctcaactgtttggttgaaaaccttgctcattttttaatggaagggtaagtgtcaccccctttttttgcctctggctgggccttgctaagggccaaggaaaaaaagacattttttagggggcagccagtccaaatgcccaaaaaaagaccagtttttgccctgattgtatgaaatttgacattttggccctttttttttttttttggccaatcagattttttatgttctaaggacatggctgctgtagaaaagcccagacgtggatgataaattatccccaaaagcagcatgacaaaatgcctcggggagcccttggaagggaaattgcagttttgttgaaataaaggaaaatcccttggtaaaaacccagcctgttaggcttgtgtgggcctccagtatgttccccaggggaangggtgggatttttcggccctttgcatcatccatctttttttataggtgggaaaataaacaactttgtgatcctcctgannnnctgggcatgaaagtttttcaaaaaaagggctttttgccagctcaggagttttccccca

SEQ ID NO: 537111 - DNA, 357 bp, Homo sapiens
caaatggaaattgaaataatttataaaatattggcgttcctatgttttaaaaagttcctaattttttccctaaatggaggaaactattagttttattgttaaaaaggggagatattaaaattccttttagatgcccagtgattccaattgtcccagtttgaaataagtaccctgtgggtatgagataaattagtgcccttcagaacaagtttcagtatcaaatgttcaaaaggaagttgctattgcattgattttaaaatttgtacataaaccctgatttttttgagcattattttgtatttgttgtactttaaaacctgggggccagttccaaaaataaaaatttggggtttttta

SEQ ID NO: 537112 - DNA, 481 bp, Homo sapiens
  misc_feature (29)..(29): n is a, c, g, or t
  misc_feature (38)..(38): n is a, c, g, or t
  misc_feature (46)..(46): n is a, c, g, or t
  misc_feature (51)..(51): n is a, c, g, or t
agtacggttttaagggttggtttccgcanaccgcaggngccctcangggcnaaatcattgctgccagtgattgtggtctgacttgtttaaaccctcagacttttttaatgttaggtatttgtagcattaggccaacatgtattaagctgagccaatgaaaagtcccatcttgatgtattttcggggtttaaaaaatgagcccagttgctcaactgtttggttgaaaaccttgctcattttttaatggaagggtaagtgtcaccccctttttttgcctctggctgggccttgctaagggccaaggaaaaaaagacattttttagggggcagccagtccaaatgcccaaaaaaagaccagtttttgccctgattgtatgaaatttgacattttggccctttttttttttttttggcccacccatttttcttttttccaaggaacgtgggtcgtcggtaaattaccacacagctgtttaatatt

SEQ ID NO: 537113 - DNA, 677 bp, Homo sapiens
  misc_feature (447)..(447): n is a, c, g, or t
  misc_feature (529)..(529): n is a, c, g, or t
  misc_feature (538)..(538): n is a, c, g, or t
  misc_feature (603)..(603): n is a, c, g, or t
agggtattcaattaggaaaagaggaagtcaaattgtccctgtttgcagatgacatgattgtatttttagaaaaccccattgtctcagcccaaaatcttaagctgataagcaacttcagcaaagtctcaggatacaaaatcaatgtacaaaaatcacaagcattcttatacaccaacaacggacagagagccaaatcatgagtgaattcccattcacaattgcttcaaagagaataaaatacctaggaatccagcttacaagggacgtgaaggacctctttaaggagaactacaaaccactcactgctcaaggaaataaaagaggatacaaacaaatggaagcacattccatgctcatgggtaggaagaatcaatatcgtgaaaatggccatactgcccaaggtaatttacagattcaatgccatccccatcaagctaccaatgactntcttcacagaattggaaaagctactttaacgttcatatggaaccaaaaaagagcccgcattgccaagtcaatcctaagccanaagaaaatnggcttctttctttccttctctttcttccttctcataaacaaaagcagtcatttactttaaatttnggatatattcgttcttaaaatttttcagtttctccgtactatcactgcattactgctagcttagagatctccgt

SEQ ID NO: 537114 - DNA, 243 bp, Homo sapiens
gtgggagctaaatgatgagaactcatgaacacaatgaagggaacagacactagggtctacttgagggtggaagatgtgaagagggagaggagcagtaaaagtacctattggtgatgaagtactctgtacaacaaacccgtgacaagagtttccctatataacaaaccttcacatatacccctgaacctaaaagtttttttaattgtaaataaatggatcattaaaaaaaattttaattataaa

SEQ ID NO: 537115 - DNA, 452 bp, Homo sapiens
  misc_feature (50)..(50): n is a, c, g, or t
  misc_feature (98)..(98): n is a, c, g, or t
  misc_feature (119)..(119): n is a, c, g, or t
  misc_feature (179)..(179): n is a, c, g, or t
  misc_feature (210)..(210): n is a, c, g, or t
  misc_feature (402)..(403): n is a, c, g, or t
  misc_feature (445)..(445): n is a, c, g, or t
  misc_feature (447)..(450): n is a, c, g, or t
cccaattaagatataaagttattatccccccaccccccaatgaatttaantgtgcccccatttcctagtcaaataactcccttttccccctagggaantccttgttcctaattgcctantactgttaccttagttttgccctttttagaattttatatgagtggctagatgccaagtcncacgcctgtaatccctagcactttgggaggncccaggtgggcggatcatttgaggtcgggagttcgagaccagcctggccaaaatggtgaaaacccgtttctactaaaaatatcaaaattagccaggtgtggtggtgggcgtctgtaatcccagctattcgagaggctgaggcaggagaatcacttgaacccaggaggcagaggtttcagtgagcccaagaannccactgcactccagcctgggtgataagagtgagactccatcncnnnnaa

SEQ ID NO: 537116 - DNA, 133 bp, Homo sapiens
  misc_feature (81)..(81): n is a, c, g, or t
tcagggcgcctgcttgggtctctttcaagtgtacttccgttcttttctgttctgaagcttttaaaataaacttccactcgntgggcgcagtgctcatgcctgtaatcccagcactttgggaggctgaggtggg

SEQ ID NO: 537117 - DNA, 1394 bp, Homo sapiens
  misc_feature (803)..(803): n is a, c, g, or t
  misc_feature (1394)..(1394): n is a, c, g, or t
ggagccgcgtgggcaggagaacaggaaaatggcgagacacgggggctgacacccgggggtttgggatcacagaagccggaagaaccggattggacgcataagggaccccacacaagagaattcctctcagaagcattcgatggagcagcaaacgcgcgacaaacacgggtggggggcgccacgcgccgggggccacgaaaacaaccaatttaacggaaaactccaggcgtctccagggcacacaaactttctttctccattaatttttcacaaaggccgtgacacaggaacttcctaagggtgtaaacaaagaaaagtacatcacggggtggcattttgcgaagtgtgggtcttgcagaacgagtgcacattcacagacaaacgcaggagcagccatagtgtctgagtaagtattcccacaccggtactccggtggaagacacggctgactacaggggcgcgagacacgccaatccctattaaaaacgagcgagacaatattggcaggtgcacaacatctttcggcgcatgccacccacactttcctaactgtgggcactggacaccaaggcacaaaacccaacggtgcggcctgcggacagccagctgcttatacaaaacaacacaacggtgtcacgcggtgtggaccacaacccgcttttgtgggaccacaacaacaaggcgaacaggcggtttaccgcccataccaacgtgtggttgttcatcacacaccgtgcttgcgactcttatcgagaacatcaagggtgatatccgtccacacttcaacactcacagcactgtcnccgtgaaaccttggtgcccaacacgagtgtgccaccaaccgcgtgtgcccttcaccgactgctgttgaatcaacaccaccagtgagagacacttatcaaacgtcttgagcacgagtcggacacagacacaggtggctaaaaggagtgacgattgaggaatacacacactccattgtcccaccatggtgtgtgctttgggatctgcaacaacactcatgggtcgagaaagaacactcaaacgcagctataaaaagagaactctagtgtgctcgcgtggagcaaagcaagccgaggatcaatcgctaaggaggcaaacgcggtgcccctgacaacggtgtggtctttcatcattacttccttcctcgcgtctctggtctcaccacatccattattacttcaatcacgcggcagcactcaagagcagcaagatcacgatagacaccacgagtatggacacacatggagagatagcagtgagcaccaggacgacgcaccagtaagcacgtgaagaagcagaggaacagaagcacgaagcaagacagcgcagctgtgaacatcagaggaaccggcacagcaaacccgacgaaggcn

SEQ ID NO: 537118 - DNA, 205 bp, Homo sapiens
ggctatctagaactccggactcacgatccacctgtctcagacttccaaagtgctgggattacagacgtaagccactatgcccagctgaaaacttaatatttaaacaaatttgatgctgtggctacaaaggattgcaactcttttccataaactccaagtttcagggttttccaactttaggaatttctatgtgtaaaatccagcg

SEQ ID NO: 537119 - DNA, 132 bp, Homo sapiens
ggattccggtgattggcatgttttttattcatttcatcaatttcaaagcttgtatcgtctattccaggattcaatttcttcctgattcaaccttgggagattgtgtgttccaggaatttctctatttcctcc

SEQ ID NO: 537120 - DNA, 445 bp, Homo sapiens
  misc_feature (215)..(215): n is a, c, g, or t
cacgaagttttttaagagttaagaatagagcttattttccaactctgctctaccaacatagcgtttccccaccaactctgggggccagagactttcacagctttcacaatcttttgttaaggtgctgcctttgtgggggccttggcagcagccattgctgtcttctttgatgcctgcttagccttttttgcttccttggcagccctgatagcctntctcgctgggctttcctaacctctggtttctgattcctcttggccattatatcagcaagagatgcaccagtgatggctcgttggaatttgactgcacggcgggttcttttcttttgaatttcttccgactgccctttcttgtgtttccttctgtagaggacagtccagtttatctgccgaggattccttttggaaaggaatgctgactcacattttgcattaagaaactg

SEQ ID NO: 537121 - DNA, 187 bp, Homo sapiens
cggtgagggcccgccctcacagttgcactgttcctgccggatgccctgcccctcacagtagtctaccctggctgagggcgaccccttatgaaggggcgaccccctttgtaggctgcacccctcaccgtgggtgtgtcctggtgaatgttcccgcccgccttgctgaagcaccggccccttgcctgaa

SEQ ID NO: 537122 - DNA, 103 bp, Homo sapiens
cggtacctatactggtgatgctagaggtatgttcttggtaacaggcgggctaagatttgccgagtgcctttactttttttaacctttccttaatagcatgcct

SEQ ID NO: 537123 - DNA, 1632 bp, Homo sapiens
atccctgtgcctcaggcctgcacatcaccctgacctgcttacgcccagattttcttcaatcacatctgaataaatccacttgcacagcaacagcttatagcttccatttgcacccatgtgtggcattagggcgctgtaaggcaagtgatgcattgcctttcttgttcagtgtctgagtgctatgcaagattgcacaccagcaggtcccagatgcgattcctgtttagcagcaatgtccacatggcatacacccaacttgctgcttttggcatttccacctggtatgggcggtaagttgcaccccgctcgttttggcaattgcagcccaattcgagtgcaagcacaatcatccgtatattagtggctctgattacaatgggtgcaaatctcaccaacccatcacagcacagatgccaaccagccatttcgcaatttgcccatacccagcaccaaaaagtggcatggctgagcatcacactccttccatcttaatccattcgcaccgcaaagcgccagcgccacattcgccagcccaacaccccacaatctgtggtaatagtttggcgccattgggatagtaggtactggcccatttacgtctatcacattgggacatacttgccccacactcacagcaaccagtctgtacccttgcgagctcaaccagcatccccctcctccgccagttccacagaaaccttatatgctattacaaccgaccccactgtgcaccagcacacgacatggcggatctaccctgggcccttggcaattgcttcacacgaaacgccgtacaacacgtgttacttcggttcaacacatctcggcacactcaccacatacaggacgacactccccccatttctcctccacaaatcgttcgtcaacccccctttcacctttcccactgtgtgagccacctcacctgaaaagggtacaccggggcactagacaacacggcgcccacaacagagtgacacaacgtctcgtcacacatacggctgagacacacgatgacacacaacgctactcaccctcaccaggacacagagaaaacgacaccccccactggccacgagacccccgctaactgatacccaactggtgcgcaccgcaacatacccgctctctccaccagactgacacggcacaacaacacaaaaccgcgacacacacaacacaccacttcagacacccaccacgaacaaaatgccgtacaccaccacacacaccacgcacaccagccaaagacagagacagagcgcaccaacaaccaagcgtcacgcagacacaacacaccgacgcagccgcaaacgcgaaccccagcaaacaccacgaacaacgaaccgcaccgccccccaccagcgacctcgccgcacacacaacaggggaacaaacggcaccgaccaggcagccctcaacagcacacccgcgccacactccggccagacgccgcacagaccgaaacgcgcaagacccagaccgaacaccacactgcagaccctcgagcacacaggaaagatcgcgacactagagcaccgcgcgcgcccagcacaacagcacgaaccacccgagctccaccacgccgaagcagcagcagcccacacaagcccgacgcaccacccgacacag

SEQ ID NO: 537124 - DNA, 218 bp, Homo sapiens
cccgactagcccgacagccgcacccgccgccggcaccacactgcaccatcattcctatctgaccccacctccatccccaacaccaaagccaacaaacaccttccccccatcactcccactcgcctcagcagcaccgggacacccctcacagccacctccctcagcatgatcgctgtcaccttggcccccaccttaggctcctgtcgggctagtcgggg

SEQ ID NO: 537125 - DNA, 120 bp, Homo sapiens
gtaagagactttgactcggagctgttgtctgtccttgtttcctgcctacaggagctcttcaaggcccacttgcgaggggaggtcctgcctgaggagattactgagtgagtcccgtggagg

SEQ ID NO: 537126 - DNA, 446 bp, Homo sapiens
tcacagaaacacaaagaaaaaaaaggaaaaagaggccaacatggtgaaacccatctctgctgaaaatacaaaaattagctggacgtggtggtgggcgcctataatcccagctactgaggaggctgagacaggagaatcgcttgaacctggagggcagaggttgcagtgagccaaaatcacaccattgcactccagcctgggcaacaaagtgagactccatctcaaaatacaaaaaaaaaaattagctgggtgtggtggtgggcgcctgtattcccaactattggggaggctgaggcagaagaatcacttgaacccgggaggcagaggttggagtgagccaagatggcaccattgcactccattctgggtgacaagcgtgaaattccgtctcaaaaaaaaaccaaaaaaaccttgacattcagctgttgggcgttgcgtgcaggggt

SEQ ID NO: 537127 - DNA, 225 bp, Homo sapiens
tctgcatcgctcaatcttttatcttgcatccaccttttccaattgagagagccacactgacctagcaggggaccacctatgcctcacgggctgaccgggggtctactggcagctgtgctattggtcatagagctgcttatgtcctcttccagttcgtcaatcatcatggcacaggctttgaagatggcattggtgggcccagccgaagtgatgtttctcattgga

SEQ ID NO: 537128 - DNA, 686 bp, Homo sapiens
tgccccgtcatgctacccagaatagagtggctttcctccaggagatgggcacacctggctatccggggtgaacgcatccatcagctcatcctcagctgaactagacccaggtgagcacgggctgaaaactgcccctgggctgacttttgatagcgcctgccttgcccaccttaccaattcctttttccaatttacctagtatttaagagtaacccttgagattgtggaggaaatatgaggaggctgtgtaccaaaatagatgtgagaccccttctggggacatccacgtgaaatgccctgaattatggaccatggggctatatgccatatgccctatagagttattatggcctttaagaatgtccgagtatacttaaaactgtattgctggcccgggcgcggtggctcacgccctgttaatccccgccactttgggaggcccaggcgggccagacccatgaggtcaggagattgagacccatcctggcccaaccatggtgaaacccctgtctcttaccttaaaatcaccccaaatgagctgggtgtggtggcgcgtgcccgtagtcccagctactcgagaggctaaggccggaaaatcgcttgaaccccggaggccgagattgccgtgagcccagattgcacccgtgcactccagctgggcgaccgagcgagactccctttcggga

SEQ ID NO: 537129 - DNA, 370 bp, Homo sapiens
  misc_feature (27)..(27): n is a, c, g, or t
  misc_feature (227)..(227): n is a, c, g, or t
  misc_feature (370)..(370): n is a, c, g, or t
tctctcaagtagtgtatcacagtagtngcctcccggtttccttaagggacaacatccttaagtcaaaagagagcagaggcaccactaaaagatcgcagtttgcctggtgcagtggctcacacctgtaatcccaacattttgggaacccaaggtgggtagatcacgagatcaagagatcaagaccatagtgaccaacatagtgaaaccccatctctactgaaagtacnaaaattagctgggtgtgttggcacatgcctgtagtcccagctacttgagaggctgaggcaagagaattgtttgaacccgggaggcagaggttgcagtgtggtgagatcatgccactacactccagcctggcgacagagcgagn

SEQ ID NO: 537130 - DNA, 392 bp, Homo sapiens
atggataaggtgagagtagcaggagagattttgctccgattctgttaacttctacctccaacccacaaaacaagatatatgatctgagtatctatcactaattgggagctaaaataactaagggacatgggaatccagtattctcaaccacctttcgacaaagtgtgtattccatctatgtgccgatacgcctaaatttggcctatttatcggtatgtcccttatgttctgataattctgacctgctgtacaaatatcttgacatatgtgcaatatcatgatcatcatactgggtaaaaaaacaaagaatagaagcaaaacacctggtatggccatgatattgtatttggtaaaggttaatctacgaagttaccaacagttaaatgctatat

SEQ ID NO: 537131 - DNA, 484 bp, Homo sapiens
ggcatcctgtgtgaaccgaaaagcgatcattcttatactacatggttcctatttgtataattaccaacactgagagcaggatttaataatgtgcatgacaaatagtctgcattttaattacatcatggatattctgagatctaccaaagacttctttttaaaggaaaagtctactaagtttaaacaaacaaaaaacaccataaatacctcattttaaattacgtatagccttcaaagcaggaggaaatcaaaagaggtaaagaaagaccatagaggaaaaaagggaaaagtaattgtaaaccatgatggaaaactgattaaggcaaataaagcagatttaaaaacctaggtttcctaaatctttctttgttctactaattaaggctggataaaaaggtctcaatgttattaaaatgggcaaatgaagaaggatagtggggaaaacaccaaataagaaatcagcaaacagacacgccagcaggca

SEQ ID NO: 537132 - DNA, 266 bp, Homo sapiens
taactactatttactgggtatagggttctttctggggtgataggaatgttctggagttaaatagaggtgatggttgcacaacattataaatatgcaataaagcactgtatcatatacttttaaatgctaaggttttggagtttccgtcatggtgcagtggaaaggaattcaacaaggaaccaggaggttgtgggttcaatccctggcctcactcagtgggttaaagatctggtgttgcccatgagctgtgtaggtggcagatgcag

SEQ ID NO: 537133 - DNA, 260 bp, Homo sapiens
tggcatgctatctggttcactaatggttaacaaaaaaactataccaaaacttggaggcaggtgtggaagctcatacccgtaatgccaacactttgggaggctacaggcacgttacacacaagcgtgtaatttttgtttgtttgtgtgtgtgtgtagtgtgtgtgtgtatttgtagagacagagttttgtcgtgttgccaggttgggctccaactcctgtgttctagggaattcggccaactcagtcttccaaagtggtgg

SEQ ID NO: 537134 - DNA, 664 bp, Homo sapiens
  misc_feature (15)..(15): n is a, c, g, or t
aagaatacatgtganttgactagtattagattactaaccatttcccatctctatattaaacataaatcacagataccaagattcactttagatatgaggaaaatggttttaatggacacaaaggagtcagccacgttggaaccaacatagtttcataccacgttgaaaccatgtgtttgatatgcaaataacagcaaataattttttcactcttgtcaatgccaatgcattgaaaggcccagaaaatgagaaaaggataacaaacttttgataaaaaggtaagaatttctgtgtggatgttcctcagtttctgggaaaattttgctacaaaagagatttaaataatttaggaggcagtcttttgcatggtatttttggcttacctttgaatctagtggacctgtaatatgtaagaatgaagaatgtgcttagcaaactgaaatgagaagatttctatttcttaaatttctattcctgagattatataaaatttcacgcaaagagtaagcattagctttaaatacttcttccaaatgttcctagaattttgagacaaagattgttaaaaattaatgtatgtctttgttttaggcagaactggaaatattaagtagtgagagtactatagtttcccttttgcctacataaaagcattttaaaatta

SEQ ID NO: 537135 - DNA, 1163 bp, Homo sapiens
  misc_feature (15)..(15): n is a, c, g, or t
aagaatacatgtganttgactagtattagattactaaccatttcccatctctatattaaacataaatcacagataccaagattcactttagatatgaggaaaatggttttaatggacacaaaggagtcagccacgttggaaccaacatagtttcataccacgttgaaaccatgtgtttgatatgcaaataacagcaaataattttttcactcttgtcaatgccaatgcattgaaaggcccagaaaatgagaaaaggataacaaacttttgataaaaaggtaagaatttctgtgtggatgttcctcagtttctgggaaaattttgctacaaaagagatttaaataatttaggaggcagtcttttgcatggtatttttggcttacctttgaatctagtggacctgtaatatgtaagaatgaagaatgtgcttagcaaactgaaatgagaagatttctatttcttaaatttctattcctgagattatataaaatttcacgcaaagagtaagcattagctttaaatacttcttccaaatgttcctagaattttgagacaaagattgttaaaaattaatgtatgtctttgttttaggcagaactggaaatattaagtagtgagagtactatagtttcccttttgcctacataaaagcattttaaaattagttttatgatttctttgtaagctttatttaaattcaaagtctttttcataacacttaagagaaagagccctttgtacttcttagtatctcttatatagtcccaaatatagtctgtggtttattttaggaaaaacatcaactctgaatacctggaaaagtcaaaagaaaataaagttggtaaaatgaaaaatgtccaagtaagaaaaccggttacatttgcaagttatgtgaagtaaatttagaagttaaatttccattttgtaagagaaaaacatcttacttggcaaatcttttcttttggagctaattattctttgatttttaagtccacataagagaatgaactttgatatcagcttttctgattttttaacaaaggctacccttgtttattatgaaaaatattacttttatgattctattttgaatttttaaattttgaaataattccaaacttacaggaaaagttaaagtacaaagaacctttttccctgaacca

SEQ ID NO: 537136 - DNA, 915 bp, Homo sapiens
  misc_feature (490)..(490): n is a, c, g, or t
  misc_feature (768)..(768): n is a, c, g, or t
ggtacttgctctctgcttggccgtagtgggcggccgtcttcatgatggatctcgtgcactatggcgacgggcgggcagtgcggcccagcaagatcggacgccgagctttccggagaggatgatcgggcgcatgatacagcggctagtcgaccctcgacggagtgcgctacgcagtgcgtgtatacgatgacctgacactctgcgaacgcaattgaagtgtatgtacggatgtcggccatccgtctgcgcggagtcaccgtagtcccggccgctagctcggtcgtcgtcatcatcgggacgccccggggcctctcgcggctcccgtcggcgctcgggggccctttcgtggcatgactctctccgggtccgcgacaagctttgatcttccggatcagccagtggtcgcgtggtgaagggaactggcgcgccgcggagcactgcagcacgtaacgtgcgcaggacgcctggtggcgcaccgtcagcgtagctntggcatcgatgtgtcggagcagcatgcgacggcctcgtatcatgcctcggttcattgagtggtggctcgtggctttgcaccaggcctcgtatgccactcgctcttgtgattgaggtggggcacccgtgcgtcgtggaggatgcggcaaatacctgctgttgaagacgtgcgtgccagaccccacgtgagttgaggctcgcgcaagacacaggatacatcgagcagataccctggtggcgacagatggtcgtccttctgggcggaaaagcgcaggccanattgctgagcagccgtggacttccagtacaccaggcgcagcctcctctgtagaaccccatcccagcgcgtggacccatggacggcaggaattccacagaacgcatcccggagtatgaccaaatcccagaggagtatgtcataaccac

SEQ ID NO: 537137 - DNA, 481 bp, Homo sapiens
  misc_feature (326)..(326): n is a, c, g, or t
agaccacagcctgctttcttctagagtactttttggttatccatgcagggctcaggagctatacagatgggatagagggtgtgagtgctgggaagccccatccatggctcgctggagattagaggcctgttaatctgaagacaaaggaatgaagacgaaaacgtttctgaaaatgtgggtggagacacctgggcctttacagggtacgctccagagctgcttccaggcagggaccccggctgagagaagccagagccagagagtcgcaggcttgcttgctcttatcttccctctgctgggggggtcgaggggagatctggcccctntgctctgccctcctgatttcccgtctaagggatttaggagacttttgccttttcctaatctctccctttgcagaatttctgcgaagtcacaatcccatttccaggcaaaggtgcttggtcataaagataataaagatattcattcatgaaaaaaa

SEQ ID NO: 537138 - DNA, 311 bp, Homo sapiens
tgatgagttgctgtgggagccgacctggtgctgtgggccgttcggaaacacctgcgccggctgtaccgtatgcaggagaggcgcggaccgcaccacgtccgatgccatgctgccccccgacccaacccggctcagtccctgaaactggatgcccaaagtcccctctagggggaaccccagacccttagagagtcctgaccttactcgtacctggggtcccatatcagccccttcattccatgtgggggggggcggcaaacaagtatcaaaatattgggaaataaaaaaaagataggtctgagtcaaaaaac

SEQ ID NO: 537139 - DNA, 2170 bp, Homo sapiens
  misc_feature (1405)..(1405): n is a, c, g, or t
  misc_feature (1726)..(1726): n is a, c, g, or t
gagcggacggcaaggcacagacaggcagacttcgctcagcacaaacgacagaattttctgactaaccatacatggcaaaactgaactgtggctgaccttcgtgaggcgtctgcaacttcttcactcccatgacaggcaattcagcatagaattcgacgactgacccacctacacgacacgaacatactcacaggaactgggtaacccattacatcatgcgcaacttgcaagctgcacacagcacaacgctccctacactattcatgcatgctgcatgctcattcctacagacacaccggacgcctggccctgtgcgcctgacgctggacgaaacgaggcacacgcaccaccggaacacgctgaccgcacacacccaggaccacgcctgcgacacataactctccactcacacacaggaggatctctaacaaatcccatcagtggaacacccaaaccttgagccttgggctcatggcacaacctttgtcacaccataacatggcgtctatatcacgtaagttctttagcaagaacatacccattgggcaccctacagtccgtccaacgggcaccaattggcgcgcccattggctaacgatgcgcaacgcccaacaacgcgggctacttgctctattaaagcctctcgttaccttgttgaagatttccaacatggtcaacgtttgggcgtttcaacctcaatgggaaataacacccgttcacacatcgaacgatcgcattttggcgattccttaataggtctaataagtgtaaaactaacgtttcaagctcctcattttgtgaggagcaatactcacacaagctgccagttctggtgctattcaaccacacgttaatactcatcagggacaaaaggcgatcgccgcctaattatctcctctatatcgcatgcgctgggccacacctctgggcacaaccggcctgtggctatttataccgctacaaagacagcatgcggagcccttttaactacttccactcacgacattactgtttaccacatatatatcgtgtccgaatatatcccgacatttcattcaaacagtagtggcgaggagccctaaaactacacagcgatggcgtgcaacccatcatttaagggccacacacgttgtgactatcactgactgatcacgtaattacactaaaaagcttattgggctctcgacttagtggctcacagcaccagcgttgggcaagtcatgggtaccactaactattagggagtggatcagggaacccctatgattacccactcacaattttgacctaccgctataaattcataaggtaggggtcacattaggagcgcgggtatctgggcgagaacaagaaacccgaaatacaattatacaggggaggtatatcacccaacatgtcggatccntaccagcagatcatagggacagtatagtagaactatcgaccatacaccccagcgatgtcccaccgtcacaaagcatattgcgacacacgagatacttacgctgtaaaacagacccaactacaaatatataactgggctaccctgaatttcatcatgatatcgcctgtttatcctctacctcggaactagagtcagtgtggtgaccattttgggacaccagtcttagtggggctcaagatgctttgtggctactcctgcatcacacaagatcgcacgaccggagtactattggggatgccctacttgagggtcacgtgcatnacatgactaggtgaactccacacgtttttcacatacaaccactccctctcgttgtagataatgcagtcatcactgagcgctccttgctttactcaaaccaacaccgccactttaccaaccaagctataggtgcatattgggacaccaccattataagtttctcccggtgtgtacagcgaatcagcctacggtgcagtatctactacagcaagtagcgggaccgcaccgtacgaacatactggtgcttcccctcacataatagcagtcctcttaggtgagtcgatcgacagaccatcttggcgaacaccatagcaattgtggaggggaccaccgtattactacaacagcagaacactgagccgacgtttggcgtaggtgacccattgtactctccaccttctccccctaaatcccagtgaaaaatctcaagctcattttcccccc

SEQ ID NO: 537140 - DNA, 828 bp, Homo sapiens
gcatggtgcctggaaagtcccctggctcatgcttcctgctctgggaacagtgttgtcctctggtgtgccttccttgagaggggaccacctcccaggccttccatcctcagggtgaggccatcagtctgatacttttctcaggagggacttggatccaggagaagcatcaggaagtggagtcttgggataatgccaggcctgctcctggtatcctgaggtctctgggctggggcaggtgtgtgtgtggcagggagggaggctgtcctggcctcctctctcttttctttctgcctctatgggggtgggggtattgggggaacttggggcgatcgtgaggtactaagccccttcagaagagatgggggaccagtgtgggggcatactgcgatgatggccgattcctgcctcgtacacatgccaggaagatgtacccgacatcggtggacacagctgcactagttatactccacttactttgctctgagggggtgagaaaaaaggctttacctctttcatgacactggcaaagactaccagaacccgggcgtagagggatacccctgaggtcaaccaaagtcatgggcccccaagattacaaggacaaaaagggcctaccgagtaagaagcgccaaaaaggataggggaagcatggagcgaatggacaagccaggacccaaaagaaaccccgaaatcgcaacgacaccgacaaggacacaccgacgggacatgaagacctggtggccggagccggcacgaccagcatggaagcaagaccaggccaggagaaaagaagtggacagaagccacagtgacaaacaaacaacccgc

SEQ ID NO: 537141 - DNA, 112 bp, Homo sapiens
gtcaaaaaaatagtggaaatcgtcttattcatcatgaaattctcattgtctttgcgcaactattctttgtggatcacaagtcacatcacctagccataatgcacgtcgacgc

SEQ ID NO: 537142 - DNA, 183 bp, Homo sapiens
tacgtgtgtagaaaccctactagccgagttgtcatgatccagtcctccagccatgcatctgctcacatggtctcgaacaaaggatggatgccactctgatccttcgatctacccaggaatcctccgaggaggagcggaacataaagatccaaaactgcaagtccaacaagggccttggcaata

SEQ ID NO: 537143 - DNA, 294 bp, Homo sapiens
  misc_feature (69)..(69): n is a, c, g, or t
  misc_feature (80)..(80): n is a, c, g, or t
  misc_feature (217)..(217): n is a, c, g, or t
cccacacccgggatcttcctcctcaccctccttggcctctctcagtgaccctgtctacacacagatgtnctgtccatgtnagtggaaggaaggaaggatgaggtccactcacaggggtgaagctgtctcctgagggggcagcccacctccaggtcacaccgccccacccaacacagcctccagtccagctccaggtgggccgcacccagcccttcantcacttcaaatggcccaagacgcatggattccattggccagccggactggaacaacttctcccctttataagtatct

SEQ ID NO: 537144 - DNA, 95 bp, Homo sapiens
agcggggtgtggtgatggccgcggagccgggcggagctggcttgcggtcccggggccggctctccgcgccggagactatggccctggtggtgccc

SEQ ID NO: 537145 - DNA, 344 bp, Homo sapiens
  misc_feature (51)..(51): n is a, c, g, or t
  misc_feature (82)..(82): n is a, c, g, or t
  misc_feature (200)..(202): n is a, c, g, or t
  misc_feature (206)..(206): n is a, c, g, or t
  misc_feature (208)..(209): n is a, c, g, or t
  misc_feature (212)..(212): n is a, c, g, or t
  misc_feature (214)..(214): n is a, c, g, or t
  misc_feature (216)..(217): n is a, c, g, or t
  misc_feature (222)..(222): n is a, c, g, or t
  misc_feature (227)..(227): n is a, c, g, or t
  misc_feature (232)..(232): n is a, c, g, or t
  misc_feature (239)..(239): n is a, c, g, or t
  misc_feature (244)..(244): n is a, c, g, or t
  misc_feature (249)..(250): n is a, c, g, or t
  misc_feature (257)..(257): n is a, c, g, or t
  misc_feature (262)..(262): n is a, c, g, or t
  misc_feature (271)..(271): n is a, c, g, or t
  misc_feature (275)..(275): n is a, c, g, or t
  misc_feature (296)..(296): n is a, c, g, or t
  misc_feature (321)..(322): n is a, c, g, or t
tttttttttctttgccatccttgattgggaaatcattcaaccacccatctnttggtccatctgtccatccactatgtcagcnggtccagcccccagcgcctggtcacatgactgtctcccactcttcctgtagcagggcaggtggccgctcaggcccagaggcctcctcgtccaggcctgagcaggagccgttgaggaannnatcntnnttngnannttgcnatggnaggtngtttttnttttntattnnttttttnttttnttttttttntttnctttttttttttcattttttnattttcatttttttatttttttttnnttttttttttttttgcagtggg

SEQ ID NO: 537146 - DNA, 301 bp, Homo sapiens
  misc_feature (152)..(152): n is a, c, g, or t
ctaccacgttatgaatcctcctcctccttgactgagcaggtatgggttagagagcgagggagtgagtgaatgagtgggctaaagagggccgggtgcggtggctcacgcctgtaatcccagcactttgggaggccgaggagggcagatgatcntgaggtcagcagttctgggagcagcctggtcaacatggtgaaacccttgcctctactaaaaatacaaaaacaaaattagccaggcgtggtggcgggcgcctgtactcccagctactcagaaggctgaggcgggagaatggtgagaacct

SEQ ID NO: 537147 - DNA, 180 bp, Homo sapiens
caaagtcatcagctcggcccgaatgtacggtcacgtagggtattagtacttctagtggggtcacggtaatgtcccctattgtcatatctgatagcataaggtggggggggggatatttttctttttagtctacctagtcaatctataatctttttttttttttggagttttcgggtttct

SEQ ID NO: 537148 - DNA, 161 bp, Homo sapiens
catgcagcaagctagacagcgcatgtgccaccccgaggtgaaattccatccaccgacaccttgggtgatatggaacatttacatacgacgagttagtggatgtataggcgacagatagtcagtgtaggctaacaggtgcgaattagtactaggtatgccga

SEQ ID NO: 537149 - DNA, 503 bp, Homo sapiens
gcgatgttcgattgcctgagttttccgttccagccctcataatcccaagacctgtggcttaacaaaggcggctcaaaaatggcgcggaaacttcccctaattgtgagagccgtcaaaggcatgcttggggtacgtttgttacagattgcccttctgctataaagtctgggccctcctttttcccgattaacacaggcgatgctaagaccccatttgttgcctagcaatgaaacgtttcggatatgggaagtccccgggtttataagaaaacgctgagtccgttctctgtgttaaagttcggctccaaaggttccgtgcgcacctcgctgcgacctttggcgttttcgagaacggtgaataagtcacgtaggtgcgctctccagaggtgaagtgtgttcgctcgaaacggttcggggggcttcttcaatagggactggtactctgtctctgtctgtgaaaaacgcgcacagctggagacaccctgggacagacaaattgtgatt

SEQ ID NO: 537150 - DNA, 271 bp, Homo sapiens
cccccgggggaggggaaaattttcccccccttttttttgggaaaaaccccccccgagtttaaaagggacactttgttgttttctcttttgggcccccgggccttaaagggtcacgcccccaaaaaccttttgggggggggtttctttccacagtttttttttaaattcccctttttttgggggggggggtttttaaccccccttcccgggggaaatttaaaaaggggggttttttcccggggggaaaaaaaaatttgggttgcccttttta

SEQ ID NO: 537151 - DNA, 503 bp, Homo sapiens
  misc_feature (158)..(158): n is a, c, g, or t
  misc_feature (255)..(255): n is a, c, g, or t
  misc_feature (308)..(308): n is a, c, g, or t
  misc_feature (318)..(319): n is a, c, g, or t
  misc_feature (321)..(321): n is a, c, g, or t
  misc_feature (416)..(416): n is a, c, g, or t
  misc_feature (429)..(429): n is a, c, g, or t
acacgatcttcctaagagagtaccaagacccgacaggaccaagtgcatcctataacacccaccctacctgaatgtccagcgggaaaaatgggacccatctcccagatacgtgggaggccaagagcatttcgctcacttgctgatcctcagggacaccnaagacctacatgcttgcttttgacgtgaacgatgagaagaactgggggctgtctgtctatgctgacaagccagagacgaccaaggagcaactggaanagttctacgaactctcgacctttcgcattcccaagtcagattcctgtaacccnattgggaaanngnataattgtgcgccactggagaagcagcacgagaaggagaggaaacaggaggaggggaatcctagcaggacacagccttggatcaggacagagacnttgggccatcctnccctccaacccgacatgtgtacctcagcttttccctcacttgcatcaataaagcttctgtgttttgaacagcta

SEQ ID NO: 537152 - DNA, 994 bp, Homo sapiens
  misc_feature (604)..(604): n is a, c, g, or t
tctataggatccccggttctcgatcaaacgcctcggtacacgcaacttgctcctccagcttagacatcaccgtactgctcaaaccccgccgtcgtgctgccgcccgcgcccaggatatttgcgccgcggcgacaacccccacgtgcaggtccggcacttgcacctgccgattaatgttcagctcaagaatgtctgcaaagggtatcaaccgacgaaacgcggcatcagacgggtaccagcgatccatcaggatgatgctgtcaggtggctgcgcggccagtacgttttgagtaatccagctgcggctgtcggcaaagcgctcacacacctcaagttccagatcccggctgggatctcgggcgaacgtgttaaccagagccatcgtttgcgctcgacagggatcgctcttgcgcgcgcacagtcgcacgacctttatgttgtcggccctcaacgctgtcgtaacggcctccaacagcgtggttttaccggtgcctttggggccatccatcgaaataaacagcgcacgagtcatacgggcgctgcatcatcgttcaggttgtgcagttccatggagcctcggggtctgtgcggttgggcgagttgncctccattatgggcaaccctattgcccaatgcgaggctggactggccgacgtgccctccccgcgtcgacagtcagtcattcagcatccggctttccggcacaccagcctcatacctcaacgcccatggcgcaatcaaccgctgcggggtctggcaggctttgcgtttaaacacgaagttgcggcatttctcggcaaactgctggcggttttccaccatgtcgagtcgcatctgagccagctcctgctcacgacagcgttcaacttgctgagtatccagcatggcttttcgcgtgcgtgcgtgaaggtacttatcatcggtcgacgacacggtcagcctcttgcaaaagccacaggccgaatgtttgatcgacgctacggggatcactcta

SEQ ID NO: 537153 - DNA, 117 bp, Homo sapiens
aattgagctcggccctagtttgtgtgatggagtgatgaggatagttgtgccagcaggcgcataaggcaagttgggtatgccatttcctttgaagtcactccttcacccaaagctagt

SEQ ID NO: 537154 - DNA, 996 bp, Homo sapiens
gaagctgctccgcagaaaatgtcatgtcagtgtcggtgcatgatcagaggcaccgaggatgctggagacaacatgtagctgtaacggcctgggtgagtacggctcggcacagttggccgccttgtcggtgagacgctagcatgcgaggcttgggaaaggagctgtctgggctcggtagccgagacccctgactcgctcggcgaagctcgcgtgttcgtactaccccgccccaggtgcagcagttcatcaactctccaggcgagagaacagcaaggatcttggataggagttcccatgggactaatgatgttcaagtcgcatcacaaagttgtcattgtcgatcgaaatgccattcacctatctgggaaaatttccattgttggtaccatagcatgacgttagttcatcttgcattttggtgcatttcatctaggggactaaactttgtcataaagaatgatccgcagcgcacatctctgcataaacagcttcttcttatggatactaagaagaatgtcctactgccagacctgagctacaacaggtttctgcctattgcacatggggtgccattgcagttctgggcaccgaggatggcgcgtgtgctgtagagaaaggcgcaatgctgcgggtagatgaagcaccgggtgaaattccccaggttagtggctgcattaacaaaccgatggatgtggccaccctctatgaaacttgaatgcgacgagatgcactttgcccgtgctgaaccagtggcagccagtgcacgagcgaataccttgcttgaagagaagctaccgaatggatcgtgcgggaggaaattacactgaggcggtgagacgatgggagaacgtccgtgtctctagcccggtgggtcctctgccaaggcagctaaatgctcctgtgagggaagggactgtcggtgaattcccctccttcctttcacccttgaaaatataaagcccgccaatgaagaataaaatgactccagaatgctaa

SEQ ID NO: 537155 - DNA, 231 bp, Homo sapiens
gcccacctcctacagccagccagcctgcctctgtgaatatccctgggaaggtcttccctctagtacaccttataccatgcctccagagccaaccctttcccagaacccaatctcttattatgaatgtctcgaatgtcccaagtttgcaatgcccaggttcaaaccggttataccatgaatgcgtatcaagacatgtcgccagctcagatgacggctcccctcccagcgtcg

SEQ ID NO: 537156 - DNA, 310 bp, Homo sapiens
caaagcttagtgtgacggtccacgtgtgcactagatacttctcgagctcgtacattacgcggtcgtgacttacgacaatactcgtggcgccagctgcaggcggcgccatatgcatcctaggcctattaatattccggagtatacgtagccggctaacgttaacaaccggtacctctagaactatagctagcatgcgcaaatttaaagcgctgatatcgatcgcgcgcagatctgtcatgatgatcattgcaattggatccatatatagggcccgggttataattacctcaggtcgacgtcccatggccat

SEQ ID NO: 537157 - DNA, 350 bp, Homo sapiens
ggaccatccagctcgtaggcccagaccagagcccaaatgcacacaggtgcggcctctgccatatcacagccctctcctggagccaaatgctgtccttctttgccatagccaatcctcctcagagcagccatggcctacaggcctcagggactacgggtagtctctccgatcgcagaaatcccaaagccagagttgtccctgaaccagctgtgcgcccccatacgccccaggtagggcaatgcatacccccaattccgatacgaacaactcatacacctcctataaaaaaaacttcctaccaatcaccctaagcattacttatattatatgtctccatacgccctggtaag

SEQ ID NO: 537158 - DNA, 565 bp, Homo sapiens
aggagatacgtcatggattgttgataatgacagcatccagtagtgagtagaagaaaagaaatgatagatgctggtcgttattgcacgtcaaatgggcagtatagacgttggcgtaaacagagtctcagatcccactgagtgctatgcaaaaggggcatatttccctgttataacacaggtactatttatggcctcacaaagcctgcagtcgctacacagtgaaatcccagctatgagacacatgcaaataatcctacaattagcaaatatgctacagaaaatatcattctctcttttatgtcgagcctcacatcaccaatagtactcccatagtgcaagggggagactggcccagattctttacactggaagcaagtgattctgcatacagtgcagatacttacctcaatacaggttgatagctcattaacacagcttagatttcatgaaaaagtctgcttcctggacggcgcggtggatcatgcctgtaatctcagcactttgggaggccgaggtggatagatcacgaggtcaagagatcgagaccatcctggccaacatggta

SEQ ID NO: 537159 - DNA, 692 bp, Homo sapiens
aacaaacaatgccatcactggaatttcccaccgcttgtgagccgtgtcgtatgacctagtaaacttgtaccaattcaaaaaaaaaaaaaaaaaaaaaaaaaaaaaaaaaaaaaaaaaacaaaaaaaaaaaaaaaaaaaaacaaaaacaaaacaaaaacaaaaaaaaaaaaaaaaaaaaaaaaaaaaaaaaagacagagaacgagcgaacgcagcagcaacgatgatatattattgatgactaagaggaacaaccagctaccaccgggcagcgcgatcaacggagagggcggcgccacgggaagacgaggggtcagtacgaaaacgagcggggcgagaggacagagagcgcggccgctggaacaagaaagaacgaacgagagagacgagagagaacgaagacggagcagaccagggagagatccactacaccagcagaaaaagaaaagacgaaatgtaatcatagtcagtgggtgcaggaaggtagacgcgagagatagaaagagagagagattgagagaaataacgagtcgatagtagtgatttataggtagttaaggcagggtacgatggtggaaggagggatatagcaaatagaataaaaagaaaaaatgagagatatatatatagatcgagaagagatgcataaataatcaggagatcaggccatcgtaactgtatcataaagagaggt

SEQ ID NO: 537160 - DNA, 221 bp, Homo sapiens
ccaacgcaaagccccctacgaacacacaccaaggactcaaccccagaccacccatgcctcaggatactcctcaatagccatcgctgtagtatatcgcaaagacaatcatcattccccctaaataaattaaaaaaaactattaaacccatataacctcccccaaaattcagaataataacacacccgagcacaccgctaacaatcaatactaaacccccata

SEQ ID NO: 537161 - DNA, 269 bp, Homo sapiens
caggaattctccctggcattgtttcccccccctggggcctgcaggccccccagggaccccgggggaggacgtgaagcctcccgaacccgcccaaaaggaaggagccagctccccgccccctcctcgcaggggtcatgattttttacaaattatgttttaattcccagggtttctgtttcaaggaaggatgaataagttttattgaaaatgggggacctttttttaaaatgatttttacccttatgaggggcggcccagattttaagtta

SEQ ID NO: 537162 - DNA, 893 bp, Homo sapiens
gtgttgagccagcgcagctttacatcaaaacagaagctattgtgaagttcaaaatccagtccacaggaatctggggtatggggttgcaactgcagaaggttaacttgaatcagattcctcttggacgagatatgcagagtcctggtgatgagaatagtgatggagaccctattacgcagcaagaagtgagagagaaaaatgaggctgccagcaaaaagtcttccgcgaggaaggagatgtggtgggtattagttatgacgcatgtcgaattaaagtgtatacttgaatggaaaaaacatgctattgtccagacatcaggtatacgagggacaggtatccagtggtgtatgtgatgagagggcaattgggtgatgccagtagcagtgagtttccatcagtagcgcgctccacgcgggtggtggaaaatgtattatttgaacaggaaatcgtctgaatgtattgggtttgtaagaacttgtatgtctgcggtgtgaaaaaatgttcatgatttaataaaatttacctggctatgagatgaaagtatattcttaagaaatatgttgggtggatgctgtttaaggaagcaagtattcagtatagacaccctgaaagtggtgattagaatgacttatgtttgtgaatgaaaataagcattgggagttattaaatcttatttaattaatagaatctgggtccattaccagtttaactgaataatgtgcgtatttatttaagggaagtctttctacatacgatttggtgacacatgtcaaaggggggggtttggccgcaaggtaaccgcaaattggggcacggggaaaaacggagggggtatataaaacaaagagagaatacgggcagagcgctatataagaaaacgatgcgggagaggg

SEQ ID NO: 537163 - DNA, 113 bp, Homo sapiens
  misc_feature (74)..(74): n is a, c, g, or t
  misc_feature (99)..(99): n is a, c, g, or t
ctctccatctgcactgatagttctcgtacgagtcgtagtgggtctgttgtgttgtagtccacaatcacaccgtnggtcgttgtacaagtgttcggaccncttgaatcttctca

SEQ ID NO: 537164 - DNA, 581 bp, Homo sapiens
ctaactcatgcccccatgtctaacaacatggctttctcagcaaaaaaaaaaaaaaaaaaaaaaaaaaaaacggggggggcgggccggggccctggaaaagtttttaaaacacattcggggtgggggagcgggggccccaagtatgaggtatacgggcgaactggggccaaaaggcggtgttcccaagaggaaaacccggggccaatggacaaagagggccggaggactttctttcacaccaatattaaaaaaagcggccgggggggggaccacgcgcgcgaggcgttcgatgggacaacaaaatcccgagaaggggggagatacgaggggaagggacaaatagcgggggaactctattatacacggggagagagtcacaaaagagcgagaagcgcgcgaagaatatatacaaaaagtataaagacccccgagaccggcggggggaacatgacgtatcggaaaaaaggcacgaaccagcaagaaaacatacagcaaccacaagaacagcacaacaacaacgaagaaccaacaaataccaacaaatagcagaacacgtcaagcaagaacggcgagagcagcac

SEQ ID NO: 537165 - DNA, 597 bp, Homo sapiens
  misc_feature (573)..(573): n is a, c, g, or t
ttttgtctctgccaggttttggtagcaggatgatgctggcctcataaaatgagttagggaggattccctgtttttctattgattggaatagtctcagaaggaatggtaccagctcctccttgtacctctggtagaattcggctgtgaatgcatctggtcctcgacttgttttggttggtaagctattaattattgcctcaatttcagagcctgctattggtctattcagagattcaacttcttcctggtttggtcttgggagggtgtatgtgtcgaggaatttgtccgtttcttctagattttctagttaatctgcgtagaggtgtttatagtattctctgatggcagcttgtatttctgtgggattggtggtgatatcccctttatcattgtttattgtgtctatttgattcttctctcttttcttcattagtcttgctagcggtctatcaattttgttgatcttttcaaaacaccagctcctggattcacagattatttgcagggttcttctgcgtctctatctacttcagatctgctctgatcttaaataactaagatcagaaaaatggntctttacacaggggttccccactc

SEQ ID NO: 537166 - DNA, 877 bp, Homo sapiens
tgggtcaagtacactcgtgtgcacgtggctacatccgctgccccttggggccttacgggcattcgagcccttgcagggctcaacacatccgtctccagccctttggcaagccccggaaccacgatgtcacgaaggagcccttccaactccagagtcatggaatcgctcgggaaaggttctgtcgacatgggcatcaaggaaccagcgtgacttgccctgtcagtgtcctacgtgacggtcagcgtgctgctactcatggctccgcactgaccgagaccgtgcgacctcatgtgcactgtgcacaggcaaagcagtgcatccggtactgctggtccctcaaaggcccagtcaccaatcgccgccaatccttgatggcagccacgtcagcatgctgagctcagacttcaggcccagcctgccgctgccccacttctacaagcacctgctgggcgccgagcactggggacgagccgcagccatcggcgggcctcactctgcgccatgggcctccaccagcagggctctggagcccaagctacctaggaccgcaacggagcatgctgcacggaccgtcctgtgcagcaaccattggacgaacgagcgtgctcggcggccaggaccagtctgcgcgtccgtgtgacggaagctggagcacgatggtgcgcaacctgcagcaagatcaatcagggacctgtctcgacttctccacgcgcttcataacgcggccaggccaagtgaggcacacggagaccccggcccgaggcagacccaggcctgagcctccatgcctcaccagcaacaagggcccacgggtccccccccaccagccaggcctgactctcctcagttctgtgtcgtgttcgggtttttcctctgg

SEQ ID NO: 537167 - DNA, 515 bp, Homo sapiens
atatactatacgtagtgataataaaatctctgcatgttcagcatcctgtctctcgcgtctgtctctgtctccttcttgtctgtttttccaccaagccaggattaggtgagactgaatactaccccacattagtagctgaacgggggagggaggagctcttaaaactgaagcatcccatctgctgtatacgtagaagggggaggaggaggaaacaagatcctaacagtacttccagccttagtcccaattttgtagcgaatcagaattctagctaatggcatatgtgtcgcctttgttgagtagtttaaagacatctaaggaatatactctgaatttcacaatcaacgttaaattcattaagcaatagtaaaagtgatgataaacccgccaacccccagtataatatctccatctacatagtaattgcttcaatggaagaattttatgttttagtattacacacccgaatcagattttagatttctattttagctgttttatacttgatatactcc

SEQ ID NO: 537168 - DNA, 339 bp, Homo sapiens
  misc_feature (29)..(29): n is a, c, g, or t
  misc_feature (47)..(47): n is a, c, g, or t
  misc_feature (82)..(82): n is a, c, g, or t
  misc_feature (101)..(101): n is a, c, g, or t
  misc_feature (129)..(129): n is a, c, g, or t
  misc_feature (229)..(229): n is a, c, g, or t
taggggattcccagggagcccaagggggnttattagatggcccttantccaacctttatgagaacagccttatcccagccgntgagcttttgccccccagntatgtgggttgtttttaggacaccaggntgcagatgatcagggatccaatatgatttagagaaccagtgcagattcaagatttatggaacagggatggggaggcctttttcaggagcaggggcattgntgattttgtttgcccaatccatcctgttcaggaaaccacaaccttgcagtatttttaaatatgtatagtttttttttgtatctatatatatatatacacatatgtatgta

SEQ ID NO: 537169 - DNA, 170 bp, Homo sapiens
  misc_feature (29)..(29): n is a, c, g, or t
  misc_feature (35)..(35): n is a, c, g, or t
  misc_feature (71)..(71): n is a, c, g, or t
  misc_feature (147)..(147): n is a, c, g, or t
  misc_feature (149)..(149): n is a, c, g, or t
accctgcctgtacttaaaatttttaaaancattanctgggcatggtggctggtacctgtagtcccaggctnacgtaggaggatggctcgggcctggggggtggaggttgcggtgagccgtgatagtgccactgcactgaagcctgancnacagagcgagaccctgtctcc

SEQ ID NO: 537170 - DNA, 470 bp, Homo sapiens
gggaaggcaagggttaaaggggtccacaagccccaaaagaaaaagaatcggacggtacccaactttcggggggccaaggcaatgggaattcggaaaccagccaaatattcttggaagaacgcttccaagaaaaacaagcttgaccactatgctattattaaggttccggtgaccacttagttttgccttgagaagattggagaccaccacccacttggggtcattggggatggttaaggcaacaagcaccaaattaaacaagctgggaaaaagcctgattacattgatggggccaaagtcaacaaccttatttcgccctgatgaaaaaaaaaggcatattgtcgactggcttctggatacatgccttggatgttgccaccaaaatgggatcatttaactgaatcagttccctaattccgaaataaaagcccgcttgggcccagtcaattttagactggacaaagcttatg

SEQ ID NO: 537171 - DNA, 1676 bp, Homo sapiens
cttcccccaggtgaatgtaacgggttgcctgctacaatgaaaaattattcctgtttgacgcagggggaagctacactcacaccccaccccgaagagctgtggagaccaaaccaagactacgctacacacagaacgccgagaagataaaccaagctttacacgagcaggatggggatgggaaaactaaaggggccccctgtgaccgaggagcagggtccccagggggcagctcccacggagcgggcttgaacagggaccacccctgcagagccagccagggcggagagccataccctggccccagcgcgccccgacacacatgcttttctccatgacacgaggccagtccccaggagcagccccaggagcacaacctgagatttctaagcttgcaggttacaaaaaacaaaaaaaacagagaagctgcctgcgtaaaaagtgccacccacggaggcaggacacaggcagcgtgtggccattcagcaggccaggtcttcagggtgaggctgctggcgagggcaggggagagggggcattctggttaaaagcaagaaattccaaatactcctccctcgggatcaacatccccccaaataagggcgcccagggatcttgcctggggaaagtggggtgcagaaggcatgacccacgccacagcgggctctcagcacccttcccacgtcccatgtcacaggctctttgagctgctggctttgttctctcaagtcaggtctgagggaacccatcggcttctgtaataatcgtattgcctatatacttgaattaaaaatatatggtggctcaaatgtgcccgcgtgtatggcagacggtgcggggtggaggccgtcacgcccatacacgtgtgcacacacagcggggggctgtgtccacggactgcgcacacagtatatattaacatatatattgctcaagtatatatgctatttacagtatatatctctatcaacataaaacacaggtatttataggtgtgtacaatagatacgtcctaggaagtctaggggacacacgactctggggtcacggggccgacacacttgcacggcgggaaggaaaggcagagaagtgacaccgtcagggggaaatgacagaaaggaaaatcaaggccttgcaaggtcagaaaggggactcagggcttccaccacagccctgccccacttggccacctcccttttgggaccagcaatgtacgagttttgttctggagttttgtgcaaaacaaattaacttaaaaaaaaaaagttggtttctaattaatgtggtgggccttcaacacccacaaggattttaaagaacagcttctccttctggtgggcttccagggctcagagggtcccactcagagaagcagggaacactttgtcaggactagaaaatatcccttctcctctgaccacagaaacagcacaactcggctgggtgtggtggctcacgcctgtaatcccggcactttgggaggccgaggcaggcggatcacttaactcaggagttcaagaccagcctgagcaatgttacgaaatcccgtctctattaaaaaaatacaataaccagccagacgtggtggtgcgtgcctgcaatcccagctacttgggaggccgaggcaggagaatcacttgaacctgggaggaggagggtgtagtgagccaagatcgtgc

SEQ ID NO: 537172 - DNA, 156 bp, Homo sapiens
tgctggtagagggtgactgtaatcctaacagttgggaggcatgaggcaggagaatccttgcacacgggaagtggaggttgcagtgagctgagatcgcatcactgcactccagcccaggcaagacttcatctcacaaaacaaacaaaaaaaacagag

SEQ ID NO: 537173 - DNA, 908 bp, Homo sapiens
  misc_feature (8)..(8): n is a, c, g, or t
  misc_feature (144)..(144): n is a, c, g, or t
  misc_feature (146)..(146): n is a, c, g, or t
  misc_feature (156)..(156): n is a, c, g, or t
  misc_feature (211)..(211): n is a, c, g, or t
  misc_feature (216)..(216): n is a, c, g, or t
  misc_feature (258)..(258): n is a, c, g, or t
  misc_feature (276)..(276): n is a, c, g, or t
  misc_feature (453)..(453): n is a, c, g, or t
  misc_feature (467)..(467): n is a, c, g, or t
  misc_feature (775)..(775): n is a, c, g, or t
ggcccccnagcggcttctcccggcggccctggggactgcccccccccccctcccccgcctcccccgggcggtgctcccgcccgccgcctgccggggtgggcttcccctcgcccctcccctcttgccgtggctttttcctttggngngggggggggngggggaaacagttttgtgctttgtcgcccctccctttttcagccttcgcgggtgnggggngggggtgggggggttcgtcgttttgccaaaatttcctttgtncggtttttcccgcttggntctgtggcggcggggtgcggggggcttgggccccttccctcccccctccccgcccggggtccaggccgccttgggcgtgcggtcccggcggggggggggtgtcccctccctgcccccttgccccctgggtggtcccgggggcctcccccgcgcccccgtgcccctcccttgggccgngaggggggccgggntttctgccccccccccccccgcttcttggggccggctctgccgatcggggctgggggcttggctctcctggccccctgcccacccccatcaagctcagttattgcataaaaataagggacccccagcacctggggtgggggtggtgagtgggaaggggccgagatatggctataggggcagcaatctccccaccacttcttggggtgcaggagaagtcccctcctttccggtgcccaccatgtcacgcgtcctcagtgttggaactaggggctcccgccctgcggaagaaaaagtgtctttgtgcccncagtgcggaaaagaggggagacgagatgtgtcaggtcctgggggtggggagtcacttcctgcgcccgctggccctgcgatctccgccttccctcttagggttgccctcctctgtggatgaagtagtgggttgt

SEQ ID NO: 537174 - DNA, 2958 bp, Homo sapiens
  misc_feature (167)..(167): n is a, c, g, or t
  misc_feature (214)..(214): n is a, c, g, or t
  misc_feature (219)..(219): n is a, c, g, or t
  misc_feature (906)..(906): n is a, c, g, or t
  misc_feature (911)..(911): n is a, c, g, or t
  misc_feature (917)..(921): n is a, c, g, or t
  misc_feature (998)..(998): n is a, c, g, or t
  misc_feature (1012)..(1012): n is a, c, g, or t
  misc_feature (1032)..(1032): n is a, c, g, or t
  misc_feature (1042)..(1042): n is a, c, g, or t
  misc_feature (1047)..(1047): n is a, c, g, or t
ctggaaaatgtggccaggaggagggggccagtgggaggtggcctgtgttcacctttgaagatcaccaaatagatgctgtgggctttaacaggggcctggcccttccgtgtcttcccagtcttctctcctgacctccagggcatcctctgtcacctcagaggggcaanccctccagaccaagcctcctcctgctgaacaaatgtcaccctggctncgctncggaggccacactggaagcctctgatcccccagctccttcctttcccaccagcagcctggtgcctggaggtgagaggaggtgagaatgccagtggtttggagtgaggctttgggtccccgcctctgaatcttggggaggggaagctaccagggtcaggcctgcaagcctctccagctcagatgcatgcctcgggctgaggacggtggtgtgggcagtgccccttgaaggagggcggtcctggagatgcccatggaggaaggaggtgcagagtcagcaatgcccagatctttgctgggttaggacgacgggctgagggaggaaggggtgtcttgggaaccaggggagccccacgacgaggcagaacttatcagtggcagggaggggtggtcactgctctgttcctccccatccttcagctcccactggtactctgagtgcagcaaggggagagggtggggttgagactatctgagcttttcttaatggagaaccacacaggggccaagacacacactccaggagctcaagtggcagccccagggtcacctgctcacccctagaaattccatgagccgggcacggtggctcatgcctgtaatcccagcacttcgggaggccaaggtgggtggatcacttgaggtcaggagttcaagaccagcgtggccaacatggtgaaaccccgtctntaccnaaaatnnnnnaattagccgcgtgtggtggtgagtgcctgtaatctcacctacttgggaggccaatgtaggagactcgcttgaacccnggaagtggaggttnctgcagtgagctgagatcangccacagcantccancctgggcgacagagcaagatccgtttcaaaaaaaaaaaaaaaaaaaattccacatcatagagacctcttcctcccccgccaggcacctgccccatccgccagcgccaagacaacaggcccactcctctgattacctccgggggatggacggcaaacaggtaaggagttccatgcaactgcggatggagcccctctgagaaacacatgcccctccaagtggggtctggggcctggagagaccctcccacccagcagaccaggagatagctgggggacaagggcagacggcccctgcctgggaaaaaccacactcacaccccaccccgaagagctgtggagaccaaaccaagactacgctacacacagaacgccgagaagataaaccaagctttacacgagcaggatggggatgggaaaactaaaggggccccctgtgaccgaggagcagggtccccagggggcagctcccacggagcgggcttgaacagggaccacccctgcagagccagccagggcggagagccataccctggccccagcgcgccccgacacacatgcttttctccatgacacgaggccagtccccaggagcagccccaggagcacaacctgagatttctaagcttgcaggttacaaaaaacaaaaaaaacagagaagctgcctgcgtaaaaagtgccacccacggaggcaggacacaggcagcgtgtggccattcagcaggccaggtcttcagggtgaggctgctggcgagggcaggggagagggggcattctggttaaaagcaagaaattccaaatactcctccctcgggatcaacatccccccaaataagggcgcccagggatcttgcctggggaaagtggggtgcagaaggcatgacccacgccacagcgggctctcagcacccttcccacgtcccatgtcacaggctctttgagctgctggctttgttctctcaagtcaggtctgagggaacccatcggcttctgtaataatcgtattgcctatatacttgaattaaaaatatatggtggctcaaatgtgcccgcgtgtatggcagacggtgcggggtggaggccgtcacgcccatacacgtgtgcacacacagcggggggctgtgtccacggactgcgcacacagtatatattaacatatatattgctcaagtatatatgctatttacagtatatatctctatcaacataaaacacaggtatttataggtgtgtacaatagatacgtcctaggaagtctaggggacacacgactctggggtcacggggccgacacacttgcacggcgggaaggaaaggcagagaagtgacaccgtcagggggaaatgacagaaaggaaaatcaaggccttgcaaggtcagaaaggggactcagggcttccaccacagccctgccccacttggccacctcccttttgggaccagcaatgtacgagttttgttctggagttttgtgcaaaacaaattaacttaaaaaaaaaaagttggtttctaattaatgtggtgggccttcaacacccacaaggattttaaagaacagcttctccttctggtgggcttccagggctcagagggtcccactcagagaagcagggaacactttgtcaggactagaaaatatcccttctcctctgaccacagaaacagcacaactcggctgggtgtggtggctcacgcctgtaatcccggcactttgggaggccgaggcaggcggatcacttaactcaggagttcaagaccagcctgagcaatgttacgaaatcccgtctctattaaaaaaatacaataaccagccagacgtggtggtgcgtgcctgcaatcccagctacttgggaggccgaggcaggagaatcacttgaacctgggaggaggagggtgtagtgagccaagatcgtgc

SEQ ID NO: 537175 - DNA, 117 bp, Homo sapiens
tgctgtagctctgcagtgggaattactttatggagaagatgcgagaaaaaggaatcaaactgctgtaggccagaagttggtgcagtacttacgagcaatgtgaggactgtagatgga

SEQ ID NO: 537176 - DNA, 2241 bp, Homo sapiens
tctgctacttgaggaccccggcactgctcggatcacactgtagctctatccccagctccttcctttcccaccagcgctgtgctggggtgagaggaggtgagaatgccagtggtttggagtgaggctttgggtccccgcctctgaatcttggggaggggaagctaccagggtcaggcctgcaagcctctccagctcagatgcatgcctcgggctgaggacggtggtgtgggcagtgccccttgaaggagggcggtcctggagatgcccatggaggaaggaggtgcagagtcagcaatgcccagatctttgctgggttaggacgacgggctgagggaggaaggggtgtcttgggaaccaggggagccccacgacgaggcagaacttatcagtggccctcttcctcccccgccaggcacctgccccatccgccagcgccaagacaacaggcccactcctctgattacctccgggggatggacggcaaacaggtaaggagttccatgcaactgcggatggagcccctctgagaaacacatgcccctccaagtggggtctggggcctggagagaccctcccacccagcagaccaggagatagctgggggacaagggcagacggcccctgcctgggaaaaaccacactcacaccccaccccgaagagctgtggagaccaaaccaagactacgctacacacagaacgccgagaagataaaccaagctttacacgagcaggatggggatgggaaaactaaaggggccccctgtgaccgaggagcagggtccccagggggcagctcccacggagcgggcttgaacagggaccacccctgcagagccagccagggcggagagccataccctggccccagcgcgccccgacacacatgcttttctccatgacacgaggccagtccccaggagcagccccaggagcacaacctgagatttctaagcttgcaggttacaaaaaacaaaaaaaacagagaagctgcctgcgtaaaaagtgccacccacggaggcaggacacaggcagcgtgtggccattcagcaggccaggtcttcagggtgaggctgctggcgagggcaggggagagggggcattctggttaaaagcaagaaattccaaatactcctccctcgggatcaacatccccccaaataagggcgcccagggatcttgcctggggaaagtggggtgcagaaggcatgacccacgccacagcgggctctcagcacccttcccacgtcccatgtcacaggctctttgagctgctggctttgttctctcaagtcaggtctgagggaacccatcggcttctgtaataatcgtattgcctatatacttgaattaaaaatatatggtggctcaaatgtgcccgcgtgtatggcagacggtgcggggtggaggccgtcacgcccatacacgtgtgcacacacagcggggggctgtgtccacggactgcgcacacagtatatattaacatatatattgctcaagtatatatgctatttacagtatatatctctatcaacataaaacacaggtatttataggtgtgtacaatagatacgtcctaggaagtctaggggacacacgactctggggtcacggggccgacacacttgcacggcgggaaggaaaggcagagaagtgacaccgtcagggggaaatgacagaaaggaaaatcaaggccttgcaaggtcagaaaggggactcagggcttccaccacagccctgccccacttggccacctcccttttgggaccagcaatgtacgagttttgttctggagttttgtgcaaaacaaattaacttaaaaaaaaaaagttggtttctaattaatgtggtgggccttcaacacccacaaggattttaaagaacagcttctccttctggtgggcttccagggctcagagggtcccactcagagaagcagggaacactttgtcaggactagaaaatatcccttctcctctgaccacagaaacagcacaactcggctgggtgtggtggctcacgcctgtaatcccggcactttgggaggccgaggcaggcggatcacttaactcaggagttcaagaccagcctgagcaatgttacgaaatcccgtctctattaaaaaaatacaataaccagccagacgtggtggtgcgtgcctgcaatcccagctacttgggaggccgaggcaggagaatcacttgaacctgggaggaggagggtgtagtgagccaagatcgtgc

SEQ ID NO: 537177 - DNA, 259 bp, Homo sapiens
  misc_feature (60)..(60): n is a, c, g, or t
aaaattttatttcatgttgtttgtccccctttgaataagcagtggcatgcccaaaaagantggtagaaggaaaggaattttttggcccaatccttcaaaccagggacccctttttgaggaactgagagttggctgttttttatggggactacataaaaaatatttccaaaggttttgttatgcagtgaagacattcagattatttgtaagaatttccccaacccccttgggtattgaaagggttaaccattaacaggga

SEQ ID NO: 537178 - DNA, 2114 bp, Homo sapiens
  misc_feature (167)..(167): n is a, c, g, or t
  misc_feature (214)..(214): n is a, c, g, or t
  misc_feature (219)..(219): n is a, c, g, or t
ctggaaaatgtggccaggaggagggggccagtgggaggtggcctgtgttcacctttgaagatcaccaaatagatgctgtgggctttaacaggggcctggcccttccgtgtcttcccagtcttctctcctgacctccagggcatcctctgtcacctcagaggggcaanccctccagaccaagcctcctcctgctgaacaaatgtcaccctggctncgctncggaggccacactggaagcctctgatcccccagctccttcctttcccaccagcagcctggtgcctggaggctgccccatccgccagcgccaagacaacaggcccactcctctgattacctccgggggatggacggcaaacaggtaaggagttccatgcaactgcggatggagcccctctgagaaacacatgcccctccaagtggggtctggggcctggagagaccctcccacccagcagaccaggagatagctgggggacaagggcagacggcccctgcctgggaaaaaccacactcacaccccaccccgaagagctgtggagaccaaaccaagactacgctacacacagaacgccgagaagataaaccaagctttacacgagcaggatggggatgggaaaactaaaggggccccctgtgaccgaggagcagggtccccagggggcagctcccacggagcgggcttgaacagggaccacccctgcagagccagccagggcggagagccataccctggccccagcgcgccccgacacacatgcttttctccatgacacgaggccagtccccaggagcagccccaggagcacaacctgagatttctaagcttgcaggttacaaaaaacaaaaaaaacagagaagctgcctgcgtaaaaagtgccacccacggaggcaggacacaggcagcgtgtggccattcagcaggccaggtcttcagggtgaggctgctggcgagggcaggggagagggggcattctggttaaaagcaagaaattccaaatactcctccctcgggatcaacatccccccaaataagggcgcccagggatcttgcctggggaaagtggggtgcagaaggcatgacccacgccacagcgggctctcagcacccttcccacgtcccatgtcacaggctctttgagctgctggctttgttctctcaagtcaggtctgagggaacccatcggcttctgtaataatcgtattgcctatatacttgaattaaaaatatatggtggctcaaatgtgcccgcgtgtatggcagacggtgcggggtggaggccgtcacgcccatacacgtgtgcacacacagcggggggctgtgtccacggactgcgcacacagtatatattaacatatatattgctcaagtatatatgctatttacagtatatatctctatcaacataaaacacaggtatttataggtgtgtacaatagatacgtcctaggaagtctaggggacacacgactctggggtcacggggccgacacacttgcacggcgggaaggaaaggcagagaagtgacaccgtcagggggaaatgacagaaaggaaaatcaaggccttgcaaggtcagaaaggggactcagggcttccaccacagccctgccccacttggccacctcccttttgggaccagcaatgtacgagttttgttctggagttttgtgcaaaacaaattaacttaaaaaaaaaaagttggtttctaattaatgtggtgggccttcaacacccacaaggattttaaagaacagcttctccttctggtgggcttccagggctcagagggtcccactcagagaagcagggaacactttgtcaggactagaaaatatcccttctcctctgaccacagaaacagcacaactcggctgggtgtggtggctcacgcctgtaatcccggcactttgggaggccgaggcaggcggatcacttaactcaggagttcaagaccagcctgagcaatgttacgaaatcccgtctctattaaaaaaatacaataaccagccagacgtggtggtgcgtgcctgcaatcccagctacttgggaggccgaggcaggagaatcacttgaacctgggaggaggagggtgtagtgagccaagatcgtgc

SEQ ID NO: 537179 - DNA, 182 bp, Homo sapiens
  misc_feature (77)..(77): n is a, c, g, or t
cggcacgaggtgcaatcatggcttactgctgcttctgcctcccaggttccagtgatcatctcacttcagctactcanaggctgaggtgtaaggatggcttgagccccaaagttcgaagctgcaatgagctataactgggtcactgcaatccagcctggatgacagagttagaccttgactca

SEQ ID NO: 537180 - DNA, 1025 bp, Homo sapiens
gtcaggagttcgagaccagccctggccaacatggcgaaactacgtctctactaaaaatacaaaaattagccgggtgggtggcacatgcccgtaatcccagccacccaaggggctgaggcaggagaatcacttcaatccgggaggcggagatgcagtgagcggagaccacgtcaatgcactccagcctaggcaacagagtgagactccgtctcaaaaaaaaagaaaaaaaagacggagggagaaacggtttgagacttaataccgggtacgcttatacgggcccaacttagaagagggcaccagggggggtgggaaagtttagaccaaggatcgtttctccttccttgcaagttctcagcccagaggcccttcccttccaaatccgggccggggaattctggagccggtaacatccttccctggcaagctcagggggagggggaacgacctccgacatggggaacgtgggaaaactggcttcccctgggtgggtggcactgggccccaaaacgcaccggggtccttctggaaggggtctgggaggggcccatggtccacccttggcccccggggagtcacttgggaacccttctcagggcgtattttcccaaaagggtttggctggagccaaatttctccctcagttctgaaccccttcgtgggccatggttcccaacatgggagtcccgtggtcacagtcaccgtgcgtgggtcctaaagggacggtggtccccaaaaggccggcaacatttcccacgtggcgctggaaacctcacaggaccctcaagtatcaccccacacgtgggtcctccgcgtgggtcaaccatctccccaccaggggcgggttgtgccaaaatgtgcttctgggaccaagcgggacactccccctgtctcgtggcgacaaaagcgcactaagggtcccacacgtctgcctcttgacagggggactccggacgaacatcgaaggcggcccgcctggagtggcatggggcccggccatcagaccccaccaagcgacaatgggc

SEQ ID NO: 537181 - DNA, 1106 bp, Homo sapiens
ctagacctatcgtacttatcatcataatccctatgtagcttaaccagtctaccacatctttagccaattattaagacaatatcgctatcagaataccctgtgactacctgtgccgaaataatagtaacctgatgacagggtagtaagatttcgtaatctcgtatggtctgcacttgactcagtaggcattctgcgcgtaatgagttataaggcatagaaccctccatagtgtgccatggtaattcgttcagtaattacacctttgtgaagtctatcgttccaagtcgcgtttgtaaatagcagtgctggtagtgcccccgtacgtcaacgcctaatgtatactccacaacaatcacattagcgggacgacgcctacatagcgccccgtacggatcttgaaaaagtgcaactagtataccttgatggacacgatagctcttctcacccggtctagctcaatatagacaatgagcatactggtatacgccgatagatgaggacatcttggcctttgtttagaacctgtccccatcgcgttcctaaggtggatccaattatggaaactccatctgggacgacaagacataaacaaatagcgtggccaactcatattggtgcttgggagaacttattgggttccctacacatgttcaaacccacagatctcaaaggagagccgcatcagcgctgatagactaacatcacctttgcggaccatcctaagctgcaaaacatatgactacaatatctaagctaacataacacaggaagacatatcctccacatgttagtgagggtcaatagactccactacagttgttacaatgtactattacacatcatcacggccttgaaaaaactacaattggtcatgttcgacgtgacgtccagcacaatggcacccacccggtaatacgatttaaaactaagaggaacaaaggcacgtgcacggtgaagacaataggtggccatactgtctataacgccaaagagataaatgagaacgcaaataattcccccgtagttgacccacaaactctcttgcatatggggaaactttcgtagggatcacattcggttgaccaaacccatttatattgtcggag

SEQ ID NO: 537182 - DNA, 1179 bp, Homo sapiens
cggcacggtcatgagcgtgcgccgtcatgaaagagttcgccttcggtgcatcagtgcgcgagaactgcgggcgcgctgcgcgccatcgaagccctggagcggtccactggagctgcggccggggggcgcgctcgttgtgtggagatgtcgctgcccaaggcctcttaatactttggaatgactttttcgtgggcatactgtgttcggtatgacatgcatcgatgtccaaggaacatgttgcaggcctacttcgaagcagccgtcggacgacgtcaatcgagatgtgaccgtggtgaaaaggctcgttgctcaggactggtgaaggcgtgtctcactcggaaacccgtgaccccggagtacggccgttaccacgcaggccttgagtagggatttcggccttcgagcatactatcggaggaccatgctaatgtgggatagggctggcgtgggaaatattggtgagctactgcaatataacaggaaatataacgggcgtataagctcggcgaactacttaggagatggacctagaaaggaaccggtcaggacattggacgggaatttgccctacttaactggcagagctcctagcaagcgctatgttactacacgtcgtgtgccatgcgtgcgtggaaaccatgccataactggtgcgcaaagctccgagggcgacatggagagtagacgaggcagagaaacccgtcacatctagaaggttggccattgtggtggcaaccgatacagggttcccaaactcttagatcctgataacctgggtaggccttgcagcagaccataggcttttcgcaccggaagtataagtgcggctccccgggtttccacttcccgtaagtagtttgtagcatttccgagtggacacaaaggaattttattgccccgttattcagatcatctagcccatttgggaaaagtccgcggcgaccaacgatagggtaccttgtcaaggttcggaggaggggcgccaatccaaggtggtgggcccttctagaaataccaccgaaccagggaacggatattttgccacagtgtggccaaaagatcgcaaaattggcccacggggttggccaacgttgtgggttcgcaatcaccaagagcctcaggtccctttagggcgaatcttcggcgcgccccctgcagcagtgggtggcagacccaagg

SEQ ID NO: 537183 - DNA, 420 bp, Homo sapiens
agtgagagaaggtagctgcctgctgctggtgacactttctctttcccggaggcttccgtgttttcatttgctagcagagctgtctctctatctagcgccttcactctcctagcttcctgacccttccatgtatcggttctgtacacattatctgtaggtcctaatacagagagaatttcagcctatagtacaactttaaatgcatatctcttacactcccttccttcaacaaattgtagtgtgtgatgggttaccactgaaaggttatgagtgtggaacttgtatactcgagagagcttttccttcattgtctggagagctctatatcctaagaggcccttctgtttataactgattctcgacaggtatacgatattgtctctctctgtgcgaattgacattcgccattctctctccagt

SEQ ID NO: 537184 - DNA, 349 bp, Homo sapiens
agtggcccgacacatcacagggtaggacattcacaatcagctcagccagtggaagtcagatataaaaagcgtgcaactagaaagactgggagaagtgaacctgtctattccaagtagacaggctcccaatacaggcgaaactaagatcattccatgaaagcctcatctaaagacctcatgtaatggacaacgagtatctaacaactcgtgatcttgatcacgtagactatttggctgtaacctaacagaagcattagtttagtcatgtacaatatatgtagaatgccaactcctgtcattctcgtgcctagcacttcaacaagaatttaccattctgatggttagtcga

SEQ ID NO: 537185 - DNA, 317 bp, Homo sapiens
atgtgattgttcatgtatggatgtccatgatgtgatgtacatgatgtgatagtacatgatgtgattgtatactacgaatgatatgtacatcaaaactcactcagagggatacctgtctgtcatgtcgcagcttcagaaaaaactggactgtgcagagtgtttctgagtgcagtctttctaaagcccagtgctagtactggtaaatataaacatcatataacgtgaacagcacaacgatacaatatgtccccttaatagctggaaaaaccaatataagcccacccactccctactaacaactgattgccaccaaacaa

SEQ ID NO: 537186 - DNA, 917 bp, Homo sapiens
caacacacaacaaacacgttgtgcgcgtatggaggtcatccgcggtcccccattatggtttataggaaggttctttggcggatcaatacagccatcgggttcttttattatgggtccccgttgcgaaaatgagtctaaacagtgtctttcgtgtatcaccccctcttggtcccgagacccacctggtcttgtttcggagcaatttatgcataccttgggccacaatcgttctagttctgcccgcgcccgaatctttctttccaggtcagtttgggcgagctctttcctcgtcccctgccccgccatatgcctggttccacaggcagacccccagttgtagttttgttttcctatagggccagcggttcttttgtcggtaaccggggggcggggtgaacccaggcgcgcccacttcaggggccacacacagcacaacctgctgtgctttcagcggcggttagacgcatgttgtatgcagcgcctgcaccgcccgccgttaattgcccgggagtatacgcagggcgcccaccctcccacctcgccgccgcttttctgagcattattctcagtcacgacgggagggttcttccccccgacttgccacgtgctaggcctgtgtttaccatctcgagctccacccctgaccacccccatgcaccggccagccccacaagaggtggcaggaataaacctccgtatgacccccaacagcttccaagaaacatgtttttttttagcagtcattatttgatgaacacttttatatcaacctcccacacccgagtataaaatttggccaaataaacttaacggctttgtaatagatacagcaccaaccgacgttttgaggcccgcaagatcatccgagatctggatttagagcaacgggggaaacgattcctaaacaaaccatgaca

SEQ ID NO: 537187 - DNA, 198 bp, Homo sapiens
cgcagtgtcatcgagccccattacattcctggcagtgacagctggctggcagggacttatgtctaggtcccttcccagaagcccccgagcctcattggactgtgtggctctttagcccccaccctgtgggacgggtccatgggtcaggcctctgccctaccaacctgtgcctttcaggggccttggcggactggcctt

SEQ ID NO: 537188 - DNA, 219 bp, Homo sapiens
ctgagatcacgccactgcactgcagcctgagtgacagagtgagactccatctcaaaaaaaaaaaaaaaaaaaaagggggcggggcccccccctttaaagtgtttctttttccggccccccaaaagaaaaaggggtttgtttccctttaacttttaacaatgatggaaagtttccggaggcctccaagtaatgcttcttgtaaaccctgggaaactggaa

SEQ ID NO: 537189 - DNA, 400 bp, Homo sapiens
  misc_feature (364)..(364): n is a, c, g, or t
gtttaaaattttttatggaattatatttagttataaaatcaatacatgttcattgtaaccagttaaataatgcaagtatgtataaatacaaagtttctaccccaccccacgttccccattttcacttctgtgaaataacagcttgggagtgggaggtaatgtctttacacaagaaccttttagaatcaaggtacagtgtgaatctattgtccaataatgtatgcacacaaatttggccttttgtcaactcattaatttgtggagtgtctcagtgtagtcttgggagacaataatttgagtaagaatgtcttcatgagagcaggaatttggggcctttttacccccactgctatatcctcactgnctgtagcagcttctggccatcagcactcagtctttt

SEQ ID NO: 537190 - DNA, 151 bp, Homo sapiens
acaataaagataggcattacatagtagacattcacccattcctgatcctctgacaccaccgtgctctgggggatggggtcatagtagctggctgtgtactggcagtcaccattcctcaacgttgtatgctccagacggcacagaactatcc

SEQ ID NO: 537191 - DNA, 408 bp, Homo sapiens
ccgtttgtatgttgtaacttgaacaagcctccatggctgtccctgaagtcacagacccagcagttgcttgctgaggacaaaacaggggcccgcagatcatcggacacaatacctcaatactctggggtaagctatcagtaacagtgggttcctccataactatgtagagatgccagatctcaagaggtgacacaaccaagtcccagatattagaatttcaacactagaatcaaatggtgcctatgctccctacattaccaaaacaagtcaaactcctgaaacttctgtattagagaacagtgtccctgcactctctccctccctccctctctctctctctctctctcacacacacacacacacacacacacacacacacacacaaaaaacacactcagacatcttcct

SEQ ID NO: 537192 - DNA, 222 bp, Homo sapiens
atcgtcgaagatcagtcgatatatcatgcttcgcggagacggacgcagccgcggcagcacgcgcaggtgcccgtcatgccgaggtgcacgatgaaccagcccgcgtcgacctcgaacagcagatacttgccgagacgctcgacggcgagcacctcgcgcgcacgcaactgctcggagaagcccggccggcacgggccagcgcagcatctcggtacggagggt

SEQ ID NO: 537193 - DNA, 363 bp, Homo sapiens
gaagtcagtagagattcgcccaaggctacttaaccaccagcccaaacaagacaatctacattccagcattagcttcttcagagaagaagtagagatgcagaaattataaacatgtaaaggccattgtggctaatatggaagtagcaggtttggcctgctgagctaagtatacaaaatttcaaggtgggtaacttaaaatttctagaagtaggtaaaaagaacctacttctttacttggacagtccttgtgtagtacagtattaggaagtttatccaaggcagtgacagtcttatcttcgtatcgctaagcataacattattaaaatggctattgaacacaaccaaaatgactgactacagcaa

SEQ ID NO: 537194 - DNA, 246 bp, Homo sapiens
atggaagtgatgcagaaaaggagcaagccattcattcttcaggtagagagagagagagagagagagagagacagagagagtgtgcgtgtgtgtttaataaattttggatggtttggtgttcctgttatttttattgacttgtcttttgctagctttctcttctggctaatttgggtaacttacttgaatggtgggcttctaggtatgtattttcaaaagagttgtttgcctggtgtgactatgtct

SEQ ID NO: 537195 - DNA, 343 bp, Homo sapiens
actactgtcgcattattttaaatctttgtacacttctccaattcttgattggaattgttataaattaatcatagaaatagactactaaattaccatttatataactaaaattttaaagtttgcatattgctcacttgtgtatgatggtcggggcatttcaacctagacctagaaaggtgatgttaactgcgtggaagatgtgaactgtaggaaggtggcaggataggtgaaaggttagtctgaaatagggtatcatagcagaatatatctctttatctcaaagattcgaatgctatttacaatggaaatctatgccagctattaatctgacttggtgatatat

SEQ ID NO: 537196 - DNA, 127 bp, Homo sapiens
  misc_feature (2)..(2): n is a, c, g, or t
cntacgacgctagcacaacttcaattatccaactctaaatagctgatttttaagaagaaaaatttgattaaaatcttgttatatgatttctggacttgtttcttttcatctctcttctctttgtcac

SEQ ID NO: 537197 - DNA, 524 bp, Homo sapiens
tctcatagtatcctgattggttagaaggtctttaggggcatatacactgggttagttcggctggtctagctgcgtcatgccatctacacctctacccgccttggatctataccgtgctgttgagcgcctgactggggctgatggtactctcccctaggctattctagctagacaggctgtagattggcatgaccgcaggtgccactggtgccttgtgggaacaccagccgaattggtcttatccgatgactgcgatggcggttccagtgatcagcgcgggtacaaaaatgtgtataacgccctgattcgaatcacccgggaagagggtgtctcacactgtggggggctgtcccttacatggctcgggcgtcgtcgtccatgtgccagtcgctctatccatccagcgtttactggctcggtactcttgcactttgtgcctttggcgcgtcgcggttgtcccggctcggcgggtgcgacgtccactgggtttgggcggccaccggggcggtcggcggggttccggg

SEQ ID NO: 537198 - DNA, 222 bp, Homo sapiens
ggtttgccccttgggccctttttggggccccttttccaccgggttggcccaaaaagccggggggggccgggccgggtttcccggggtttgggttttttgcccgtggggggctggtgggttttttggtttcccggggccggtgggccttttttttttttttggttttccccttaacctttttcaaaggtccccgttggttttttttttttttcccggttgtta

SEQ ID NO: 537199 - DNA, 206 bp, Homo sapiens
attcattttttccctttctactcagactttgacatcttcctaaatgaatgttcaaattttcctcaaattcaattaatcaataaattaactaattcttcattaagcacttatttctgaacttttcattaaacatgtatttaataaaagtcttcattaacacttaatttaataaaaattctttcatataagccccttatttttgaaaa

SEQ ID NO: 537200 - DNA, 213 bp, Homo sapiens
ttgtctgggtgaaggagtgaatagatgagcccatccagaagaacccaggttttctcagaatatttgagatgaagatatttgctgtgcctcccgctgtgatccacagaaatgtctgccatcctccactgacatctctggcatgacttggcctttctagacggtaagttccaggaaggctgagactttccttctcccctcactccttcaccctag

SEQ ID NO: 537201 - DNA, 145 bp, Homo sapiens
ctatgcttaaaataagcaggtggtctatttcatgtttttgatcaaaaactattatgggatatgtatggcgtagggtaaatcagtaagaggtgttatttggaaccttgtattggacagtttaccagttgccttttatcccaaagtt

SEQ ID NO: 537202 - DNA, 390 bp, Homo sapiens
agaattttcaccgcgtcgtgtgaagcgacaccttaacgggcttgtgtgagcaacatggctgtttttttcacctgggtgcaggcgggctgagtcccaaagagagagtcagcaaagggtggtggattatcattagttcttatgggttttgggataggcggtgaagttaagagcaatgttttgcgggcaggagtggatctcacaaagtacatcctcaagagtggggagaatttcaaagaaccttcttaagggtgggggagattacaaagtacattgatcagtttgggtggggcagaagcaaatcacaatggtgggatgtcatcagttaaggccatttttacttttgcggatcttcagttacttcaggccatctggatgtatacgtgcaagtca

SEQ ID NO: 537203 - DNA, 134 bp, Homo sapiens
gcagaatgatttgacaatttttattttaaagtacatttttacatctttcaatggaatatgaaagcatctggtaatcgagcagagttttgccagcctgcatgtgaactggattattttaaagagtgatgtattca

SEQ ID NO: 537204 - DNA, 150 bp, Homo sapiens
  misc_feature (33)..(33): n is a, c, g, or t
  misc_feature (45)..(45): n is a, c, g, or t
  misc_feature (98)..(98): n is a, c, g, or t
  misc_feature (110)..(110): n is a, c, g, or t
gaagcattgaaaaaagcaaatatcacctttaantacatgtttgangaagtgccgattgtaattaaaatttcacatctgatcaatgtcctaatgtgggnacttgaaaagangtcagctgttgcagctaaacatgatttgctcagccttgcc

SEQ ID NO: 537205 - DNA, 210 bp, Homo sapiens
aattcttctgatacgtgttgcccttcctcacagccctttggccattgtgagtttggctgtccctcagagccatccggtcaagaagatggtgttttgtattttacagcagaaaattcttttcttccaggagttctgtctgaactgaacatgtaaaaagtgtgggaaacagatgaatccctattaaacatgaagttttgattgtatttaaga

SEQ ID NO: 537206 - DNA, 137 bp, Homo sapiens
tgccatgagcgcaaaaagagtctagtaagtcgtcaagcagatggcgcttgttataattatgcctcatagggatagtacaaggaaggggtaggctatgtgactaaatgtgctgattcagcacatttcgtatgagacag

SEQ ID NO: 537207 - DNA, 160 bp, Homo sapiens
ctgcccccatcaggatttctatacattgacctcttgttggttatcaaaatagctgatgggagaagatgcgcgcatcttcgtcccatcaggggatttctatacattgacctcttgttggttatcaagaacagagtaacgacgtgtcacacaatgacgctgg

SEQ ID NO: 537208 - DNA, 642 bp, Homo sapiens
gccttattagaccctactaaaggtactggcttcgtcaatatattggagggtgtgtacaacgtttgcttgccttattgtagacattcaagagcctggtgccatttgctaggaatagttaagcatagtaaatagtagttcctgcgacgagtgtacacagttgtggatacgtgcacgggagtctatatagtgaatatgatacgacatttttgaatgcatactcataatgtgttgtccactcagagctgtttgccttcctaaagtgttgacccgttaagccttaacatgtatcttcattcagaaaacagttatattggtcataccatagtaggaagaaaaacctttatttgggaatatacactactgtaagttggtacagatcatatacctaccacctgtctttgcttaaagagccttgattacataaatatgtaggaaaaaacatattgagttcaaaatttatatctaacattgtttatgttatgatttttttttaattgcaaagactaggtgtatatttttttctgtttttctaaatgacccgtggtacttaataggtgtactaaaattgtgtcgggagcagggatttggaaatttctgagagatgtgtagttaatttagtaattctgtttcatgagatatgat

SEQ ID NO: 537209 - DNA, 715 bp, Homo sapiens
ggctgcctcctctgactgtggtgaagcagctcagcaggataataagcttacgtcgcctgaccttggggtctctctcgtcatcctttgctcttggctaaccttcattcttggtgccaaaacccaggaacggggataggctctggtcatgggacgtccgttagaggattctctctctctctctcctatcatccgttagcccaggccaagctccgcgcttcctcgtaactcgtgctaatagacaccgctagaggatctcccaaaatttctctccattgtcgggcgcacctcagtgccacatgcaaagacctctgagagggggccgatgtgtaagagtccttgccacccgtgggaaccagtagcgaagaccatcgattgtctagcaccgaagaaatgaccagtacctagggctccttggaacatgcagtgccctactaaccagcacttctaccacacagaagacatcgcccgtatactagcatgtaatgctgcctgaggataacggtgcctcctcttctattacctgttatataggctggagattgttagagaaccagttggaccgagaaagctctcttcctatcctgaagattgatgttgaatgggccttcttccaagtgacctttgctgcagaacaggcaagcagcattcatacgcctggtttgtggtccaacgagaattctagtggatggccaattaacagacaatacacggacac

SEQ ID NO: 537210 - DNA, 320 bp, Homo sapiens
atatcgaaaccctactggaggttgtctgtggtgtgggaaacacagtctttccatattttacaatacgaacaatgacccaggactctttgtgtattgctgttatttttcttccatcagctttagaactggtccagactaattcagaatatcatcctttcccgtttcttttgtcctttgttcacgaccttgtgtcatgaacagaacagtttccctagtgcccaatgggctctcttgatcttctctattctcatatttgttctttcagcatattgttccagacaacatgcagaatgctatcaacaggctgagcaggcttctga

SEQ ID NO: 537211 - DNA, 284 bp, Homo sapiens
  misc_feature (2)..(2): n is a, c, g, or t
cnccacccagagaagagcagataaaacaaaaatttgtgatccccccatgaattcttcaaagttaaacagggcagtcttctttcgaaagttaagatgaccagggcgccctttccttttgacaaaataacctttaagaagggcgccccccctccacaatgcccccagatatgccgcattgtactgcttggttatatgctatgtacatgtcagaaaccattagcattgcatgcaggtttcatattctttctaagatggaaagtaataaaatatatttgaaatgtaaa

SEQ ID NO: 537212 - DNA, 110 bp, Homo sapiens
  misc_feature (51)..(51): n is a, c, g, or t
  misc_feature (87)..(87): n is a, c, g, or t
  misc_feature (89)..(89): n is a, c, g, or t
gctcctgcacaagaacattgaaacacctgttggttcttcctcctggcttgntggcagcttcccagagtgtcgttcctcgtacccagngngccagctttcaggagtttggg

SEQ ID NO: 537213 - DNA, 189 bp, Homo sapiens
aggatcgtatgagaccaggctgagacagcccaaagccatatcccagactaatacacagccatccccaactgcagccgcaaacccaacccaggccatccccaaacccatcccaggcaaactcaacaccatccccttccctaaatcacctctcctgccccttttctccagcctgggtctcccatggtgtac

SEQ ID NO: 537214 - DNA, 792 bp, Homo sapiens
  misc_feature (210)..(210): n is a, c, g, or t
aggcattgaggctcactgaggcgggcttgtgctgagggggcaggctgggctcgtggacccgttgtcagtcctttctctctgaagagcagacaatccactcctcaagatgtctagggatgaggttactaggatattgcttagcggcaagccacaaacgtgattctaatacgctcagagtgtaagagaaactatgaagacttacaagacgtngcctgatgaaggaaaagatagaaggctccttatcatgaccgccgtggagatgaagcttctacatggagtctaacttgtatttaactgagaactggaagataggactacacagccccgaatgtaataccactagaatggccctgctagtagatgaaaatgaaggcgactgatacagctcatagtatagaccaaaagctgcaggtgattacaatagatggaaggccatcttttacaaagagattagacgcatagtgattgacagaccttgtaatccatgactcaaggagaattgctgtatttaaagcctatttaacgcatttactagacgcagacgacaatggaaagactaattggcagtggtacgacgaaacaatctggagaagatacaactttcgagtgcgagactggaagacagaagctcggcacggcgatacaaagaatttagatgatagggatatggtactgtcaaacatacttttagagaagataatttaaaccgcgtggaagccgatttaacatgagcaagttaatgatctggcgcgctaggcccattgacttagacttatcaggttttcttcagcc

SEQ ID NO: 537215 - DNA, 458 bp, Homo sapiens
  misc_feature (5)..(5): n is a, c, g, or t
  misc_feature (90)..(90): n is a, c, g, or t
  misc_feature (107)..(107): n is a, c, g, or t
  misc_feature (126)..(126): n is a, c, g, or t
  misc_feature (143)..(143): n is a, c, g, or t
  misc_feature (145)..(145): n is a, c, g, or t
  misc_feature (181)..(181): n is a, c, g, or t
  misc_feature (187)..(187): n is a, c, g, or t
  misc_feature (207)..(207): n is a, c, g, or t
  misc_feature (225)..(225): n is a, c, g, or t
gcagnaagacctagtggatctcagattctaaatggccagattactggcatgtggtggaactagttaacactggagcggtatgtataactnttgctatggacgataangtttcaaagattgtgttcntcaggtgggtttgattntnggttttttaacgcctctcagattataattactagtntaaatnctttgctttattcattaagnataaaaacttcggtctcngatatttattttcacttgtttactaattatttacaaaacaccctttgttgacttttattttataaatgtgtaatgtattaaacgtctttaaatttttgttcaactgaaactacattaactttgatttgctttactgggatttttttttaaagacactttttccatgtcagtgcgcagcacttaaccagtcgtttgtattccctttctttcaatccaataaacagaatgaatac

SEQ ID NO: 537216 - DNA, 981 bp, Homo sapiens
  misc_feature (1)..(1): n is a, c, g, or t
  misc_feature (87)..(88): n is a, c, g, or t
  misc_feature (94)..(94): n is a, c, g, or t
  misc_feature (127)..(129): n is a, c, g, or t
  misc_feature (135)..(136): n is a, c, g, or t
  misc_feature (138)..(138): n is a, c, g, or t
  misc_feature (141)..(141): n is a, c, g, or t
  misc_feature (150)..(151): n is a, c, g, or t
  misc_feature (160)..(160): n is a, c, g, or t
  misc_feature (178)..(178): n is a, c, g, or t
  misc_feature (190)..(190): n is a, c, g, or t
  misc_feature (192)..(192): n is a, c, g, or t
  misc_feature (211)..(214): n is a, c, g, or t
  misc_feature (218)..(218): n is a, c, g, or t
  misc_feature (231)..(231): n is a, c, g, or t
  misc_feature (234)..(236): n is a, c, g, or t
  misc_feature (239)..(239): n is a, c, g, or t
  misc_feature (244)..(244): n is a, c, g, or t
  misc_feature (246)..(246): n is a, c, g, or t
  misc_feature (276)..(276): n is a, c, g, or t
  misc_feature (278)..(278): n is a, c, g, or t
  misc_feature (280)..(281): n is a, c, g, or t
  misc_feature (288)..(288): n is a, c, g, or t
  misc_feature (294)..(294): n is a, c, g, or t
  misc_feature (481)..(481): n is a, c, g, or t
  misc_feature (486)..(488): n is a, c, g, or t
  misc_feature (843)..(843): n is a, c, g, or t
  misc_feature (909)..(909): n is a, c, g, or t
  misc_feature (957)..(957): n is a, c, g, or t
ngggcgggggggtgtgttgttggtgaccttgggggtgggggctgcggaatgcagctgaacctctcctggctctgtctgctggtctannccaggntggggctgatcaggggcagagagctcaatcttnnnggatgnngnggngaggacagnngggccaaangggcctcttcccctcctnttcacccatgcnanagcattaaataaacaaaannnnactntttacagcacaanttnnncanggaantncttcctcccagccctgggcgcacagcatgntngnngagcttnggaggncagggttggggcctccagggtctgacaccaccccactcctcttcctagcaccatggggtagggacaggcagctttgaacagaggaaacaaaactccaacttcctccaaactcctatgcaggcaggtccatctagtctggtacttctggcccaagggttttctgctccttccaaacctttgagctttnttttnnngtgagcttagctgagacttctccaagaggggctggagccctggtctctgaggcacagtgggcctgggaaacaggcaagagtctggttccaaagtttttcccagcccaggcctctgccttggcaagcaggaagcagggccaggtgagagccggtgagacccaggctcagaggggccgggtggtgtggttatagaccaggtgctccgtgtcctcggtagtggagacagtggagctggcaggggtgggtggtgggtggtggtggtgtccgtggaagtcctttctctggttcttgaagaagcagtaacccaagatggctaccaccaccacaatgcagatgaccaggaacactgcgacancatctccacagagcctgtgctgggaatggggatttcccgcctcaggccaaacacatccttcttggngatgccgcgacaagactcgaggcactgctgctcttcctcaaagttgtncttgttgcataacaacaccataag

SEQ ID NO: 537217 - DNA, 937 bp, Homo sapiens
gaagtcttgatcttatcagaaaaaggccacaccaagtgcgagttttcccaggctgactttccaggcccttatcaaatgaaacaacagaagctcttcacagttctgtgccccatggccactccacagacagacaataccaagcatcttagaactgtcataagataggtcatgcctgaaatagatcttgaccatatgagagtcccagaaatcagcaaggcctggacaaatagaactaagagagaggcagaggcaggaagctgggggtctattttggttaaggaagtttaaggattcacttgttgaagaagttgtgtgtctaaagattaagtttaaagctagaagcagacaggtgagtattgggtaagtacttctgtgactcgcctcaattcccactggccaggggccatctcaaactgcacggtgaatcaagatgctggtgtcatcctccttggaaacaaggaacatgttcaactcatggttaacaactaagtacatgattcccaagggatcatttcttatgagggaagatgacattaaggagaatcttaagaaaagcatcagagaaagacgatatgcatgtgaaggacctgattctgatgtaggaaaagttaagcgaaaggaactggttcagacaggggcagatgagttcgtaatgcgattgcatcctatgagtcacttcaaatcaacggcaacattgtggccatacgtcatcaacacaagagtacgtatgcccgatcggtacagagagtgaagtgtcgccaagttatgaggtacggaacaatgtatgaagtcagtagataagtgattgaaagaagagggggggagtaagtataagttaaagggtcaagaaatagaatccaataacttgtttgtagaccaagaatagcaacaattagctggtctcaaataaggagggggaaaagggtataatatgaaa

SEQ ID NO: 537218 - DNA, 390 bp, Homo sapiens
  misc_feature (6)..(6): n is a, c, g, or t
  misc_feature (169)..(169): n is a, c, g, or t
  misc_feature (251)..(251): n is a, c, g, or t
  misc_feature (335)..(335): n is a, c, g, or t
gcaacncaaccaagggtttctctggatgtgtttgggaacagggccatgagcacagtcctctctgtccccgcagaaacatcctcagcctcatcaacgactttgacttcccagagcagagatctccagggacgactacccagccgtcctcatgcacctgaacgccacctgnccaagagggtggcccagctccccctgaaggcctgcctcctggaagactttctggataaggtacctgcacaccccctgggtangccaggcgggggcgtccacaggagcaccagggccgcactggttgtgtcccactgccaaaggtggcaaaacaattcccacagacncagggccagggcttgttgaaccaagaaccccagtctatcttttgtctcagggttg

SEQ ID NO: 537219 - DNA, 123 bp, Homo sapiens
aagatagatcttagcaacacacaatacaaaagacacaggctaaaacaggcctcactaatacactttgagataggtatatatatgggtataagatatataatttccagatccataatatttttc

SEQ ID NO: 537220 - DNA, 606 bp, Homo sapiens
gagtggtcggttctgtgccagtgcaatgtctttgccaaggtctggagcttgactgtgatgaaaccaatttacgagctgttccatcggtttcttcaaatgtgactgcaatgtcacttcagtggaacttaataagaaagcttcctcctgattgcttcaagaattatcatgatcttcagaagctgtacctgcaaaacaataagattacatccatctccatctatgctttcagaggactgaatagccttactaaactgtccagagcagtaaaggatggctctgaaaaatgaagaggactgggcaaaacaggtatctcagtcataacagaataaccttcctgaagccgggtgtatttgaagatcttcacagactagaatggctgataattgaagataatcacctcagtcgaatttccccaccaacattttatggactaaattctcttattctcttagtcctgatgaataacgtcctcacccgtttacctgataaacctctctgtcaacacatgccaagactacattggctggaccttgaaggcaaccatatccataatttaagaaatttgacttttatttcctgcagtaatttaactgttttagtgatgac

SEQ ID NO: 537221 - DNA, 281 bp, Homo sapiens
ccaggagatgttgggaaccagttcatttagccagccagctacctccacaagcacgggcttggggttgggtacgtcaacaggaacagcaattacctggttgggaactgcaagcacagggaccagtctcttctcatcccaaaacaatgccttggcacaaaataaaccaacgggcttgggcagtaagggggacatcacgggagttctgcatctaataattgggttggcttatggaatgtgtggtcttttctccgtttttctgtgttcatctaccttcttttcct

SEQ ID NO: 537222 - DNA, 234 bp, Homo sapiens
agggttttttttttttccccccccgggggcccccaaaaccctttttttttatagtggggccccgggagggggcctttcttccccttttccccccgagaaaatgtgggtttttttgggggaagcccccccttaaggcccccttaaaaaaaagggtttttttcccgggggccccccccttttcccttggttttttttttttttgggggacccaataattgtgccctctccttccga

SEQ ID NO: 537223 - DNA, 335 bp, Homo sapiens
tgaggaaggtcaggtctaggaactctaactccttgccactcaagaaatgtcctccctttcagaatatgccttccgcatgtctcgtctcagtgcccggctatttggtgaagtcaccaggcctactaattccaagtctatgaaagtggtgaaactgtttagtgaactgcccttggccaagaagaaggagacttatgatttgggataccaatcataagtctccttcttcttgggtatccaaattcaccacacttacgctggaacttcatggcagacgctccgatttcttgggactctacagaggatgaggcatcagggattttatgggatgagccaaa

SEQ ID NO: 537224 - DNA, 1429 bp, Homo sapiens
cagctgaataggctgcgttctcttggaacgcgcagcagaacgaggttctggtgaccctagccgcgttcgctccttagtcctttcgcctacccaccggcgtaccaggcagacccaccccgtcctgtgccaggaaagcactgccaccggcaccatgccccacccatacccagcactgaccccggagcagaagaaggagctgtctgacatcgctcaccgcattgtggctccgggcaagggcatcctggctgcagatgagtccaccggaagcattgccaagcgcctgcagtccattggcaccgagaacaccgaggagaacaggcgcttctaccgccagctgctgctgactgcagacgaccgtgtgaatccctgcattgggggggtgatcctcttccacgagacactgtaccagaaggcagatgatggacgtcccttcccccaagttatcaagtccaagggtggtgttgtgggcattaaggtagataagggtgtggtgcccctggcaggaaccaatggcgagacaactacccaggggctggatgggctgtctgaacgctgtgcccagtataagaaggatggagccgactttgccaagtggcgctgtgtgctaaagattggggaacatactccctcggccctggcatcatggaaaatgccaatgttctggcccgttatgccagcatctgccagcagaatggcattgtacccattgtggagcctgaaattctccctgatggggaccatgacttgaagcgctgccagtatgttactgagaaggtcctggcggctgtctacaaggctctgagcgaccaccatgtctatctggaaggcacattgctgaagcccaacatggtcacccctggccatgcttgcacccagaaattttccaatgaggagattgccatggcaacggtcacagcacttcgtcgcacagtgccccctgctgtcactggggtcactttcctgtctggagggcagagtgaggaagaggcatccatcaacctcaatgctatcaacaagtgccccctgctgaagccatgggccttgactttctcctatggccgagccctgcaggcctctgctctaaaggcttggggtgggaagaaggagaacctgaaggcagcccaggaggagtacatcaagcgagccctggccaacagcctcgcttgtcaaggaaagtacactccaagtggccagtctggagccgcagccagtgaatctctcttcatctctaaccatgcctactaaccagagctgatctaaggctgctccatcgacactccaggcccctgcctacccacttgctattgaagaggggccttcaggctctttcccatcactcttgctgccctcgtgtgtgcagtgttgtctgtgaatgctaaatctgccatcccttccagcccactgccaataaacagctatttaaggggga

SEQ ID NO: 537225 - DNA, 603 bp, Homo sapiens
aaagattacaacatgaatgggcagcgcgtgacgagaagtatagagctgaacatgtgctactaacctgctctagtgaagaaatcgtgtgcatgatcatgagatcgagcaccctgaaactagcccttgaggtgtgcaagcagagcgtagagaatgtggtcacagatgtcagtattcgaggttcgctagcacgtaggtttcatagtagaagaggactaggaagcatggaacgaatttagggataagcacagacttagaatgaggtaaagacagagtctcataatggatgctatccataatacaaaagagtcttacaattcaagaataaccatggatgcaaagaagaactatgagcagaaatgccgggacaacagatgagcgcagaaggaggccgtcagtccggagtgccaagctggtgaacccgaaggcaacaagaaaagcttcccaagtgaaagtgggaacttcaaagaccgcagtagatggacgtcagacagaagcatacatggtgcaagattcgggagcctggtataaggtccgagaagagtggcaaagtgagcacgatcaagggctgcgaggcatttgaggctcaaggaatgtgaacgaata

SEQ ID NO: 537226 - DNA, 367 bp, Homo sapiens
ggttcgatctagaggatccctgagagacggtgttgcatgactcacggcctgaattcacaccacccttgggaggctaagcgaggtggatcacccgaggtcgggatgttcaagaccaccctggcaacatggtgaaccccgtctctactaaaaatacaaaaactagccgggcatggtggtgcacacctgcagtcccagccactcgggaggctgaggcaggagaatcgcctgaacccgggagtagcagttgcagtaagccaagatcacgccactgcactccagcctgggtgacagagtgagaccccgtctcaggaaaaaaataaataaaataaattgagggcagacacagtggctcacaccctgtaaattc

SEQ ID NO: 537227 - DNA, 299 bp, Homo sapiens
  misc_feature (198)..(198): n is a, c, g, or t
  misc_feature (210)..(210): n is a, c, g, or t
  misc_feature (274)..(274): n is a, c, g, or t
  misc_feature (283)..(283): n is a, c, g, or t
tacagataataacatggacactataagggttttgttgttgttgttgttgttttgagacagagccagactctgcttaaaaaataaataaataaataaatattcatacacatttttcgttgtttaatgtttgatgtattacactgctttctattaaacaaaactttaaaaactgattttcttgtgtatctaaatctgggntataaatttggntagcttaactcccataacaaatatagtgtttatttataacttgtatttggttgattcttttggnaaacttggnatacaataacatttag

SEQ ID NO: 537228 - DNA, 1119 bp, Homo sapiens
  misc_feature (174)..(174): n is a, c, g, or t
agctttcttacgtagcacactatcgcgttgggcgcgcggcggccccacgcatagtgtaatagatgatagacatggtgtgcattaagtactgtgtcctacgtaagagagtacctggtgtgcattgatgatactatgtgttgtggagtatcttcatcacaacataataacaaacgncgccggcggggcaaccccgacgacgtgtcttgcagacaacaataccacgcagtgagggatgacttgcatgaggtcattcaatcatggtgagtactactacataacagcgagaatcctcaagaaggacgcgttcgtacgtactccatacaattaacgacgcacgcggccgaccggggaggaaaggaaacaaaccagagcaagagaagaaaaaaaaaaagacaaaaaaaaacaccagagaaagaagaaagaaaagaagcaagaaggagaagacaaagacaaaaaaaacaagagaaggagaaacagaaaaacggaagaaaacgagacaggggaaacgaacgacacaaaaacgagagaaagagaacgaagagaaaacaagaaagaaaaagaggaagagacgagcaaaagaagagaacaaaaaggagaagaaaagaagaagcaaacagagaagagaagaaaaagaaaacgagaaggaagaagaagggaaagagaaaggagaagagaacagaaaaacgaaaaaaaaaataaaaaagagagaggaaaaggaaacaaaaaagagaagaaaaaaaaaaaaaaagaagaaacaaaaaaaaaagagaaaaaaaaaaagagaaaaaacaaaaaggaaaaagaaaagaaaaaaaaaaaagagaaaaaagaggaaaaaagaagaaaggagaaaggagggaggggaggagaggaggagagacgaggagagagaagaagtgagaaaaagaggaacagggagggagcgcagacacagacgaggaagagggaagagcggaacaggacgagaagaagaggaaaaagggcacgacagaggagagacagaggcaaacgaacaaaggaggaaagagagaaaagaagaagacggaaaaggggaagaaaaagaaaaagagacaagaacagagaagacggagagaaagagagagagaagcaggacgagag

SEQ ID NO: 537229 - DNA, 144 bp, Homo sapiens
aaaatttcactcttctatatctaccccaagagggttattacctctctctggaattttacatgggccgaacattacagaacaccatgatcaacctcggtctgcttatttttgtatttttagtagatatagaagagtgcacttttg

SEQ ID NO: 537230 - DNA, 463 bp, Homo sapiens
ggtcgacgagatatattacatttcttctctcaatttgtgccttttattctcttattaattgaacagaagttcttaatttttgtcaagtcctatttgtcaatctttttgtgtcctgtttaggaaagcttaatcaacattaagatgttttcctatgggcctggcacgatggctcatgcctgtaatcccagcactttgggaggccaaggcaggtggatcacgaggtcaggagattgagaacatcctggctaacacagtgaaaccccgtctctactaaaaatacaaaaaaaattagccgggcatggtggcgggcacctgtagtcccagctactcgggaggctaaggcaggagaatggcgtgaacccaggaggtggagcttgcagtgagccaagatcgcgccactgcactccagcctgggcgactgagcaagactctgtgctcaaaaaagataagaaaataaaaagtc

SEQ ID NO: 537231 - DNA, 223 bp, Homo sapiens
gacgctctctctgtgggggctactgccaccctggtggtgggcttcttccgggtgcaccggccgcacaggagctgagcaccagtccacatcctcaaggggcaggtcttcgcctctcggtcctacttcttggaccgggctgggcactgtaaagatgagggctgctcctgggagcagagccggggtgagagcaccaggtgccaggaccaggcggccaccccagagt

SEQ ID NO: 537232 - DNA, 194 bp, Homo sapiens
acattatttgttcatccttccaatcgttgttctcatcactctctcttttactcacagtgtcccatcctagattggcctcccttcaattccataatcacgcaagattttcttgcctccggaatcttcacatctatcattccgtttatataaaatgatgttcctcatcttctaagtggttggtctctcttttgaca

SEQ ID NO: 537233 - DNA, 351 bp, Homo sapiens
cgggtggatcacctaaggtcaggagttcgagaccagcctagccaacatggtgaaacctcgcctctactaaaaatacaaaaattagccaggcgtggtggcgggtgcctgtaatcccggctactcaggaggctgaggcaggagattcgcttgaacctgggaggctgaggttgcagtgagccgagatcgcgccattgtactccagcctgggcgatgagcaaaactccatctcaaaaaaaaaaaaaaaaaaaaggtttacaatcggatgggaagatgtcaaacctggtgaaaggctaattagcagtataaggcaaggcaaactttagggccaatggcttgatacggggtaaggga

SEQ ID NO: 537234 - DNA, 573 bp, Homo sapiens
  misc_feature (6)..(7): n is a, c, g, or t
ttgtgnngtgtgaaagaaacacacagggcatctcctataaaaatggacttatgccgccttccaaggacatgttaccacccaggagagagaacaagaaagaaacagagggggcatcgccgtataaaaatggacttggctccgttccaatggacatgggaccaccgcgaagaaaacaagatagtcccagccaaggatttggtattactctcagaaatagaggtggcacaggctaactgacattagtatcatccacatgaaatatcctcgtgctgagaagggtggcttttgtcctcatgaaacatgaggtagccactggccagggaccatgacagctgcccgccggaaaaccaaacgtgaatcttgaccaatggataaatgcactaccgtttagacagcagcaggtggccccatgtcaacggacatggctcaaagtcccagaaacagaaatagccccgggcaaggatgttggctccgtccacagtaaaagaagtgggcttgttgaaggacatgtctccactatcagaaacagaaatggctctgggcgaggatgtgactccagctccagaaaccaga

SEQ ID NO: 537235 - DNA, 491 bp, Homo sapiens
cagctgttactacagtcatgcttcaccatgccctgctatgttttgtatttttagtagagatgggcttgggccatgttggccaggctggtctcgaagtcctggcctcaagggatccacccgccttggcctcccagaatgctagaattataggcatgagtcatcatgcctggcccatacaatggaatatgattcagccacaaaaaggaattaagtactgatcatgctatagtatgtacaacacttgaaagcattatgccaagtaaaagaagccagacataaaagaccacatattgtatgattgtgtttgtatgaagtgtccacaataggtaaatacatagagtcagagaatagattcgtggttgccaggagctgtgggaaggataaaatgggaagggactgctgatgaatatgatatatgaaaataatttcagaatatgaaaatattctgggaatagataggtgtgatgccttgcccaatcttgtgaatatat

SEQ ID NO: 537236 - DNA, 461 bp, Homo sapiens
acagtctgatagtcgacccaccccaatatcaccagattacattatgtttcagacaccacaccacacctattccaaaatagaccacatagttggaagtaaagctctcctcagcaaatgtaacaagaacagaaattataacaaactatctctcagaccacagtgcaatcaaactagaactcaggattaagaatctcgctcaaagccgctcaactacatggaaactgaacaaccacgagaacacttacggcaacaacttcttcaaaggtggcttctggggcagccatggcaacaaccaggacagcagcgacagtgacaatgaagcagatgaggccagtgatgatgaagataatgatggcaacgaaggtgacaatgagggcagtgatgatgatggcaatgaaggtgacaatgaaggcagcgatgatgacgacagagacattgagtactatgagaaagttattgaa

SEQ ID NO: 537237 - DNA, 339 bp, Homo sapiens
tttaccttttttttttcccaataaaaaaaccattaacttaaagtggtgttaaatgctttgtaaggcaaaaatctaattgggaacaaggcagttgaaggggaggccagtttacttttaattgcccacagcccagcataggtttccctctcctaaggccccagcaccatcctctgagcccaaaaccttgcctgaaaataagcaatttccgatggctacaccctattaatggcctcttaggtcttgttgcttttccactgcgtggagggggcccggtgaattttggtagcttaaattgatctatccaggcggcaaagctcttatggacaaaaacaccccatt

SEQ ID NO: 537238 - DNA, 282 bp, Homo sapiens
ccctgtacaggactggagagctctggtgtactgtcgtagtagtaacggagaagtagaggccggaggtccgtagtctaggggcaggagagagatctccgcgtaatttcctgtcggctcctgaacagcatcgcccatgtgcagcctcagtcaggaaaatgcatcagaatcgacagccccagggggcgagcggcgtccatggtgcagggggtcgagcggcccgctgagcaatgcgtccgagaaagcgcctgacgggaagaggtagcagggctaccgtgcctgacc

SEQ ID NO: 537239 - DNA, 106 bp, Homo sapiens
taccccagtgctgttgttagtgtctctgtaggtacagtaccattggtggccaattgatttgatggtaatgggagggatcgttgacctcgtttgttatgtaaatgga

SEQ ID NO: 537240 - DNA, 361 bp, Homo sapiens
tggagtagtcaaccaatatggagcacttagagatgcaacaaggagacgcgccttttgcctggtctctcaagcgtatactttcaatcatcgccgatgattttgcagcctttgttggacttcctgtagaagaggctgtgaaagggctattagaaccagggagggcaaggctgatttcaccaaaaagaatggttcttggcccagaaaaggccagtggcagggggccttgggatgtttccttttaacaagtttatttcccttatacagagccctgctcccaagtttccccccaaataccccaaatggaaccaaggcaagtttaagcccagaactggacgggattaatggtgggctttcccttgga

SEQ ID NO: 537241 - DNA, 476 bp, Homo sapiens
  misc_feature (269)..(269): n is a, c, g, or t
  misc_feature (323)..(323): n is a, c, g, or t
  misc_feature (395)..(395): n is a, c, g, or t
  misc_feature (436)..(436): n is a, c, g, or t
  misc_feature (448)..(448): n is a, c, g, or t
  misc_feature (453)..(453): n is a, c, g, or t
ttgagacacacacgcacacttttcatttagagggaaaataatttcatatgacagtatcatttaaaaaatttaataaacttattaaagtataatctccatacagaacagtatacaaattttaagtatacagcttgatgaattattacaaagtgaacatatcatctaacctccagccagatcaagaaatagaacatggctggatgcggtggctcatgcctgtaatctcagcactttgggaggccgaagtgggcagaaggtcgggatttcangagcagcctggccaaaatggtaaaaccccgtctctacttaaaatgcaaaaattngccaggcgtggttgcaggcacctataattccagctacttgggaggctgaggcaggagaattgcttgaacgcnggaggcggaggttgcagtgagccgagattgtgccattgcantccagctggganacaanagcgagacttcgtctggaaaaaa

SEQ ID NO: 537242 - DNA, 281 bp, Homo sapiens
tgagggcacagggagaggtgcttaggctgaggaggagatttgagaaggcagcccctttggtcctatcagcagcttagaggaatatgaagcatgaaactgtggaagcctccttgctggctccttttttgaggaactgtctaaaaatgggaggcattcacaaggtagttctcttttccctctgcagtctttaagatataaattttaaaactgcagtttctgggattagagaagaaattgccaattattgaagtccaattttctctagtttggcccttatcgag

SEQ ID NO: 537243 - DNA, 206 bp, Homo sapiens
  misc_feature (64)..(64): n is a, c, g, or t
agactctagaggattcctggcaggcgaagcaggataacacgacatgtgaggggataagagaacnatttatcaggagcatccctctccaaaaactctggcttccacctcctttggaggtgcagctccaaagcagaaagatttttcctctgggctttctatttgacaccccgctttccctggacctcaccactggggagaagccagcc

SEQ ID NO: 537244 - DNA, 1454 bp, Homo sapiens
  misc_feature (502)..(502): n is a, c, g, or t
  misc_feature (540)..(540): n is a, c, g, or t
  misc_feature (769)..(769): n is a, c, g, or t
tgataattttccccggacttcctatgtatagcatgtatgactggagcagttgactgtgccactggagccaacgccataggatacagacataagtggagatgtttgcgccgtgtgcaatcggggcgaactcaaccacacgagagaccaacgagttccagtacttgacgtgacatagtgtatgcaacctcgaaacgaatctgcgggtatccattcggtagcatgagaacatgagtgtagtacgatgtaggtattgaacgatcctttgcgagacagggaaggaatcgtaaagtagtcgcattgcccattggcatgatgaacggacatcccatcgtcttccaatctattgcaatcgatgtccgtgagcagaagttctgatgtcatcacatccaggagggagctttgcatcgcggagttctccaagaccagagagaacaacttaagcacctgaagtcatcgtagcgactatgttcaaagacaaggcaggcgacgcagagcagttggntcgctaggccatcgttgccaatcgcgcagaaaacgccncgaatgtgtccccacgcatccatatatcgagcgcctaggctttggcccaactcgaggactgtgtccacgaaccgtaggcgttcactttatgcatggggactgcgcgtaaaaaggggaacgggaggtccgggcaggcgcggtcagatggtaaagtggaagcaaaatccaatgacagggtctgtgcgaaagtccgaggagaatgacagacgcagagagaaaggtctcgcanaggaggagacaaggacgccccagcgattgggcggggccgtgggacgtggcgtacggcgaaagcggagtgcccaccgcgccaatctttgtgggttggggtagggcagtcgcaaagagtacgcaaggtggcgtggtggcaatgtggcccgcgaaagggcgccctgcattgcgaaggggggaccatttaacaaatcggtcgcgggaaacggctcaacggacatagcgggatgggagcacgacaaagtgctgtggtcgttggagggccccagagaaacccccggagttctttccccaatggaaggtgcccccaggcgggtgttccagggccggcggggaaaggcccatttggctatgtttaagaccctgttcataaaagggattctcctcttggcctacagagacgaacgacaagggtcccagaaaccaggggcaaggacgcatggcacaaaggtggtcgtcctatgtaaacaccaacctacggccctaagaccagggcctaggacaagttccttccgccgttgggggccatgaagagggccacctcagtgggaacacgggcgcccccttgtgttaccaccacaggtgtgactttgagaatcacagcggagaggtccgagtagaaaaggtatgcgcgcgggcccttatgaaacaagggagtctctcaagcacccatggggggggcctcc

SEQ ID NO: 537245 - DNA, 575 bp, Homo sapiens
cggacgcgtgggcagcgcctttggaaaccgcaagaacctaaagcacaatgccgtgcccacggtgttcgcctttcaggaccccacacaggtgagggagaacacagaccctgccaggtgagcacgacggaaacattgcccagcttcttttctttcagaaaaggacaagggtctctgggggcgagactctggaattgccgctgagactatgccatgcagcgtaacgttccagagcgacagagtgtgcgcgagcctggctaagacccaacactctgtccgttgcttgatatcctaagattcctctagaagaagctcgaacctgcggcccaagctgtgagcgaggtgtcaccctcgtgctgcagggacgggactcagcagactgggcagacacgagctgagccccaaggtccggagcgagtgggggaccagccgaagttggagtcggtgtggactttgttgtggacctgaaagtggctgagctttggcggatcgagacgtagccactcccgggaacccatgcgctggggacgttagggtgcctagatgcctctgtgactgaagttctccatgtacgagtc

SEQ ID NO: 537246 - DNA, 926 bp, Homo sapiens
gggatggggagagacagccaggtatcgtgttgtatcacgtgtttgttttacacttgttggtgtactacacacctatggccgatgtctgtactaccgagtgataatcgctttgggcgccagtggccacccatgtggctttcagcgctgggcccaattacaggcgattgtgttacccagaagtccccgtggaccccacttgttggggctcccaaccctggaaatgggccaacaaagtgtgaaacgtccgggcgcaaagatgctccttgcggagcatacttatcccggggcgcgagccctaaattgtggttcactggagaccccgctaggtccaagagctccaaagcgtccaccgaaaccttgtgtgacaagcgacacatctttctactcttggacgtgtagtaacaaaaacgtcccacaagttttatatccgtgacacaccccccgtccccgccgatattagccaccacttttggtgaagggtacacccatccagaaacaaccacactcacctgtttagcctttgggtgaacaccaaaacccccggcccacccaagtagcgaaacctttaaaccttttttgtgatgaagttccccaccttttaaagaaattgtacaacagcgtgcaaataaagaaaccctcctttttcccagggaagggttaaaacctttgttgtcatgccaatcacatactccgcttatggcgattactaaccatcactccttgttcatccgtcatctaccgcccctccccttaggatttatgaagagaaagaaattgagactcccaaacgttaattctatcctgtttttcctttttctcgtttgtgtaaaacccacacccccttctttataaaaaaaaaaatttttttaacctttccccttttttttgtgctccaataaaaaaaaaagggaaaaaaccccaaaaaa

SEQ ID NO: 537247 - DNA, 450 bp, Homo sapiens
ctgcatagcccagaaatgttgaaaaattaagaaaatgttaggtatgtcacaagtacataaaatatatgtaaatattagtctattttatcatttactatcataaaatatacacaaatctattataaaaattaagaacatcaacatttatgcacacaaacaccaccgtccatagcaccatatgcagttgggagaaatgtaaacaaacataaagatacagtactaaatcataactgcataaaattaactgtagtaatactgtactactcaaataatttctacaactatactgctaccatactactttaataattttgtaaccacctcctgttgctgttgtgatgagctcaagtgttgtgaatctctgcttaaaaactgtgtcacgctaatcatctccctgtgagcagttagtctctccagtacattgtatattgcagtaaaaagtgatctcct

SEQ ID NO: 537248 - DNA, 172 bp, Homo sapiens
cgtaccaggtactgattagcacacactcctttgatagacacaactcctctctcttctgctcaagttgatagctatgatgtgaggttcgctcttctcccggaccccgtcaactcgagccgtcggggtggatgcacaagaagaagcccccgtatatgcagtacagccggggtac

SEQ ID NO: 537249 - DNA, 348 bp, Homo sapiens
acagctacgggaggtacagctgctgaaaggttgagagcttggttgtgggggtccatagtgaggcagatgctgtgcgtgaagaatctgctgtgaggcagatagtttgggactgtagagtgcctgacgggaggcagaggctggtgcctggaggggccaccaagatgcaggagctgggcctgtagaggctgcacacacgctctgatgcctgtgcctggtgaggtcgacttgagaaagttcatgtcctggagaggaatgcttgtgaggcagtagctgtggtctaaagagtgccattgtaactgatggagctttacctcaaccgtagctgtacctcaaccgttagttgtcctc

SEQ ID NO: 537250 - DNA, 140 bp, Homo sapiens
gggggggaaccccccccccccttttttaactggggggggggccccccggcccccccccaaagccctgtgaggggggggggttttttaaacttaaaaccggggttttttttggggaaaaaaaaaagggggttgggttttta

SEQ ID NO: 537251 - DNA, 353 bp, Homo sapiens
cacggtcagctctgccgcatcaacgctaagacaggaaattgacaaagcagcacctaaaatagctaattttttcatggtataaccctaataaaccaaattttgacagtgtattcacgagcagctacttcgaacaccgagcctagcttacatgaggatccttgggaataagcatgcatttctggccaattaggcttgcaaccctacagttgcgatcatcagcggtcctcgcgggtttgccataaacgcagcaggtaaataatagagcctgcaatctcatagcgcatttcatagtggccgatctgaattcggcgcacatcccgtggtcgaactctcccaggcgttcgccaatgcgc

SEQ ID NO: 537252 - DNA, 625 bp, Homo sapiens
gcccaagcctggctgagatgattcagaaaggtgagcagctattcctggagccagagctggtcatccccgcacgcgacagcacacgatgtcttcacggaccccactattcactgggcagcttcctgatcacccatggtcgcaccatgcgtgctcactgatgcctccttcaaggtgaagagccagcgtcgacagctctggagggccaggactgcaagtacaccaccgatgtttgggcccgaggaccgctacgcctgagtcctgacgcctcgctcagcgtcatcacagcaggcgcaaatgacagcagccaagtgccatctccgagcagtgtgcggagagcccggctggaccactccttcctctcatggctgggctttagctccatggacaccaatggctcctacacagccaagcgacctggacgagatggggcaagacagtgtccggaagacagatgaatacctggagaaggccctggagtacctgcgccagatattccgggctcagcgaagcgcagcctcaggcagttcacactcgccttgggcaccaggccaggatgagaatggaaaagaaagcaatccccgactgcatcgtgggtgaggacggactcatccttacgcccctgggt

SEQ ID NO: 537253 - DNA, 926 bp, Homo sapiens
  misc_feature (64)..(64): n is a, c, g, or t
  misc_feature (66)..(66): n is a, c, g, or t
  misc_feature (73)..(73): n is a, c, g, or t
  misc_feature (84)..(84): n is a, c, g, or t
  misc_feature (93)..(93): n is a, c, g, or t
  misc_feature (95)..(95): n is a, c, g, or t
  misc_feature (102)..(102): n is a, c, g, or t
  misc_feature (110)..(110): n is a, c, g, or t
  misc_feature (113)..(113): n is a, c, g, or t
  misc_feature (128)..(128): n is a, c, g, or t
  misc_feature (146)..(146): n is a, c, g, or t
  misc_feature (148)..(148): n is a, c, g, or t
  misc_feature (152)..(152): n is a, c, g, or t
  misc_feature (156)..(157): n is a, c, g, or t
  misc_feature (159)..(160): n is a, c, g, or t
  misc_feature (165)..(165): n is a, c, g, or t
  misc_feature (176)..(176): n is a, c, g, or t
  misc_feature (181)..(182): n is a, c, g, or t
  misc_feature (211)..(211): n is a, c, g, or t
  misc_feature (216)..(216): n is a, c, g, or t
  misc_feature (331)..(331): n is a, c, g, or t
  misc_feature (365)..(365): n is a, c, g, or t
  misc_feature (711)..(711): n is a, c, g, or t
  misc_feature (713)..(713): n is a, c, g, or t
  misc_feature (922)..(922): n is a, c, g, or t
aatatggcaataaatgcttgaaaaatacacattttaaacttaaaaggatattgaaaacaattantntaaaagnaattaccaatnaaacctaangntggtagntgtaaaancanttgattagatatatnttttggtttttttatatntntttntttnntnnggggnagttgattttnttttnnttactgttcccatctgagagaagtatggnatttnttaattgggaccatttgtgggaagacattgagaaagctcctttgagacacttttttttctgcttggccaactgctctagaaagaagaaacgtcaaggtgggtggagacagtggtntgggcccaccaccctcccggctgaacagcctgtnatgctatttccaaagagaactcgccaggaggggagatgactgcagaacaccaggagatggatagaatagggtaggctttaggtgcagcgtgtggcccccccatcctggggcccccagggaggaagagggggcttccgttgagataaaggccacatgccttaggaaatatccccccagaaagaacccaaaggtccagtgttcttgcagatccaatggagtccttgtagaagggaaggtggatggtgacgcctgctggggtcatgtagcggttgttcagtcagcgttcttgggggccttgcatgtgtgcacatccagagcttccaggcagtcctgacagcgcacggcnanacccagtggaacttacacccacacttggtcatccgggtgacatgggaggtgtcgtagcctctcccacagcacatgacttcacagctgtccatgccccgggaagtcaggttgcacacacggcctgctgtacccagggagcctgcctctcggtctctgatacagtagtctggagaattctcaaaatacacgaggtcatttttcgtggcttnttaa

SEQ ID NO: 537254 - DNA, 408 bp, Homo sapiens
ggctgcaggatacggcacgagcacgagattgagaccagcctgtgcaacacagcgagactctgtctcaaaaaaaaagaaagagtgaaagtgaaaaaaataatgtttctgtattactgtgtaggtttaactttatggaatttctggaccattctttgggaactgcttctgtgcattatcaggttctcacttacagtggttggacttatgaattttcatctttacagtgatgccaaagcaatatgcatttagtagaaattatactctaagtacccttacaaccattctgttttcacttacacggtagtattccataaattatatgagatattcaacactttattatctgagcatgtttaagggaggccccgctaaactgtgatggtcagtattaattttgcgtttttcctt

SEQ ID NO: 537255 - DNA, 1073 bp, Homo sapiens
tcttgaaacatttacacagtattaagtaaggtgggcaagcagttctaaccagttggtaattataggtctattcatatcttctataaacacaccctacacaaatattattgtccctatttacaccccatttttcactattatagaggaaaacgagaaaacacgaggcacaatataacatctgtgctccagggcccccgagctaagtgaaggggtgtgcataggatttgtgcccccaggacagctcgtggccctcatttttaaccctctccatctccagtgcgtggtgaagtggcttattctcattctcacaatgtgtgtgggagaaggggggaatatttgtggaaaccgtgatctcataagaacccagggcaatgagagagaagcgccaagaaaggcgcgccctatattccacaactcctcacaaacccccggtggggcttctcttgggagaatagtgaaaagcgcagggcacatctctctctcaaaaatgtgtgctgtcgccaagggagagtcgccccacaattttttctcgagggggggaaacacccagaattctataaacagtgtggggaaaacgcctcgtgtgtttaaacctgtgtgcccaaaatgtgatatcactctttgcgtgtttcccactgtggcgctataaatatttgagacctcgggtatattgggccccatttggatacatttccttgtgtgcgcgtgcaacacaaacactatagccaagtcttctctatatataacccgagtttgtgcgcactacgcacgggggttacactgggggctctttaaaatattttccaccgtgggaaccaacgttgtttacaaaatatctgcgcgaggtataaagcaaagtacacgggtgcttaaaacattcgtgggaatttcacgcgacagcgagaattaccctttttaaggaaaaactcttatctttcgtgtgggccacaacactcgtgggcatgtttgcgagaaaacagtcctcgggagacagtgtttggcaagactttaattcactattataagcgtggcaagaaaagttgtctccacaaaaattatattatcaccccccc

SEQ ID NO: 537256 - DNA, 798 bp, Homo sapiens
ctgctaggtagcgaggctgggctgctctgccgcctccggcagccgcgccgctccctccgctgcactgcccaggctctgagcagctgatggccacctgggcctgcgcgctcccagcttctgctcgtgacgctggcttctgtgccctgcagatgggttctgtggccctggactgcggctgagatgctgtggcccatgtgactggtgctgtcctggcctcgccctgtggctgctcgcaccaacaagtttgaacaatgatcacctgtcaaccccgatgggaagataatggtcagaagatgcctggtcaccctgagaccctttcggcttttttgtcctgggcatcggcttcttcactctctgcttcctgatgacgtctctgtgtgagtgccagttctctgtgccctggctgcctggtgggactctgccattcaccatcctgcacatgaatgtgatgtgggggcccctgagtccctgctggctgtcctgcgcaatgatgagcgacctgctggagctgatggtgaatgcgcatggactgcacttgtgccatgtgctggagaacatgcatgtgatgctgcacctgggcctggctggctgacctgcactttccctgcagacatgtgatgccccctggggccgtgcctcatggatctggatccagtgctatttgcccagaactgtctcctgacatcgctgtgaagtgtggaccagatccttgcgccacagtctgctcctgcaccagaaggtgtcagaagtgctggtgggaccagttgttaaggcacccagtgacccaagttcctgacg

SEQ ID NO: 537257 - DNA, 193 bp, Homo sapiens
  misc_feature (17)..(17): n is a, c, g, or t
  misc_feature (64)..(64): n is a, c, g, or t
tcggcggtccggcgcanggtgctatgatgcacacacaaattatccagaatgtgagtttcttttngataaacaaaagaaaaaaggtgactaaaaccccctaacacagcgaatctttcttctcaattaaatcatgccaagaagaaatatcaatgtaatgttatgtaactcagcatcactcggcacgcgtgcgccg

SEQ ID NO: 537258 - DNA, 311 bp, Homo sapiens
  misc_feature (2)..(2): n is a, c, g, or t
cntagaggatccttttctctgatcgctcacttgaacccgggaggcggaggttgctgtgagccaagatcgtgccattgtactccagcctgggtgacgagcgaaactccgtctcaaaaataaaaaaaaaaaaaaaaaaaggccgggcttgagggtgagtgcctgaaatcccagttactcggaaggctgaggtcggaaaatcgtttgaccccgggtggcaagggttggcagtgaacccagggccagtgccattaccattatattctagccggggaaacaggagtgagacttccatctaaaaacaaacaaacaaa

SEQ ID NO: 537259 - DNA, 979 bp, Homo sapiens
  misc_feature (57)..(57): n is a, c, g, or t
  misc_feature (63)..(64): n is a, c, g, or t
  misc_feature (66)..(67): n is a, c, g, or t
  misc_feature (76)..(76): n is a, c, g, or t
  misc_feature (86)..(87): n is a, c, g, or t
  misc_feature (89)..(89): n is a, c, g, or t
  misc_feature (99)..(99): n is a, c, g, or t
  misc_feature (135)..(136): n is a, c, g, or t
  misc_feature (140)..(140): n is a, c, g, or t
  misc_feature (158)..(158): n is a, c, g, or t
  misc_feature (166)..(166): n is a, c, g, or t
  misc_feature (182)..(182): n is a, c, g, or t
  misc_feature (206)..(206): n is a, c, g, or t
  misc_feature (215)..(216): n is a, c, g, or t
  misc_feature (275)..(275): n is a, c, g, or t
  misc_feature (291)..(291): n is a, c, g, or t
  misc_feature (334)..(334): n is a, c, g, or t
  misc_feature (372)..(372): n is a, c, g, or t
  misc_feature (428)..(428): n is a, c, g, or t
  misc_feature (430)..(430): n is a, c, g, or t
  misc_feature (458)..(458): n is a, c, g, or t
  misc_feature (465)..(465): n is a, c, g, or t
  misc_feature (467)..(467): n is a, c, g, or t
  misc_feature (474)..(474): n is a, c, g, or t
  misc_feature (479)..(479): n is a, c, g, or t
  misc_feature (503)..(503): n is a, c, g, or t
  misc_feature (505)..(505): n is a, c, g, or t
  misc_feature (509)..(509): n is a, c, g, or t
  misc_feature (515)..(515): n is a, c, g, or t
  misc_feature (519)..(519): n is a, c, g, or t
  misc_feature (530)..(530): n is a, c, g, or t
  misc_feature (532)..(532): n is a, c, g, or t
  misc_feature (536)..(537): n is a, c, g, or t
  misc_feature (557)..(557): n is a, c, g, or t
  misc_feature (726)..(726): n is a, c, g, or t
  misc_feature (790)..(790): n is a, c, g, or t
  misc_feature (799)..(799): n is a, c, g, or t
  misc_feature (803)..(803): n is a, c, g, or t
  misc_feature (841)..(841): n is a, c, g, or t
  misc_feature (892)..(892): n is a, c, g, or t
  misc_feature (967)..(967): n is a, c, g, or t
ttaaatcgtttatagattacacatgataatggtttacaagcatcattcccatctatnattttnncnngtaccattnttcattttanntntattgcttangttgtgccatttatcacttttataaccattccatcnntttncttgggtaatcccttttnatggtgancttcaggtcacaacanttactatcagttcaactacaccanggtttccgnngacaatggcttctccacccaagcaggttgtatataaattccaaatagaacctggcatcnccctgcaggaattctnacttcacactgttggggaaatttaccaagatggcttaagagtngactaactttacacagcacattaaaaaaaagacatttnttcagcgtcacgatcagactgttacatttagcaatcaacagcatggggtgcaaaananaaatctacattaaaaccctttgttggantgctttncnctttccncagancagaaactaaaataacctgttatncnattngtcccnaatnccgtcctcgcntntttnncccatacccttgagtctttntctcccacatgtcttctttgtagcagctaggccctgccaccactgtgcttggctgagttcacaaatctgttgtaacctgtagcttccctgtcacttctctggctctcctctcctgctaagctttgtttcctaattaaaatcttctgccactgccatagctactgctgcngctggaaccgccatagccaccttggtttcgtggttttgcaaagtattggcctccaccgccatangggccagancttntgcctccaaaatttcctcccttcatgggtccaaaattngaagactgattgtcgttattcccaaaatcattgtagcttccaccacctccnaaaattgcttccatcattaccaaatccattatagccatccccactgccaccatatccaccaccaccacgggtgcnaccaaagccacc

SEQ ID NO: 537260 - DNA, 4149 bp, Homo sapiens
gaattcttagttgttttctttagaagaacatttctagggaataatacaagaagatttaggaatcattgaagttataaatctttggaatgagcaaactcagaatggtgctacttgaagactctggatctgctgacttcagaagacattttgtcaacctgagtcccttcaccattactgtggtcttacttctcagtgcctgttttgtcaccagttctcttggaggaacagacaaggagctgaggctagtggatggtgaaaacaagtgtagcgggagagtggaagtgaaagtccaggaggagtggggaacggtgtgtaataatggctggagcatggaagcggtctctgtgatttgtaaccagctgggatgtccaactgctatcaaagcccctggatgggctaattccagtgcaggttctggacgcatttggatggatcatgtttcttgtcgtgggaatgagtcagctctttgggattgcaaacatgatggatggggaaagcatagtaactgtactcaccaacaagatgctggagtgacctgctcagatggatccaatttggaaatgaggctgacgcgtggagggaatatgtgttctggaagaatagagatcaaattccaaggacggtggggaacagtgtgtgatgataacttcaacatagatcatgcatctgtcatttgtagacaacttgaatgtggaagtgctgtcagtttctctggttcatctaattttggagaaggctctggaccaatctggtttgatgatcttatatgcaacggaaatgagtcagctctctggaactgcaaacatcaaggatggggaaagcataactgtgatcatgctgaggatgctggagtgatttgctcaaagggagcagatctgagcctgagactggtagatggagtcactgaatgttcaggaagattagaagtgagattccaaggagaatgggggacaatatgtgatgacggctgggacagttacgatgctgctgtggcatgcaagcaactgggatgtccaactgccgtcacagccattggtcgagttaacgccagtaagggatttggacacatctggcttgacagcgtttcttgccagggacatgaacctgctgtctggcaatgtaaacaccatgaatggggaaagcattattgcaatcacaatgaagatgctggcgtgacatgttctgatggatcagatctggagctaagacttagaggtggaggcagccgctgtgctgggacagttgaggtggagattcagagactgttagggaaggtgtgtgacagaggctggggactgaaagaagctgatgtggtttgcaggcagctgggatgtggatctgcactcaaaacatcttatcaagtgtactccaaaatccaggcaacaaacacatggctgtttctaagtagctgtaacggaaatgaaacttctctttgggactgcaagaactggcaatggggtggacttacctgtgatcactatgaagaagccaaaattacctgctcagcccacagggaacccagactggttggaggggacattccctgttctggacgtgttgaagtgaagcatggtgacacgtggggctccatctgtgattcggacttctctctggaagctgccagcgttctatgcagggaattacagtgtggcacagttgtctctatcctggggggagctcactttggagagggaaatggacagatctgggctgaagaattccagtgtgagggacatgagtcccatctttcactctgcccagtagcaccccgcccagaaggaacttgtagccacagcagggatgttggagtagtctgctcaagatacacagaaattcgcttggtgaatggcaagaccccgtgtgagggcagagtggagctcaaaacgcttggtgcctggggatccctctgtaactctcactgggacatagaagatgcccatgttctttgccagcagcttaaatgtggagttgccctttctaccccaggaggagcacgttttggaaaaggaaatggtcagatctggaggcatatgtttcactgcactgggactgagcagcacatgggagattgtcctgtaactgctctaggtgcttcattatgtccttcagagcaagtggcctctgtaatctgctcaggaaaccagtcccaaacactgtcctcgtgcaattcatcgtctttgggcccaacaaggcctaccattccagaagaaagtgctgtggcctgcatagagagtggtcaacttcgcctggtaaatggaggaggtcgctgtgctgggagagtagagatctatcatgagggctcctggggcaccatctgtgatgacagctgggacctgagtgatgcccacgtggtttgcagacagctgggctgtggagaggccattaatgccactggttctgctcattttggggaaggaacagggcccatctggctggatgagatgaaatgcaatggaaaagaatcccgcatttggcagtgccattcacacggctgggggcagcaaaattgcaggcacaaggaggatgcgggagttatctgctcagaattcatgtctctgagactgaccagtgaagccagcagagaggcctgtgcagggcgtctggaagttttttacaatggagcttggggcactgttggcaagagtagcatgtctgaaaccactgtgggtgtggtgtgcaggcagctgggctgtgcagacaaagggaaaatcaaccctgcatctttagacaaggccatgtccattcccatgtgggtggacaatgttcagtgtccaaaaggacctgacacgctgtggcagtgcccatcatctccatgggagaagagactggccagcccctcggaggagacctggatcacatgtgacaacaagataagacttcaggaaggacccacttcctgttctggacgtgtggagatctggcatggaggttcctgggggacagtgtgtgatgactcttgggacttggacgatgctcaggtggtgtgtcaacaacttggctgtggtccagctttgaaagcattcaaagaagcagagtttggtcaggggactggaccgatatggctcaatgaagtgaagtgcaaagggaatgagtcttccttgtgggattgtcctgccagacgctggggccatagtgagtgtgggcacaaggaagacgctgcagtgaattgcacagatatttcagtgcagaaaaccccacaaaaagccacaacaggtcgctcatcccgtcagtcatcctttattgcagtcgggatccttggggttgttctgttggccattttcgtcgcattattcttcttgactaaaaagcgaagacagagacagcggcttgcagtttcctcaagaggagagaacttagtccaccaaattcaataccgggagatgaattcttgcctgaatgcagatgatctggacctaatgaattcctcagaaaattcccatgagtcagctgatttcagtgctgctgaactaatttctgtgtctaaatttcttcctatttctggaatggaaaaggaggccattctgagccacactgaaaaggaaaatgggaatttataacccagtgagttcagcctttaagataccttgatgaagacctggactattgaatggagcagaaattcacctctctcactgactattacagttgcatttttatggagttcttcttctcctaggattcctaagactgctgctgaatttataaaaattaagtttgtgaatgtgactacttagtggtgtatatgagactttcaagggaattaaataaataaataagaatgttattgatttgagtttgctttaattacttgtccttaattctattaatttctaaatgggcttcctaattttttgtagagtttcctagatgtattataatgtgttttatttgacagtgtttcaatttgcatatacagtactgtatattttttcttatttggtttgaataattttcctattaccaaataaaaataaatttatttttactttagtttttctaagacaggaaaagttaatgatattgaagggtctgtaaataatatatggctaactttataaggcatgactcacaacgattctttaactgctttttgttactgtaattctgttcactagaataaaatgcagagccacacctggtgggggccca

SEQ ID NO: 537261 - DNA, 683 bp, Homo sapiens
gaggcgggttatctgactcttaggagcaaaaaggtctcacagactaagcctggtctgggctccagaacacacattgcctgctgtcataatacagtatgaacgcgtccaatgagtacaccgaagaataccgtacggtcttgactgaagaatcatgtgggctgcaaatatgggatgttgccactgccagggatcaagccatataggaggaccggcaaggtgccggacggcatattgagaataaaacgcgacaaaagatctgcgcagctcattacaaacatggcgggagtgtacacttgctgtcactgtcgcccaggttcaagaggacacttgccacatacttgccagaaccggggactgtaggatgtcccctctgacaaactatgctcccattacgtcctataatgaccactacattgacacagcagctatagcattgtctgacgtacaggtgactgactcaacactagaggcttacgcatcccgaaaaacaagaccctatactggggggaccttgagaattaacacgactactggaacaagatctgtaactttgtcacgcctgattaatcactggggagaaaattctcagaggtgccaaaattaagattttgcgggatgctttatacaaagtaccgaagttccctcgacaaaattaaagcaccctgttggggcaaaaattttcg

SEQ ID NO: 537262 - DNA, 4011 bp, Homo sapiens
gaattcttagttgttttctttagaagaacatttctagggaataatacaagaagatttaggaatcattgaagttataaatctttggaatgagcaaactcagaatggtgctacttgaagactctggatctgctgacttcagaagacattttgtcaacctgagtcccttcaccattactgtggtcttacttctcagtgcctgttttgtcaccagttctcttggaggaacagacaaggagctgaggctagtggatggtgaaaacaagtgtagcgggagagtggaagtgaaagtccaggaggagtggggaacggtgtgtaataatggctggagcatggaagcggtctctgtgatttgtaaccagctgggatgtccaactgctatcaaagcccctggatgggctaattccagtgcaggttctggacgcatttggatggatcatgtttcttgtcgtgggaatgagtcagctctttgggattgcaaacatgatggatggggaaagcatagtaactgtactcaccaacaagatgctggagtgacctgctcagatggatccaatttggaaatgaggctgacgcgtggagggaatatgtgttctggaagaatagagatcaaattccaaggacggtggggaacagtgtgtgatgataacttcaacatagatcatgcatctgtcatttgtagacaacttgaatgtggaagtgctgtcagtttctctggttcatctaattttggagaaggctctggaccaatctggtttgatgatcttatatgcaacggaaatgagtcagctctctggaactgcaaacatcaaggatggggaaagcataactgtgatcatgctgaggatgctggagtgatttgctcaaagggagcagatctgagcctgagactggtagatggagtcactgaatgttcaggaagattagaagtgagattccaaggagaatgggggacaatatgtgatgacggctgggacagttacgatgctgctgtggcatgcaagcaactgggatgtccaactgccgtcacagccattggtcgagttaacgccagtaagggatttggacacatctggcttgacagcgtttcttgccagggacatgaacctgctgtctggcaatgtaaacaccatgaatggggaaagcattattgcaatcacaatgaagatgctggcgtgacatgttctgatggatcagatctggagctaagacttagaggtggaggcagccgctgtgctgggacagttgaggtggagattcagagactgttagggaaggtgtgtgacagaggctggggactgaaagaagctgatgtggtttgcaggcagctgggatgtggatctgcactcaaaacatcttatcaagtgtactccaaaatccaggcaacaaacacatggctgtttctaagtagctgtaacggaaatgaaacttctctttgggactgcaagaactggcaatggggtggacttacctgtgatcactatgaagaagccaaaattacctgctcagcccacagggaacccagactggttggaggggacattccctgttctggacgtgttgaagtgaagcatggtgacacgtggggctccatctgtgattcggacttctctctggaagctgccagcgttctatgcagggaattacagtgtggcacagttgtctctatcctggggggagctcactttggagagggaaatggacagatctgggctgaagaattccagtgtgagggacatgagtcccatctttcactctgcccagtagcaccccgcccagaaggaacttgtagccacagcagggatgttggagtagtctgctcaagatacacagaaattcgcttggtgaatggcaagaccccgtgtgagggcagagtggagctcaaaacgcttggtgcctggggatccctctgtaactctcactgggacatagaagatgcccatgttctttgccagcagcttaaatgtggagttgccctttctaccccaggaggagcacgttttggaaaaggaaatggtcagatctggaggcatatgtttcactgcactgggactgagcagcacatgggagattgtcctgtaactgctctaggtgcttcattatgtccttcagagcaagtggcctctgtaatctgctcaggaaaccagtcccaaacactgtcctcgtgcaattcatcgtctttgggcccaacaaggcctaccattccagaagaaagtgctgtggcctgcatagagagtggtcaacttcgcctggtaaatggaggaggtcgctgtgctgggagagtagagatctatcatgagggctcctggggcaccatctgtgatgacagctgggacctgagtgatgcccacgtggtttgcagacagctgggctgtggagaggccattaatgccactggttctgctcattttggggaaggaacagggcccatctggctggatgagatgaaatgcaatggaaaagaatcccgcatttggcagtgccattcacacggctgggggcagcaaaattgcaggcacaaggaggatgcgggagttatctgctcagaattcatgtctctgagactgaccagtgaagccagcagagaggcctgtgcagggcgtctggaagttttttacaatggagcttggggcactgttggcaagagtagcatgtctgaaaccactgtgggtgtggtgtgcaggcagctgggctgtgcagacaaagggaaaatcaaccctgcatctttagacaaggccatgtccattcccatgtgggtggacaatgttcagtgtccaaaaggacctgacacgctgtggcagtgcccatcatctccatgggagaagagactggccagcccctcggaggagacctggatcacatgtgacaacaagataagacttcaggaaggacccacttcctgttctggacgtgtggagatctggcatggaggttcctgggggacagtgtgtgatgactcttgggacttggacgatgctcaggtggtgtgtcaacaacttggctgtggtccagctttgaaagcattcaaagaagcagagtttggtcaggggactggaccgatatggctcaatgaagtgaagtgcaaagggaatgagtcttccttgtgggattgtcctgccagacgctggggccatagtgagtgtgggcacaaggaagacgctgcagtgaattgcacagatatttcagtgcagaaaaccccacaaaaagccacaacaggtcgctcatcccgtcagtcatcctttattgcagtcgggatccttggggttgttctgttggccattttcgtcgcattattcttcttgactaaaaagcgaagacagagacagcggcttgcagtttcctcaagaggagagaacttagtccaccaaattcaataccgggagatgaattcttgcctgaatgcagatgatctggacctaatgaattcctcaggaggccattctgagccacactggaagacctggactattgaatggagcagaaattcacctctctcactgactattacagttgcatttttatggagttcttcttctcctaggattcctaagactgctgctgaatttataaaaattaagtttgtgaatgtgactacttagtggtgtatatgagactttcaagggaattaaataaataaataagaatgttattgatttgagtttgctttaattacttgtccttaattctattaatttctaaatgggcttcctaattttttgtagagtttcctagatgtattataatgtgttttatttgacagtgtttcaatttgcatatacagtactgtatattttttcttatttggtttgaataattttcctattaccaaataaaaataaatttatttttactttagtttttctaagacaggaaaagttaatgatattgaagggtctgtaaataatatatggctaactttataaggcatgactcacaacgattctttaactgctttttgttactgtaattctgttcactagaataaaatgcagagccacacctggtgggggccca

SEQ ID NO: 537263 - DNA, 160 bp, Homo sapiens
aactagtgtgtgtgtagtagtaagcagagtacacccacacttacatcagcacttatatcaactgccccatattaggacttgcctaacattctccaataaagttacacatagtccaggattaaattgtgttttctatacattttccagaggatgacatact

SEQ ID NO: 537264 - DNA, 3280 bp, Homo sapiens
gaattcttagttgttttctttagaagaacatttctagggaataatacaagaagatttaggaatcattgaagttataaatctttggaatgagcaaactcagaatggtgctacttgaagactctggatctgctgacttcagaagacattttgtcaacctgagtcccttcaccattactgtggtcttacttctcagtgcctgttttgtcaccagttctcttggaggaacagacaaggagctgaggctagtggatggtgaaaacaagtgtagcgggagagtggaagtgaaagtccaggaggagtggggaacggtgtgtaataatggctggagcatggaagcggtctctgtgatttgtaaccagctgggatgtccaactgctatcaaagcccctggatgggctaattccagtgcaggttctggacgcatttggatggatcatgtttcttgtcgtgggaatgagtcagctctttgggattgcaaacatgatggatggggaaagcatagtaactgtactcaccaacaagatgctggagtgacctgctcagatggatccaatttggaaatgaggctgacgcgtggagggaatatgtgttctggaagaatagagatcaaattccaaggacggtggggaacagtgtgtgatgataacttcaacatagatcatgcatctgtcatttgtagacaacttgaatgtggaagtgctgtcagtttctctggttcatctaattttggagaaggctctggaccaatctggtttgatgatcttatatgcaacggaaatgagtcagctctctggaactgcaaacatcaaggatggggaaagcataactgtgatcatgctgaggatgctggagtgatttgctcaaagggagcagatctgagcctgagactggtagatggagtcactgaatgttcaggaagattagaagtgagattccaaggagaatgggggacaatatgtgatgacggctgggacagttacgatgctgctgtggcatgcaagcaactgggatgtccaactgccgtcacagccattggtcgagttaacgccagtaagggatttggacacatctggcttgacagcgtttcttgccagggacatgaacctgctgtctggcaatgtaaacaccatgaatggggaaagcattattgcaatcacaatgaagatgctggcgtgacatgttctgatggatcagatctggagctaagacttagaggtggaggcagccgctgtgctgggacagttgaggtggagattcagagactgttagggaaggtgtgtgacagaggctggggactgaaagaagctgatgtggtttgcaggcagctgggatgtggatctgcactcaaaacatcttatcaagtgtactccaaaatccaggcaacaaacacatggctgtttctaagtagctgtaacggaaatgaaacttctctttgggactgcaagaactggcaatggggtggacttacctgtgatcactatgaagaagccaaaattacctgctcagcccacagggaacccagactggttggaggggacattccctgttctggacgtgttgaagtgaagcatggtgacacgtggggctccatctgtgattcggacttctctctggaagctgccagcgttctatgcagggaattacagtgtggcacagttgtctctatcctggggggagctcactttggagagggaaatggacagatctgggctgaagaattccagtgtgagggacatgagtcccatctttcactctgcccagtagcaccccgcccagaaggaacttgtagccacagcagggatgttggagtagtctgctcaagatacacagaaattcgcttggtgaatggcaagaccccgtgtgagggcagagtggagctcaaaacgcttggtgcctggggatccctctgtaactctcactgggacatagaagatgcccatgttctttgccagcagcttaaatgtggagttgccctttctaccccaggaggagcacgttttggaaaaggaaatggtcagatctggaggcatatgtttcactgcactgggactgagcagcacatgggagattgtcctgtaactgctctaggtgcttcattatgtccttcagagcaagtggcctctgtaatctgctcaggaaaccagtcccaaacactgtcctcgtgcaattcatcgtctttgggcccaacaaggcctaccattccagaagaaagtgctgtggcctgcatagagagtggtcaacttcgcctggtaaatggaggaggtcgctgtgctgggagagtagagatctatcatgagggctcctggggcaccatctgtgatgacagctgggacctgagtgatgcccacgtggtttgcagacagctgggctgtggagaggccattaatgccactggttctgctcattttggggaaggaacagggcccatctggctggatgagatgaaatgcaatggaaaagaatcccgcatttggcagtgccattcacacggctgggggcagcaaaattgcaggcacaaggaggatgcgggagttatctgctcagaattcatgtctctgagactgaccagtgaagccagcagagaggcctgtgcagggcgtctggaagttttttacaatggagcttggggcactgttggcaagagtagcatgtctgaaaccactgtgggtgtggtgtgcaggcagctgggctgtgcagacaaagggaaaatcaaccctgcatctttagacaaggccatgtccattcccatgtgggtggacaatgttcagtgtccaaaaggacctgacacgctgtggcagtgcccatcatctccatgggagaagagactggccagcccctcggaggagacctggatcacatgtgacaacaagataagacttcaggaaggacccacttcctgttctggacgtgtggagatctggcatggaggttcctgggggacagtgtgtgatgactcttgggacttggacgatgctcaggtggtgtgtcaacaacttggctgtggtccagctttgaaagcattcaaagaagcagagtttggtcaggggactggaccgatatggctcaatgaagtgaagtgcaaagggaatgagtcttccttgtgggattgtcctgccagacgctggggccatagtgagtgtgggcacaaggaagacgctgcagtgaattgcacaggtaagtgccagaagcctggattgagcttggaatctctggcagcaagagggttgggcagtgatgtgtgttgtgcctgccgaattcggtaccagctcgattcgtatca

SEQ ID NO: 537265 - DNA, 255 bp, Homo sapiens
  misc_feature (11)..(12): n is a, c, g, or t
  misc_feature (39)..(39): n is a, c, g, or t
  misc_feature (73)..(73): n is a, c, g, or t
  misc_feature (82)..(82): n is a, c, g, or t
  misc_feature (99)..(100): n is a, c, g, or t
  misc_feature (114)..(114): n is a, c, g, or t
  misc_feature (122)..(122): n is a, c, g, or t
  misc_feature (151)..(151): n is a, c, g, or t
  misc_feature (155)..(155): n is a, c, g, or t
  misc_feature (182)..(182): n is a, c, g, or t
  misc_feature (188)..(188): n is a, c, g, or t
  misc_feature (192)..(192): n is a, c, g, or t
  misc_feature (194)..(194): n is a, c, g, or t
  misc_feature (199)..(199): n is a, c, g, or t
  misc_feature (204)..(204): n is a, c, g, or t
  misc_feature (213)..(213): n is a, c, g, or t
  misc_feature (218)..(218): n is a, c, g, or t
gcggacttttnncaagctggtctttcttccccagtgtanggaatcctcctactaaaacaccaacaacaaaacncgccagctnttaagtgccgcagttannggggctagtcaggncatttttntaactaagaatcaccagatacccaccatngtanctatcgcagttttagtcgttctcccancccagngccngnaggtntcctnatattaccncagantctatttcctttttcatttacagctttataattagaa

SEQ ID NO: 537266 - DNA, 256 bp, Homo sapiens
tacccaaactgagctggatggggaggggatgtatcctgacacccacagggaccaagtgtcatgaagattgttgcttgatctctcaccactagtttgtgatgtccccgttaggacgataggtggtcatgggacccacatcaggagggggtgagggcaccggggcctccatgatgagcaccactgggctccgactgccattgaggacacgatgccccccgggacctttgacacccgggggtatgaggggccctggtta

SEQ ID NO: 537267 - DNA, 3576 bp, Homo sapiens
gaattcttagttgttttctttagaagaacatttctagggaataatacaagaagatttaggaatcattgaagttataaatctttggaatgagcaaactcagaatggtgctacttgaagactctggatctgctgacttcagaagacattttgtcaacctgagtcccttcaccattactgtggtcttacttctcagtgcctgttttgtcaccagttctcttggaggaacagacaaggagctgaggctagtggatggtgaaaacaagtgtagcgggagagtggaagtgaaagtccaggaggagtggggaacggtgtgtaataatggctggagcatggaagcggtctctgtgatttgtaaccagctgggatgtccaactgctatcaaagcccctggatgggctaattccagtgcaggttctggacgcatttggatggatcatgtttcttgtcgtgggaatgagtcagctctttgggattgcaaacatgatggatggggaaagcatagtaactgtactcaccaacaagatgctggagtgacctgctcagatggatccaatttggaaatgaggctgacgcgtggagggaatatgtgttctggaagaatagagatcaaattccaaggacggtggggaacagtgtgtgatgataacttcaacatagatcatgcatctgtcatttgtagacaacttgaatgtggaagtgctgtcagtttctctggttcatctaattttggagaaggctctggaccaatctggtttgatgatcttatatgcaacggaaatgagtcagctctctggaactgcaaacatcaaggatggggaaagcataactgtgatcatgctgaggatgctggagtgatttgctcaaagggagcagatctgagcctgagactggtagatggagtcactgaatgttcaggaagattagaagtgagattccaaggagaatgggggacaatatgtgatgacggctgggacagttacgatgctgctgtggcatgcaagcaactgggatgtccaactgccgtcacagccattggtcgagttaacgccagtaagggatttggacacatctggcttgacagcgtttcttgccagggacatgaacctgctgtctggcaatgtaaacaccatgaatggggaaagcattattgcaatcacaatgaagatgctggcgtgacatgttctgatggatcagatctggagctaagacttagaggtggaggcagccgctgtgctgggacagttgaggtggagattcagagactgttagggaaggtgtgtgacagaggctggggactgaaagaagctgatgtggtttgcaggcagctgggatgtggatctgcactcaaaacatcttatcaagtgtactccaaaatccaggcaacaaacacatggctgtttctaagtagctgtaacggaaatgaaacttctctttgggactgcaagaactggcaatggggtggacttacctgtgatcactatgaagaagccaaaattacctgctcagcccacagggaacccagactggttggaggggacattccctgttctggacgtgttgaagtgaagcatggtgacacgtggggctccatctgtgattcggacttctctctggaagctgccagcgttctatgcagggaattacagtgtggcacagttgtctctatcctggggggagctcactttggagagggaaatggacagatctgggctgaagaattccagtgtgagggacatgagtcccatctttcactctgcccagtagcaccccgcccagaaggaacttgtagccacagcagggatgttggagtagtctgctcaagatacacagaaattcgcttggtgaatggcaagaccccgtgtgagggcagagtggagctcaaaacgcttggtgcctggggatccctctgtaactctcactgggacatagaagatgcccatgttctttgccagcagcttaaatgtggagttgccctttctaccccaggaggagcacgttttggaaaaggaaatggtcagatctggaggcatatgtttcactgcactgggactgagcagcacatgggagattgtcctgtaactgctctaggtgcttcattatgtccttcagagcaagtggcctctgtaatctgctcaggaaaccagtcccaaacactgtcctcgtgcaattcatcgtctttgggcccaacaaggcctaccattccagaagaaagtgctgtggcctgcatagagagtggtcaacttcgcctggtaaatggaggaggtcgctgtgctgggagagtagagatctatcatgagggctcctggggcaccatctgtgatgacagctgggacctgagtgatgcccacgtggtttgcagacagctgggctgtggagaggccattaatgccactggttctgctcattttggggaaggaacagggcccatctggctggatgagatgaaatgcaatggaaaagaatcccgcatttggcagtgccattcacacggctgggggcagcaaaattgcaggcacaaggaggatgcgggagttatctgctcagaattcatgtctctgagactgaccagtgaagccagcagagaggcctgtgcagggcgtctggaagttttttacaatggagcttggggcactgttggcaagagtagcatgtctgaaaccactgtgggtgtggtgtgcaggcagctgggctgtgcagacaaagggaaaatcaaccctgcatctttagacaaggccatgtccattcccatgtgggtggacaatgttcagtgtccaaaaggacctgacacgctgtggcagtgcccatcatctccatgggagaagagactggccagcccctcggaggagacctggatcacatgtgacaacaagataagacttcaggaaggacccacttcctgttctggacgtgtggagatctggcatggaggttcctgggggacagtgtgtgatgactcttgggacttggacgatgctcaggtggtgtgtcaacaacttggctgtggtccagctttgaaagcattcaaagaagcagagtttggtcaggggactggaccgatatggctcaatgaagtgaagtgcaaagggaatgagtcttccttgtgggattgtcctgccagacgctggggccatagtgagtgtgggcacaaggaagacgctgcagtgaattgcacagatatttcagtgcagaaaaccccacaaaaagccacaaagaaaattcccatgagtcagctgatttcagtgctgctgaactaatttctgtgtctaaatttcttcctatttctggaatggaaaaggaggccattctgagccacactgaaaaggaaaatgggaatttataacccagtgagttcagcctttaagataccttgatgaagacctggactattgaatggagcagaaattcacctctctcactgactattacagttgcatttttatggagttcttcttctcctaggattcctaagactgctgctgaatttataaaaattaagtttgtgaatgtgactacttagtggtgtatatgagactttcaagggaattaaataaataaataagaatgttattgatttga

SEQ ID NO: 537268 - DNA, 322 bp, Homo sapiens
atccggaaataaaaagagcgtcaattaacgcttccttgtagacaggaaattcaaaccggaattttctgcgggccacatcgtgccctaaaaacgaaatacgtaaacgacattctgttcattaaaaggtaaggggctgcattaaatgcctgtaaaacattctcacaataactccggtacccgggttttcgcagcgctgatgccggtaatggctgcggtactggtcggctttattattatcggtgtggcacttcccgtcctgccgctgcatgtcaaaaatgacctgggcttcgggacgtttatcgtgggcctggtcgccggggca

SEQ ID NO: 537269 - DNA, 1376 bp, Homo sapiens
gaattcttagttgttttctttagaagaacatttctagggaataatacaagaagatttaggaatcattgaagttataaatctttggaatgagcaaactcagaatggtgctacttgaagactctggatctgctgacttcagaagacattttgtcaacctgagtcccttcaccattactgtggtcttacttctcagtgcctgttttgtcaccagttctcttggaggaacagacaaggagctgaggctagtggatggtgaaaacaagtgtagcgggagagtggaagtgaaagtccaggaggagtggggaacggtgtgtaataatggctggagcatggaagcggtctctgtgatttgtaaccagctgggatgtccaactgctatcaaagcccctggatgggctaattccagtgcaggttctggacgcatttggatggatcatgtttcttgtcgtgggaatgagtcagctctttgggattgcaaacatgatggatggggaaagcatagtaactgtactcaccaacaagatgctggagtgacctgctcagatggatccaatttggaaatgaggctgacgcgtggagggaatatgtgttctggaagaatagagatcaaattccaaggacggtggggaacagtgtgtgatgataacttcaacatagatcatgcatctgtcatttgtagacaacttgaatgtggaagtgctgtcagtttctctggttcatctaattttggagaaggctctggaccaatctggtttgatgatcttatatgcaacggaaatgagtcagctctctggaactgcaaacatcaaggatggggaaagcataactgtgatcatgctgaggatgctggagtgatttgctcaagtaaggactgatcttggctcattctattctccaggagaggacaaaagaaaggggtaataaatcttaagagcctgaactcttaagaacataatgaagtctgcttcttttgtcaccgcattttaacctaacttcaggttccagttctgatacctgtggactttttaccttaactgaaattaggagaaataggttagggaagtgcatagtgaaactgagatccaggtcataagaaaagaagaaagtgtttaggaaaagcccataaagaaagggagagaccgaaaagaaaaagaggggaaaaaggaaagaaggaagggctttactaggaaattttgcactatgaagttttatgaccaaaccactccagttatcatctaatccacaaaagcctcctcattagcctcattaacccactccttcccaaatcatttttcaagttcacagaatcgaatcacttgttaaaaatcaatattggtttctcattaaaactttatttatactagaaaaaaaaaaaa

SEQ ID NO: 537270 - DNA, 1123 bp, Homo sapiens
  misc_feature (42)..(42): n is a, c, g, or t
  misc_feature (46)..(46): n is a, c, g, or t
  misc_feature (461)..(461): n is a, c, g, or t
tcaaagttcagtgatggcagatgtccctccccccgaccaagntgantgtccgagttcgacttcagactgcagtgctagcatcgagaatttcaagtcagtagttcgtgacttgctgcgcttgtgggagtgggacccgctgagtgagaccacttggctcccttgcttcagccccctttccaggggagtgaaaggttctgtctccctggggttctaggcgccactcagttggaaatgcagaaatgactcagttggaaatgcagagacttctgcgttggtctcactgggagctgcagactggagctgttcctattcagccatcttgccagctcctataaatggcatttcttaatcttactgtatttccatggaataaaagtaattcttatgcacactgaagttaaaaaaaaatagcatttaaaatttctgctcaggaaagtagtataatttttaacataagtgantttctctttgtgttataatgtaatgaattcttatacgcatatggagaggaaaatgacatttttctatttatggttttagttcagcctttaagataccttgatgaagacctggactattgaatggagcagaaattcacctctctcactgactattacagttgcatttttatggagttcttcttctcctaggattcctaagactgctgctgaatttataaaaattaagtttgtgaatgtgactacttagtggtgtatatgagactttcaagggaattaaataaataaataagaatgttattgatttgagtttgctttaattacttgtccttaattctattaatttctaaatgggcttcctaattttttgtagagtttcctagatgtattataatgtgttttatttgacagtgtttcaatttgcatatacagtactgtatattttttcttatttggtttgaataattttcctattaccaaataaaaataaatttatttttactttagtttttctaagacaggaaaagttaatgatattgaagggtctgtaaataatatatggctaactttataaggcatgactcacaacgattctttaactgctttttgttactgtaattctgttcactagaataaaatgcagagccacacctggtgggggccca

SEQ ID NO: 537271 - DNA, 910 bp, Homo sapiens
  misc_feature (22)..(23): n is a, c, g, or t
  misc_feature (63)..(63): n is a, c, g, or t
  misc_feature (100)..(100): n is a, c, g, or t
  misc_feature (110)..(110): n is a, c, g, or t
  misc_feature (128)..(128): n is a, c, g, or t
ttctacaacaaaacaaaaaaanngatttcagtgtacttccaacatatggccctcatccttcanaatgtggatctgcccaattgaagaggccttatttcanctccggcgangggcagacttaaaatttnttttctttttatcactgtcacacagcttataacatgtatgcttttcagaatacagttctctagccaagccatcaagtgtctgaaattcaatattggtttatgcaaataccgcaaacttttatttaattaaatggggaggggagtgtttaaaatattaggaatcctaaaccatattttcaagacatcttaacagctaaggattctcaaatggaagttttatatataatatgttaaaaacattttcctttcctgggtaattatttcatccttttaaattcaattcaaatcatttgtcctgtatcattatttgtgttaaatctgcacagtatttaagatgagtttttcgtgacctctatttgttctcatatcttttgtctcaaatatcaattacccaaattccttctttgtttatttttttaaaattgtccttaaaaaaactatcataaatttccacaatcatttaaaaaatatttcccaatgtaaattagagtccttaactaataactcatcccattatacttttttcttttattttcaaaccttctttcccacaagctcttcgaaacccccacgacccaccctctctaaccgccacactggactttatgattatcaaaagattcttatttctatcattacaaaccttctctaatgcaaaatcaactcaaaatcaccataacgatgatcagcgttcctaccggccgccccctcgtcctccctaatccacacccaacacaaccccccatccacctatttcccctcacatcacgctcgaccccccg

SEQ ID NO: 537272 - DNA, 767 bp, Homo sapiens
  misc_feature (42)..(42): n is a, c, g, or t
  misc_feature (46)..(46): n is a, c, g, or t
  misc_feature (461)..(461): n is a, c, g, or t
tcaaagttcagtgatggcagatgtccctccccccgaccaagntgantgtccgagttcgacttcagactgcagtgctagcatcgagaatttcaagtcagtagttcgtgacttgctgcgcttgtgggagtgggacccgctgagtgagaccacttggctcccttgcttcagccccctttccaggggagtgaaaggttctgtctccctggggttctaggcgccactcagttggaaatgcagaaatgactcagttggaaatgcagagacttctgcgttggtctcactgggagctgcagactggagctgttcctattcagccatcttgccagctcctataaatggcatttcttaatcttactgtatttccatggaataaaagtaattcttatgcacactgaagttaaaaaaaaatagcatttaaaatttctgctcaggaaagtagtataatttttaacataagtgantttctctttgtgttataatgtaatgaattcttatacgcatatggagaggaaaatgacatttttctatttatggttttagttcagcctttaagataccttgatgaagacctggactattgaatggagcagaaattcacctctctcactgactattacagttgcatttttatggagttcttcttctcctaggattcctaagactgctgctgaatttataaaaattaagtttgtgaatgtgactacttagtggtgtatatgagactttcaagggaattaaataaataaataagaatgttattgatttga

SEQ ID NO: 537273 - DNA, 260 bp, Homo sapiens
  misc_feature (68)..(68): n is a, c, g, or t
  misc_feature (72)..(72): n is a, c, g, or t
  misc_feature (106)..(106): n is a, c, g, or t
  misc_feature (109)..(109): n is a, c, g, or t
tggccgatcaggggtgatttaattttctagtggagaatttacatatctccctcaccctgtcttttaanttantgtgacaaggttggggggggaactacttaaaaanaanctttggtcaaaaatgggatgagatcgcaaaaaaacaaacaaaaaaattactgcgttaaaaaaaccaacactttcaccaattttatattcaaacaaaaccacacgggattggcgtgatatgtgttttcagggggggcttggggctggcttcc

SEQ ID NO: 537274 - DNA, 360 bp, Homo sapiens
  misc_feature (60)..(60): n is a, c, g, or t
atacggattcatgagatacttagatacaggctgcagagcatattagtcacatcatataanatgggataatccatccgccgtatttatcctttgtgttacagactatccaattgtacacttttagttactttaacctgtacaattcaattattattgactatagtcaccattatgcgccccgtcaggatttccataaagtccccgggtaacgcttaatgttctagttctggtgcgttcacagtttttgatttgcctgtgtgaagtcaggcaagccctttcatttcgatgatttagctagttgctatgttactatacaggcagattatactctgccttttttgttgaagtttttcaatattc

SEQ ID NO: 537275 - DNA, 374 bp, Homo sapiens
agtctcagcgactttgctctcttcagccttctgcactccctgggggcagatgattccagtactttctcatcctcctcagcttgaacatcttcatccccatcttcgtcattttctgggctgagcttttggacaaggtgctgtgccagtctacacccctcagccagctgttcttggaggtcctgcccctgggacttgtccggctcatccggagtgaggagggcctggagatgctcattcaatgagcgggaggcatctctcccttcccgtaacttctcccttaactgggtcagctctcgttcccgagagtgaaccaggactttatattgctgtatttcttctgtcggttggccaggaagccggaagaagaaaatgat

SEQ ID NO: 537276 - DNA, 406 bp, Homo sapiens
catgtcttggtgtgtttaaaactaaataagtcacatctgtaatttgaaggagactaattgtaacgtttatgactagaactgcttgaagaagacagtaaatgttgtattaaaaatcatagatgaggccaggtgggatggctcatgcctataatcccagcactttgggaggccaagacggtggatcacttaagatccagatttggagactagcctgggcaacacagcaagaccccatctctgcaaaaaatgcagaaattagctgggcatggtggcatatgcctgtggtcccagctacttgggaggctgaagtgggaagatcacttgagccagggaagtggaggtgcagtgagccaagatcccaccactgcactccagcatgggtgactgagtgagatcctgtctgaaa

SEQ ID NO: 537277 - DNA, 129 bp, Homo sapiens
gttacgggtcctgggtaggggcacagcgaattaggcgggtaaacgttcgagtacttgaaacgggagcactcgctgtcgaagccctaccagtgtgtggtgcacaggcagttcctcactgtggaatctaga

SEQ ID NO: 537278 - DNA, 384 bp, Homo sapiens
cgtcgacgttttaagaaaatctattagatggtgcatcaaaataatgatttgaaatttttattttaggaaaagacccttctaagttccagcccaggcatattaacatgtaaagtgcatgtgttggcctagagagcgggctgcgttattgaggagagtaggatgttagcttacacagggcagcccctcccaccagacaggaaactcaggctgcctgccttcaacagctcaggatcagtgttgggagcgataagaccaacctcccagtaggaggataaaacacatgttacagaaacacgtttgcagagaaacggaatcagtaggtgatggcggatggatggatggatggatggatggatggatggatggatggagagaggtcgacgc

SEQ ID NO: 537279 - DNA, 115 bp, Homo sapiens
gtactcggagacaaagtaaacacacgagtggtcaagacaggaggtgggattcgagaagtggtgtcagtaatctttcttgattcggtcaaggagagcctcatgtacccattctcta

SEQ ID NO: 537280 - DNA, 352 bp, Homo sapiens
agcattatgacgcataggtaaagtgacatgtagtatatctgtgcaaaataaaactaatccttaactcagttataccccacatcaatgattacctgagtactagtaatgcccatgagaagagaccagtatatttgcaatcagcaaatgtgctggactaccacaagcaaaatgcaaggggaaaaatccaggcccaggcaagagactctaatgtgtagagccaaagctcagaatcaagatggtgattataaagagatacatgataaccctgcacaatatacctataaaaagcacctgggttcttgatatccattttatatttataatcctgtggctcctagctaaataatctcag

SEQ ID NO: 537281 - DNA, 679 bp, Homo sapiens
tccacaaagagagaggcaattttattcttccaaaaaattgccccaagagagggtgaccacaggagcaccccgtgtgccattcccccatcctaagcagggctctgagatgaggccaggccttgacgtgggcttgggaaaagctgacggagcctccctgtttggccttggggagggacccaggcagacctggaagtggaactttgttgttagcaccaggagccgcccacagctgggctcggcaacagggcagcacattggcccgtgtttgccttccacctgaaagttctgggagaggggcttggtggcaaaaggcctcccgtgcaggaggtcacctgaattgactctcagattcacaagacccccttttgcccccaaaaccccgtgttaaccttgaaaatgtgggcctcggtgaccacccttcaacaccttcaggacaagatgagggttccgaaatgtgtggctgggctatcaggcggcccaggagctgccgggcattctccgtgcatgaaagcgctggtccctggtccccccgaaggccaccgtttctccaggccctggaccttagggcgcaggtgtcgtgacagtggcttcggggcttctgggcgccattgctgccttctcgggcattggcttgcaagacagccctggttgagcaagctgtggtctacttggatacctg

SEQ ID NO: 537282 - DNA, 325 bp, Homo sapiens
ccagttccaactggaagaggttttattggaagggagagagacaaagaagtggtagagagagaagaggggggggggcggagagagagcgaggagaaggaaagagagaggatttctcgggttttttgagataagatctctctgtggagccttttctagcctggaaatcactgcaaagaccaggctggtctcaaattcagagatctgcctgcctcttcctcctgagtagtggggttaaagacctgtgcccataggcctggcagttaagtactgtgtattgatgagtatctgatgcctataacatctgtaggaggctacagtcatctgc

SEQ ID NO: 537283 - DNA, 255 bp, Homo sapiens
ggattcttctcttacaagatgtgagagagcataggcctgttgacatctagatttcagacttccagcctctagaactgtgagataataaattactgttgttctaaaccactgaatttgtttacctagttatgacagctctagcaaactaatacatcatagatattagtagtcatggtctcctggagaagtaattagcaaggtagtcaagtctggacccagtttaattcccaggttcagtgctcaatgcctgtctct

SEQ ID NO: 537284 - DNA, 1514 bp, Homo sapiens
  misc_feature (470)..(470): n is a, c, g, or t
  misc_feature (522)..(522): n is a, c, g, or t
  misc_feature (543)..(543): n is a, c, g, or t
  misc_feature (546)..(546): n is a, c, g, or t
  misc_feature (568)..(568): n is a, c, g, or t
  misc_feature (648)..(648): n is a, c, g, or t
  misc_feature (694)..(694): n is a, c, g, or t
  misc_feature (720)..(720): n is a, c, g, or t
  misc_feature (747)..(747): n is a, c, g, or t
  misc_feature (786)..(786): n is a, c, g, or t
  misc_feature (789)..(789): n is a, c, g, or t
  misc_feature (912)..(912): n is a, c, g, or t
  misc_feature (932)..(932): n is a, c, g, or t
  misc_feature (934)..(934): n is a, c, g, or t
  misc_feature (937)..(937): n is a, c, g, or t
  misc_feature (940)..(940): n is a, c, g, or t
  misc_feature (1011)..(1011): n is a, c, g, or t
  misc_feature (1026)..(1026): n is a, c, g, or t
  misc_feature (1146)..(1146): n is a, c, g, or t
  misc_feature (1163)..(1163): n is a, c, g, or t
  misc_feature (1196)..(1196): n is a, c, g, or t
  misc_feature (1300)..(1300): n is a, c, g, or t
ggactgaactcagtccaggtggcgcgcatgtgctctgcacttcctacgatggccggcgagcaatgactctcagtagagatacgcgaagagacgtcgcatgcgtctatgcgtatcatctatacacatgcttcgctgaggcaccgtggccgacacctgtactcgcctggcggaggtccgtctgccaagtcgttggcgcaattgtgaaacacaacctagctcgatggtcaggtgctgatactctcgtgccagggacttcctaggcgccgtgagggcgtagctgctgtcaagtgttgcgtcgcgtggtgccacatggtcacggcacgaacgtgcctacatgtgactagcgtcctgctcctatgccaatgttcccatgaggtagaatggcgtctcccaagatcagaaacccttaggtaagtacccgaagggccccgaggaccgtgttcgcgacggaggagcccacaagcgggggnctctccctttgtggtggcggttgtgacggttcgcattctccccctacgtggntcctgggagcacccaacgccnagngctccattcctcgagcagggcnatgcgcctagtacctcctaacttggttgttgattaaccctatggacaccatcattctcaaaataaatgggaagccttggnttggctacaaccctaacgaacggaaggtgcattcccgtccgtaacngtcctaaccttagatgaggaaccatnttaggccacaggtcgcttctagtaggncgatagggaagaaacaccatgggaagaatgcttgtcagncgntgcttaggcatggtgtgctcctatgacattgttttgggtggtgccgatgcgaggcggcgctgtcagtccgccgattacaggcgtaacgcctagggcgtggcacggtggtgcggcgtgtaggcnattctaacagcaatgaatcngnccncgnctccgaaacatccacaccgaacagagtaggggcgtacccgccgttttggctttgcccttggtgtccagtcntccgcgcaaccgggntcgtggaggatcggatgcgactacccattgggccaggaaggaatcctgtgacagaatagaggcaacggaaggcttaggcggtctggggtcgggcatgaagaacgcataggtgacttcggngagcacagaggggcctngagtaggtattgtttcgcacggggctggacctnggggggacttgtgtctccctcggggtccacggtgtagcttacctctatgcgtacatcccgccggtggattagtggtgcacccatccgtgcgtactggaagcgtngtgcacatgggtggcccgtctgggtgacatggatttgcagacaatttctcgtccagctcgaagaacctggggcagctctcggctgggcaccgcgaagaacttgtgtcttgcagggtcccgctgggtcgacgcgctggcacttgtgtttgaacaccgcggcccgcgcttgttggtccaaccgggtgtgtggcttccgagccgcagcgcttggcca

SEQ ID NO: 537285 - DNA, 274 bp, Homo sapiens
ctttgatctgatggctgagtctaaatctatccaagacctgatccttgagctccagtagtcatgaacccgaaagcacacagtgcactggcactatggggtgtcttctattagtcccgtcctcatgtccaacattgaccatatgccactaccaagcactcaaaaaaaacccaagctctgctctcagctttccctctaacttcccctcacaagatggtactgcaatagcctgttactcaagccagaagcctgggagttcatcactgacatcttaccg

SEQ ID NO: 537286 - DNA, 487 bp, Homo sapiens
ggtaaaatggaaacagggcttattcttgattcccaattctcaactgtacttttcctatttgaatttctttggtgctgtagaaaacaaaaaaagaaaaatatatattcataaaaaatatggggctcattctcatccatccaggatgtactaaaacagggtgtttaataaattgtaattatattgtgtacagttctatactgctatctgtgtccatttccaaaacttgcacgtgtccctgaattccatctgactctaattttatgagaattgcagaactctgatggcaatgaaaatatgtataatgaaaaaaaaaggccgaaataaaataagaatctaagtccgtgggtttggttaataataaaaggccttttgtttttaaaataacaaaaaaatggccgtcgttttaaaaccttttgactgggaaaacccttgggttacccaactttttggggggggcccgaaaacccacatttcccaatggtggggt

SEQ ID NO: 537287 - DNA, 1001 bp, Homo sapiens
agtgcatgatggaccggccgtgtagtaatgatagtgcgcgcgtgctacgtactataccggttggaaccgcggtcgtgcgtagggtggagcaatcagcgccgcttgtggctcgccagctaaaggggtggtggcgcacgccgtgagcagggcgcctaatcaattcgtgtgaaagcgtgcgcgagtttgcgtgaaaactcttcgccagtgttacctgtggggctacgaactctcggcggaacatttggcgcaaatcacgcggcgtatttaagaccccctttgcggtcctcgccttcttcaaacacactgtggggtatagcacacaagtgtgcacatgtccaccggggcctacagaatgagttcttgcgcagcgccgtgggttttccccgagacttgtgggtggccccccgcctttgtgggtcgttatctgggcacacgagacagcgcgggaagcagtacattgccgcaccgcgaccacttgggggcccactgcttgttggcggacaccgacgtcgcgtccctgtgtgtcagatattacccgccgccaataacgatgcggcgcctcctcacgaccacacgttcattcccgcgcgtgatgcagagagagttctctcatagcggggttcactcgggggcaccccctgtcggaggggtctagagagtagatacacgttttcccccgggggggtgcaccctcattgcacatatctggcccgctgggagaccatattaatggaacgatagtgtctcccggagcacgcaatgatgtgccctcatctttctagagagcggtgtttgttcgagcgattcacaatcaagcagtctcctccccacgggcttgttcttccaaatgcgcggcattgttccaataaaaagtcgcgtcggaggcaacatcaaagtctgtcctgccctatagaaaaaaaaaggagagtgcaactgctactacaaccagtcatgtggaggacttcccccaaaagcaaaaaacaatacaaaccaaaaaaaca

SEQ ID NO: 537288 - DNA, 423 bp, Homo sapiens
cagagaatgggggggaggaaaaatggggtatactaattagtggtagcaatttcacttatgcaagggaataagttctagcaatctactttacaacattgtcctatagataaaattttgtatacttaaacttctgtatgggctgggcatggtggcttactcctgtaatcccaacactttgggaggccgaggcgggtggattatttcagatcaggagtttgagactagcctgacaacatggagaaaccccatctctactaaaaatacaaaaattagctggtcgtgttggcaggcgcctgtaatcctagctacttgggagactgaggcaggagaattgcttgaacccaggaggcggagtttgcagtgagccaagattgtgccactgcactccaacccaggtgacagagcaagactccatctcaaaaa

SEQ ID NO: 537289 - DNA, 510 bp, Homo sapiens
  misc_feature (145)..(145): n is a, c, g, or t
  misc_feature (159)..(159): n is a, c, g, or t
  misc_feature (174)..(174): n is a, c, g, or t
  misc_feature (180)..(180): n is a, c, g, or t
  misc_feature (190)..(190): n is a, c, g, or t
  misc_feature (198)..(198): n is a, c, g, or t
  misc_feature (266)..(266): n is a, c, g, or t
  misc_feature (288)..(288): n is a, c, g, or t
  misc_feature (309)..(310): n is a, c, g, or t
  misc_feature (312)..(312): n is a, c, g, or t
  misc_feature (314)..(314): n is a, c, g, or t
  misc_feature (317)..(317): n is a, c, g, or t
caggggcaggagacgggatggtgctttggatgcctgtctctggctctgaaacgggctcttcgtgggtgcacaaggagctgtgagatccccgagagctttaggatgtacagacgagatgaatgggtttgcatcaaatgtacatttntgactgcatacaanaggtgcctaatctgngctganagtcaaaatntacatttntgactgcatacaacaggtgcctaatctgtgctgacagtcaaaatgtacatttctgactgcatacaacnggtgcctaatctgtgctgacantaaaaatacatttctgactgnnananaanaggtgcctaattatgctgacagtgaaaatgtacatttctgaccatacaacaggtgcctaatctgtgcttgacagccaaaatgtacatttctgtgcatacaacaggtgcctaatctgcactgacagtcaaaatgtacatttctgactgcatacaacaggtgcctaatctgtgctgacagtcaaaatgtacattt

SEQ ID NO: 537290 - DNA, 1109 bp, Homo sapiens
taaacagttttcaaaatttcttaaaggcaaaagtgaatttctgtggattttatactggctcccagcttttataggtctcttttaagaaccacttaacgaggaactacattagaaggccttttctacagcatttacgtggtgttcgttcctccggtgccagaattgttgcgcagaaattccaccattataccacacatgtcggaaattttacacatttgtgacaaacgcccatctgtagaactcttatataggtgtgtatgtgccacagccatttctatagagagaagagagggtgttacacctcaccactctatatagagagagccctatagagggtgggtattacaggttctcacaatattatctctcatatattgtgtgttataacactgtggtgtgttatatatattacccagtgtgttctgtgcgcaagtataattgtgcgcgtgtgttatacgcttgtggagacagtggttataaaaggcgtggttatgtggggaaggcgcacttaccggtgtgtataaagtggagtttagtgggcgtgtataaacacaacatgtgtttgtctcccaaaatctcccggctgtacaaacagtttgtgtcccctagaaacagccctgtgagtgtgcgtgggttaaacccagtgtctcaaacacaaatctcccggtggggcgtggcctcacattatctgtgtggcgcaattacttttttatactctctctccccccactgtagaaacgcaagagttaatacacggtttctagacacgcgctcgggctccttgggaaaaaaacgcccctgtggaaagttgcgcgttggtttccaaaaatgtctattttggggatacaatacatctccgctttatatacccccgacaattaatcccgaaccataaaaacgatctcccgtatttcccccccgttagatgaacactcctaccccccctgtatcccatatgaagcgtctcggcactcaaaaacaccgtccataaacgggtattcccaaccaacattaggtggtttaaccgttagcagaaaccgacataagtgtatgactcactacacagggggaaaattatttatgaaactagtggagcgccaccagcgaaa

SEQ ID NO: 537291 - DNA, 1693 bp, Homo sapiens
  misc_feature (541)..(541): n is a, c, g, or t
  misc_feature (1693)..(1693): n is a, c, g, or t
tggttattaagttttaatttcataatcataaacttaactctgcaatccagctaggcttgggagggaacaaggaaaactatggacacccaaagggaaacgtgcaggcgagaaccacaaagaattcataggaatacgtgcgaagccaaagtgggggtgggagggggtgcctctccgtggagctacagaaaggaagtgactcgtgggtggttaagaataaaacacagagtctcaaacttatattctcagagtgtgtgctccaaaggctcacgacaaggtgggtgatctcctctcttgggcgtggctcttgtgcacattctcctgtggaccccaaaaggggcgcctcacagtgggcctctccaacaaatattctcatgtggccttctctttcacacttgtgtgcacaaaaacacccacacatgtgtcgtgtgccatatcacaaaaccacctctcaggttctgtgtggggcaggtgtgccacagatgtgacaaaaacgtgtggaggaacccaccctctgtggtggtgtttgtgggcgtctcccaanggcaatatgtgtgtcccaattgtgggaccaaagaagattgtgtcctgatggtgtacaccccgcggataatgtgtcttattaagaggggaagtcgaacagggtgtctctctcaatctcctgtctacaaagatttttttctctccccccaatatatgtgatgtggggcctgtgtggccccacctcagggttgtggtccccatatatatgtggcgggggtgtgtgtgagaaaggtttccaccacaactcgctgtgataacaactatataaaaaagcgcgtcgtgggtggagaacactaacattcctgcgtcgtgttgaaacagacgcccgaggcggaaacatccctcgttttatataaaaccccaaaaaattcctcgtattatatcttcctcacccgaagtggtgggtcttacgagagaggcccactccgcaaaacaacttttctcttctggggacagggggtcacctttgtggggggacccctttgtgctttcttggccaaaacaccagaggcttcccacacagggggacagaaacaccgccggggcgcccccaaaaggggggtcttcccgcgcagggcacgaacggggacgcaatgtgtctcgcaaacagaaaacacccggggtgcgctgggtgcggcgcccatcgcgggtaaaaaaggaggtgaaccccgaggagggcgaacaacaaacaatcgggcgcagaacagaagatacaagagggaggcgcggagagaagacatacaggactctccccaccccgctcacttcaagcggtaccaccccccggaaggggtgttgcccccctgggggaaaaaacccgagatggtcccccaggtggagacccccaggagagcacgggcaaatagagcggcgcgaggaaaacaaggacaccacctgagtgtgagtagagagcaagggaagagcgggggtctgacagagagacgcagacaaagagagaccgctgtggggaggcccaacgagattgacgagagcgaacgaaacaccgcgggaggaactaagacacagactacacgtggggacgagagagaaaaaagcacaacgtgtgaggagaccagaatgattgtgcgagacagagagcatagcaggaaaccagaagcacccctatctacccagatgcgtggagactcaaggn

SEQ ID NO: 537292 - DNA, 138 bp, Homo sapiens
taccgcgagcgcatgcaggacagacacctcccgtggatcacaaggtcaaaagctcgacttgatccttatctgcatgtacgaatacagaccgtgatacgcggtgccttcacgatccttctgaccttgtgggttacaacg

SEQ ID NO: 537293 - DNA, 120 bp, Homo sapiens
gatcttgagaatcccccatgtcgaacggactgatcgatgtctgagtcgctcggagacacgccgaattgcttcgcctctcggatcttcaccactcctatagatcagatccgtacgcatgtt

SEQ ID NO: 537294 - DNA, 273 bp, Homo sapiens
acagcagacacctgtacaactccgcataggaagctacaacggcactgcggggggactccctccagctatcatcaacggacgcccttttcttccacagaaggatagacgacaattgatgtttggcagtgactaaactggtgccaatgtcgtacacagggagccatgcgtggtataaagaactagccaccgggaccaaacctacaatgggacagtacggggaagtccagtgcacacgtcagggacatcacactgtgtaccatttggcaacggcca

SEQ ID NO: 537295 - DNA, 143 bp, Homo sapiens
gtgacctcgtggcagggcctggcgtgtagggtctgcttgggtgctcaggtcaggtagctggtcacggtaaagaagccggtgatgacagccagctccgagcaggggatgcagtccttgcttggcgaatggggcacaggagaaga

SEQ ID NO: 537296 - DNA, 814 bp, Homo sapiens
tggtcggcgggcggcggggcgggggaggagaaaggaagggaagggaaggcagggagggaacgggaaaaggcaggaaagggaagggaaggggaaaggggaaaggaaagggaaaaagcagctttattgtaacagccaaaaactagaaacaacccagatgccttcagtagagaaatggttaaacaaactgtggcacatctgttatgtggaatactactcagcaataaaaaggatcaaactattgatacatgcaacaacactctccagagaattgctgagtgaaaaaagccaatcacaaaagtttacatgctctataatttcacttgtgtaacattttttaaataacaaagttatagaaatgggaaaaggactggtggttactaggaggattgcttgaactgggagtcagagggtgtggtgagccgggattgtgccgttgcattccagcctggtaacggaatgggactccctctcaaaaaaaaaaaaaacaaattttagggcttaccctaacttttaaaaggggcggtccgtgggtgcagggatatacactgcttattctccagaaatatccttgtggccctgcaagttctttgaggaatttaattccttttgtttttttttccacacgcacgttttttgcgtgcccccacaggcccttttagagggtctttggcgacacgtttaattaaggcgcgagggggcacccctgatcccggcttggacccgcgggggacatggggcggttaggccctgcgtggggacactctctcaagcaatccctttgtgcccggccgccaggcgggacgtctgaccgcct

SEQ ID NO: 537297 - DNA, 852 bp, Homo sapiens
  misc_feature (588)..(590): n is a, c, g, or t
  misc_feature (596)..(596): n is a, c, g, or t
  misc_feature (601)..(601): n is a, c, g, or t
  misc_feature (604)..(604): n is a, c, g, or t
  misc_feature (609)..(609): n is a, c, g, or t
  misc_feature (615)..(615): n is a, c, g, or t
  misc_feature (625)..(625): n is a, c, g, or t
  misc_feature (627)..(627): n is a, c, g, or t
  misc_feature (637)..(637): n is a, c, g, or t
  misc_feature (642)..(642): n is a, c, g, or t
  misc_feature (666)..(666): n is a, c, g, or t
atctgggaagcgccatcttcacgggactgggatccgcatctgcctgggatcatcaagccctagaagtcagggatttacttataaacttatagggctcgcacgttttgtcatggtctctctcaccgggcgtcatgcaggaacagcctagacagatctgtctatcatagacttatacaaggctgcgtggctgttccactcgttttattccacgagggtgttctaggtctgcaagatggatgaaatcccaatggtgtagacctagtggcgatggatctaggagtttaccaactgagacatttttcaatttctttctggtcatccttgctggggactgaaaacgcttctgtgagacttgataatagctcctctggtgcaagtgtggtagctattgacaacaaaatcgagcaagctatggatctagtgaaaagccatttgatgtatgcggtcagagaagaagtggaggtcctcaaagagcaaatcaaagaactaatagagaaaaattcccagctggagcaggagaacaatctgctgaagacactggccagtcctgagcagcttgcccagtttcaggcccagctgcagactggnnncccacncctgncancaacnagccanagggcaccananagacccccgnccagncagcatcgcagggctcaggacaancgcatagctgcctatgcccccgaagaactggctgctgcgtgtgaactgaacagacggagaacgatgtgctaggggagaatcgtgcctccaaggtcacccattttcattgctcgcctgcggaaagagactgtgagactgacatatgccattatctctttccagttttaaacactcatatgcttatgg

SEQ ID NO: 537298 - DNA, 476 bp, Homo sapiens
cccttcgacggtgttctgatcagagactggagaggtgagtgagaagtctccgctgctcgggcctcctgtggagcccccgttccaggtctcgctccaggaccttcttcacaagatgacttgctcgctgttacctgcttccccagtcttttctgaaaaactacaaattagggtgggaaaagctctgtattgagaagggtcatatttgctttctaggaggtttgttgttttgcctgttagttttgaggagcaggaagctcatgggggcttctgtagcccctctcaaaaggagtctttattctgagaatttgaagctgaaacctctttaaatcttcagaatgattttattgaagagggccgcaagccccaaatggaaaactgtttttagaaaatatgatgatttttgattgcttttgtatttaattctgcaggtgttcaagtcttaaaaaataaagatttataacagaacaccgtcgaag

SEQ ID NO: 537299 - DNA, 317 bp, Homo sapiens
gggggaaaaagcaagcccaccccacatgatgcggaagaaaccaagaagctggtgaagggccgggaccctgttgagttgcacaggttttaagcctttgaccttttgagaaatgatgtcctgcccaggcccgatggccattaggacccggcaagcaactctgttctgtgaccaggccaggattcctggagttggcctgagagggctcaatggaccctcggggacccaagtggggctttcaaccctctcccccaccacccagcccactgcactgaaatgagactttattctgaaattattaaaaagaacagagatgctca

SEQ ID NO: 537300 - DNA, 929 bp, Homo sapiens
aagccagagtatgggcgtctaatgtgtcagcagcaaatccccgaggtgtcttcatgatgtgcatcccaaccccccaatgtgacagtgctacccttgcacctgtggccatgcactcaaccagatgccgatccatgtgactccactgaactctgatgtgcacctgcattgcgatgagggatgaccagaccttgatgtgaaccccttgtgcttgttgaacccaattgcaagagtaatcaggcctaaccacaagtgctgaccttggattggcatcacagcacaagcctattgggccgctggagccaagtggcaaccttggaagacccctgggccaacccaacgccttgggtacctccgccctgcactcgcccccgtatcactcccttaacaactgcgcgaaccatgtcctttggcgcaccacgattggcgaacccaccgctgaatcgtgacgtctcacacacaccgaccctttggaccccctggggacacttatataagccgccaacccctaactcgcattttcgcacctggacaccactccccctatcggcgcgcaaaggccgtattttccgccagtttattggcggcgacacactttgtgcgcagtcaaaagtacccggagaacgcggccccccctgtttttggccttacagctaaccaaagccgcaacaaccgttttgggcagctatacagcgtccccccccgttcaaacacgctgaccccacctgttccctcgtttccccacaatgtcctccaagctgcccccagtttgtgcgcagtggaacacgcgtaacagttcaaacagtggctgcgccccacacatatacaacacgtgggcaatccccccgaggagcgaccccttcttctcacgacaccctagaaacagtctgtgcagtcaccaaaccgcgtaggtcggcacaaatttttcccca

SEQ ID NO: 537301 - DNA, 646 bp, Homo sapiens
gagagagggccttctcaggaagcttgaaggctctggcttaacagagaaagagactaatgtgtccaatcatgtttaaaaatcatccatgaaaaagggtcttgagttgtggacccattagcaagtgacatcgtcacatcagaactcatgaaactgatgtaaggcaattaatttgcttctgtttgtaggtctgggagggcaataaaagaggtgggtgggatgccaacaatgtctctggggggggatcgcactgaataactctgagaactatcctacctatcactctaggttttgaagcaaacgtatggacttcaactggggaggggccaataaccgttgttgtgtcctcaacaatttatctttatacaactgttgtgccacgtatccttccctctctgtaaaaactcgtcttaaggctctaaggtggtctcagatattgcaagtatcatgtaagtttgtatgagatttgccggctgaggattctgtcacacactgaaagaaaaacgtgtccatatagaccccattggaaaaagcaaaacgctctcactgaagatcagggatcccaaattcaatgggaccttatataagacaggacaattcactgctgatctgggtaccgggggacattactgtgcgtgactgccaaccc

SEQ ID NO: 537302 - DNA, 276 bp, Homo sapiens
  misc_feature (153)..(155): n is a, c, g, or t
tggacccttgcaattcaagcccttgttgttcaagggtcaactgtaataggatatagctatttttcttcctctatcaaccaaatggtaagcatctattttgtagtccactctactgagctaaattatagatccagctatgctatttataatatnnntgatgaataaatttcaattctctcttgccattcagacatctccaatactcataaacactgaggaaattgagtctggaaatatatcaccaactttgggattagtgctaagttaaataagcta

SEQ ID NO: 537303 - DNA, 139 bp, Homo sapiens
tatagggctggaagcagcacgctgtggtatcagacaaaaggatctccagaaagccgctgtacttccagcatgaccctgagacctctgtgtatggtcctgcgcaagcctggagacaaggtgtgtttgccagagaatgaga

SEQ ID NO: 537304 - DNA, 405 bp, Homo sapiens
ggggagcctttttggttggtttttggttgggtttgggttttggttttggttttaggtgtagggcccagcggggaaattttttggggctgggcccatagctcgcgccttaaaaactttaaaaattggttaaaaaaaaaaaaggggggcccctttccaaaaaaaaaaaaaaagattaaccgtttccccctgttttcaatgggggggtgagggccccgaatttttcatggttttgggggatttttgatttggaaaaggggcccaacagggtgtggggtgggggtccttcaagacaaaaacaaacccaggttgggcaaggcccttacctgttttccctctggaggtattcgatgaagtcatggacatggccgttttggagcaataaatgggcccttttttttaactgga

SEQ ID NO: 537305 - DNA, 367 bp, Homo sapiens
  misc_feature (8)..(8): n is a, c, g, or t
  misc_feature (10)..(10): n is a, c, g, or t
  misc_feature (13)..(13): n is a, c, g, or t
  misc_feature (16)..(16): n is a, c, g, or t
  misc_feature (238)..(238): n is a, c, g, or t
  misc_feature (321)..(321): n is a, c, g, or t
tcatcctnanggntcngcttctttcgcccaggctggagtgcagtggcgcaatctcggctcactgtaatctccgcctcctgggttcaagggattctcctgcctcagcctcccaagtagctgggactacaggcacacgccaccacacccagctaattttttgtatttttagtagaggcggggtttcaccatgttagccaggatggtctccatctcctgacctcgtgatccgcccgccttntcctccaaagtgctgggattacaggcatgagccactgggcgcggccagataagtttttaaggttccttcttgctttagcattnctgagaaatgtctaattgggtagtaagacaagagtaattagcaacc

SEQ ID NO: 537306 - DNA, 375 bp, Homo sapiens
gagaaggagtctcactctgtcacacaggcttgagtgcaatggcgtggtcttggctcactacaacctccgcctcccaagttcaagtgattctcctgcctcagcctccctagtagctgggactacaggctcgggcaacaccacgcctggctaatttttgtatttttagtagagatgcgatttcactctgttggccaggcaggtatcgacctcctgtcctcacgatctgcccaccttggcctcccaaagtgctaggattacaggcgtgagccgctgcacccagccagattaagaacaatttctaatgactgcattggaattattgctcttggaattagagtccaagtttctgtatagaaagctcattatgatctgtgc

SEQ ID NO: 537307 - DNA, 132 bp, Homo sapiens
ttcgaggccacacgagatgggcaacaacttcgtccaccacgatttgctcaggtatggtccctcggcgttgcacacgccgagtacaccacactgtactctctcggactcagatccgtgtggacgaagttgttg

SEQ ID NO: 537308 - DNA, 243 bp, Homo sapiens
tcttttaattggttcatctggaccactgatatgcaaagggatgttgatataattggattaatagctgcctttttttgtttttactgttttctatttgttgcctttgtttctatttttgtcttccactctttttctgcctcttgtagtgttttgcctttggggtttttcttttttttattttcttttactttttttttttttttttgagacagagtctcccaggctggagtgcagtggaagaca

SEQ ID NO: 537309 - DNA, 282 bp, Homo sapiens
cgggagcagcatgtctatctgactgcgcacagacacagggaggaggggtttcaagccatctatcatgtcctgctgcatggtctgcagggagtctggtggatggccgtggagcagcggtcagacatgtttcgacccagctccttcctctatgtggcggtggcagctcatatcttataaaccttgaggagctactcggagaagggtggaagtccatctggtaatcgtccaccagtacagaaggtggccaggctacacagcacatgtagggtctggggtctgggt

SEQ ID NO: 537310 - DNA, 125 bp, Homo sapiens
  misc_feature (106)..(106): n is a, c, g, or t
gcggttcttgtgttaatttgagttcacctgtgggcagtgggcagtgggcagcgtctggattaaagggaacggatactactttttgcctcaccgtaaagtactcacntagtaaatatttccttcat

SEQ ID NO: 537311 - DNA, 148 bp, Homo sapiens
atttcagtggtctgcactcagataacagtttcttcagattagtatacaccagagtgcctatgtcagtatacctgcaatgttaagggacacaatctaccaacccacgcctcgttttcctttctcttctaaattactaaacccccccttt

SEQ ID NO: 537312 - DNA, 140 bp, Homo sapiens
tgtatctagagatccccaagattcgcgcacctaacaatggcaggtgctaaaaaacgatatggtgaaattaccgaatcaatatcgggagcgtattggatttatgaatatgctgactgatttcgacattctaggatatccag

SEQ ID NO: 537313 - DNA, 665 bp, Homo sapiens
  misc_feature (535)..(535): n is a, c, g, or t
ttacaatgaggacgagagggtaggtcctaatacaacgtgatggcagtgcttataggatggcgacatttggccacaggcgtgtgtgaagggagaacttctatgtaacgtgtagacctgcactgccgcggaggggactggaacagatccatacttaacagcctcgaatggaaccaacctgatgtcacactgatctcaaagttctgcctacagaactgtgctacacggagtgtctgtggatgcagccacccatgctgtggcaactagatatggcagccctagagaaggaattcagccgcttcaatttactggggaagccgatgtaaacgagcttcgtgagatgttcatgcaatattcgggacgcgcctgagtgtgcagtggacaggtccgtctgcaggcggaccagcatgcggcgctggcatgcacctactgagtcacccttcatgcatacagatgaggaagcagatcatatgtagctcttcatgcaccaagttacataccttagttggaatgctcgaaggctctctagatgatccgngttcaggcctgactatctgaggcattagcccgagtgggtaggtggctgaactagatctcgtctgatctagccactaacgtaactcttgggagcatttgccattctgagctgttgccagagtggctgctgc

SEQ ID NO: 537314 - DNA, 372 bp, Homo sapiens
ctcagggcgctcccaatggacagagttgtcatacatcacagcttcctcagtcagtcacctgagtacttccttcctcatgtcctggttacctgccagggcataagcatagcacatcagtgctcctggtatactcatgcagtccatggtctccctcgtgcgctgtcttacagaatgcctccaggcaactcagggcgttgcgtactgcagggtcagcggctgtcgccactcagccctttatggcattgctgagcagtgtcccagaggtcctgaatcagccatctgtcctctctgcgtgtgggagacccatatgacggcctgggaaatgtgtgctgctcctgtcccaatgcaggcttgagcttggcctccagtcag

SEQ ID NO: 537315 - DNA, 127 bp, Homo sapiens
gtccacatgtcttctccaaaaatccacccagactgatgttgtatatgcctctcaacctgcttggtttgaccaagcctgtaatcgctattggtaatctagcgggcacgggttctcacttgtcagcctg

SEQ ID NO: 537316 - DNA, 146 bp, Homo sapiens
gtacccaacaggccacccagtattgtgcatcagtgcatatgaactggacctgcccagaaggaaacagctgtaaatttgcacatggaaatgcctgaacttcatgaactgggaatgaaatgaatgatgatgcccataaatgattgaat

SEQ ID NO: 537317 - DNA, 368 bp, Homo sapiens
aaagttgtaatcatagaagatgccaatgacctatcaaaatcaacacaatgtgtacatgaaactattcgagactaataccatgcatctgtgatcaaagaactctgtggttttgaatcaggatgtagaccataagtactactactatgacctcaactatctgcatggatcataagtataagacagagttagtagttaatatgcatgttatcgtccttgcttccattcttaacagtatgtgcccatttgcaacacaaaacatgctaataatcagtaatagtcctataacagatgttaactctgtatagacattgactgatcttgctctaaccttaaacatacgagattattgtcctctgtagcatttattc

SEQ ID NO: 537318 - DNA, 197 bp, Homo sapiens
tcaggcacgaggttgggcttgtaggcgtgagtcatcagactcagtttgaaaaattttgcgattgagtccaagaacaggtctggcagagaaaatccacatttttgggttgaatgagacacggtgatactctgtacacagtacactgcccctttggcgccagagtgagactctattacagaacgtacccccaagaaaga

SEQ ID NO: 537319 - DNA, 102 bp, Homo sapiens
ttggcccttactacttacgacgacgaccacgacgacgacgtacctcacgactgacccacactacttacggaactcacgacggactgggaaccctaccacgac

SEQ ID NO: 537320 - DNA, 219 bp, Homo sapiens
gtaggacccttctccctgggataaaaaacctgcctgtaaacgctctgtaaatactcccttccccccatcccagcccctgggcaaccgggcagaagggaattcaggctatggacctcccaagtccccgctccccgctcccctcggcggcccccccctgttttgatctgtgtgtgagtgtgtgtgaacttttgaaagacaatattaaaaagacttagttga

SEQ ID NO: 537321 - DNA, 159 bp, Homo sapiens
gaccacatggcggatgacgccggtgcagtggtggtgcccgggggcccttgtggccctgtgaatggggaaccgctgtggcttccgtggtggtttcggcattggcatccggggccgggttcgccggcgttgacggtgccgtggccgctgccgcggagctcg

SEQ ID NO: 537322 - DNA, 267 bp, Homo sapiens
ggttggcacgtgttaccaggccgagtggtatgactatgtgcccgggctgttcgagcagctgtctgggaagctgagggttagcttggggacctgaactgccctggaggccccaagccatgttccccagttcagtgttgcatgtataatagatttctcctcttcctgccccccttggcatgggtgagacctgaccagtcagatggtagttgagggtgacttttcctgctgcctagcctttataattttactcactcactctgtatgggg

SEQ ID NO: 537323 - DNA, 556 bp, Homo sapiens
agaacagatcatctaaaatatgtagttttatatgctgtagtacattttaacaaaggtttcataatataaagcagaaataaacagacaaaaagaagccattaaaaaaaaaaaagaaatttatactacctgtgtggccagaaattcacaagccaagagatcaaaataaaagtattcctcagctagggatactcctggggcagcaggcagaagcaaagggcaaatttctctggcaagaaataccttcaacctagactacataggattctcacagatcaagtaccactgaagataagctcacagcccgcaattataaaacatgtgacaaaacaatctaccatgaagagtaagcagttagacatgaaattagtcctcagcaatttcagataatagagtcagctaaaagaaactacagacacatgtttaaaatgattaaagacaaaataagaaattttaaaataagaatctaccatatgaaagaatggacaggtttgagatagaatcaaatggaaattttagaaatgaaaaatacggtttctaaacacaaaaacaggtttct

SEQ ID NO: 537324 - DNA, 159 bp, Homo sapiens
cctcgctgaggtttcaccgtgttagccaggatggtctcgatctcctaacctggtgatccgcccgcctcggctcccaaagtattgggattaccgcgtgacgcaccgcgcccggctgcaaataatctttctttttttctttttttccgagactccgtctta

SEQ ID NO: 537325 - DNA, 1240 bp, Homo sapiens
gtgccctctcatggacgatatacctatgcttctacctattaaccacgcgtcacttcttggaatactaaatatatcagtgttaaacgaatgttcatatacctgcctctgagcatatgcgcgtaaacgaataggcaactatatagcatatgcgctaggacaatatagtaagctacctttcatagaagccctccaagagccagctcccctctataggccaagtcattgtgcctaattagcgcaatactggatctttgtccgccatgcgagacacttgggaggagagagccactattcctccataaagtagaatgcgtcacaatgcatacacaaacagcgctactgcgcaccttggtaactaccggtatcactgatacctagggatacgctagcgtgcacacagtgccttgcccaggtatgcattcgtctttccagtcagaagtgagtttgtaaagcataaccaatcttgaaccattgtatctcttcccctccaaagaagcgcaacccagttgcatctctctgtgaacttgaaaacagagccattacccttacacactcagcatctacgcctcccatataccctttcctagtacgccctactttacctaacacaaatcatattcgttatctccttcccctacacctcgatggactctccagcacactaccagccacttactccacaagcctctgtgtccccaagccctaaaccacagttaataccccaccccacgacaagccacgccaacttacgacaagagttctctgcaactgacactgaatatcagccttaacgacataaggcaccatcgtaaccgtacacgtaaccgcacgccatttaagcaacgcttcggacgtgccgccatatatcggccccttaaatttgggccaccttggtaattgtgcacaccttggacagaacaccaactttggaacttggctggcaaattccccatttgccaccccgtgggcgccatcccttttcatcaccaaacaccttacttgttccatacacgcgcgtcaccaggaatatcgtgccctataccacctcgtgcaatgtcaaacccatctttaccctaaggcacacttcccgaacaccgtgctgtgtccccaagtaaacaactatggaactcaatccagtttatcgggttcaccgcaggaagacgcctatcaaacgacttaacaattcacttacaccacatcacatttgggggatatatacttatgtccacgcacgcaggaa

SEQ ID NO: 537326 - DNA, 514 bp, Homo sapiens
aggcctcctacgtgactgctaccaggcttgatctcaagggaagccatgcacgacggagaagggccgagacagagcacagtttaccctatagaagcagacgaccaagatgaagtgccaccttgatattgctgaaatgagggagccagtaacaaacttgggcgaaatggcacgaaccatatcactggtcggggataaggggacctatacacatgcactcgcacatggacgttctaccacgggagctacacactaagaaattgctgagggcactagacctgcacaggagcttactgatgacacattatatgatatcaagatcgccctgcggctcgctagcggtaagataggcgcagaaaggcagaggaggctgagttcgactgacacatgcaattgggccactcaaccaatgggtaccagtctttagaaccgggggaatgtctctgccagccggaaatatcagatatataagatgctttgcactggggcacataattgcctacaggtctaaagcctg

SEQ ID NO: 537327 - DNA, 190 bp, Homo sapiens
ggacccaagacttagcttggaagagacgagacgaggcgagagagagagacgagagacgagagagacagagagagactctgagaaggagagacagcagtgacaatcctggtggttcccctgacgaggactggggctctagccaggcctggggcggagcatggggtctggacggctgtcgggctagtcgtgg

SEQ ID NO: 537328 - DNA, 114 bp, Homo sapiens
caacttggctgtgtgtgtctagagaaaagcatattacgagaaagaaacatccagacaaaggggcagtcagtgcaggtatcgagaaaaattccctgtgtgatcgtggggttgtaa

SEQ ID NO: 537329 - DNA, 1100 bp, Homo sapiens
gccacctgacgcgggccgttgagcccctgactgcaccttctcgagtgctggagacctcggtgggcccggcggctgctgcggtcggagacgtacagcgccatcgcgtggtagtgagacggtcggcggagcggtccgactgccgtgtcgtcccagcaacgggcaggcttcgttcctgctattgtaacttcgggcgagttgctcatggtgagaacgttggtgagcgacgagcggcagggtgagcagtctccggggtggtctgctagaacgacgcagtttctgggatccagtccagcgacgggacctctggtcaccgtggtatcctgtctgtaggaggaggtgctggacactgagaatcccatttgtgcagctgctgagtggggtcgtgttggctgattcgtaatggcaagcatctacagtcaaccgtacgagctcccgaccacagagtggtgacgagtacacaggagacaggttcctttacgcaaattccgtgaatgtgatatcagaacaggacggccatcggccacgaccggacttgggcagctggtgctctttcatgcagacggccaaaccggcagccgctgtggcatcaacctgtgggacactggcggagttcctgctgaaacaggacgtggtcaacgccatcaacctggatgggggtggctcgtgcagctttgtgctcaacgggaccttggcacaagatgagccgtcagatcagctgcacgagacaacatgtggcgcttgttcccgccacagtgtccaacgtgactgtgtgtgcaggaacaccagctgtccgcacgcctcaatgacacagcacacaggacccttgcctgtacagcgcactagcaatcgcccagagaaatctgcgcagcggggtcccgacgggagagtgagcctgcgacagaggaccgccttagccggacgcccgccggaaactggcacaggccaacccggataccagacacattccctcgaatgcacggagaacaagtggaagagaaacgtggccctgcgatggcaatgagccggaatgacacagactagagtgtggacgccacggaccgatatccaaccaggcacaagcactgtccaaacaagccgtc

SEQ ID NO: 537330 - DNA, 605 bp, Homo sapiens
cctggaagtgatagtgggtaattatgtatatatatttctttcagttaaggttttctaagatcattcttttacaaaagcatttttttctgctaataaaatgacaataaatgtttaaaaaagcataatgataggtttgccgtattaagtgtgcagatatattactaaacttaatgattaagtggaagtagcacagaagtagatttgtaaagactcgagaaatagatcctcactctatgaaagcttaatatgtgataaaaaggacattttatacctttatgaaaaggggtggattaatccaataaatggttggaacagttggctgttgcactttagataaaaaggcgagttgtattccctatcattcttagggaatgggagaacgtattagggcaagaatgtaaacctcagaatcgattaaagggaggaaaggtcagaatatattaactgcacggaaaatggcaaaactctcatactttgagagatagtataatatgaagagacaattcacaaaatagaaatatctatgaagagatattaaccttactagtgatcagagaaatataaaacataacttattcagattcataagtcttataacagagatg

SEQ ID NO: 537331 - DNA, 236 bp, Homo sapiens
ccacctcagcctcccaagtaactgagactacaggcacataccatcatgcctagctcacttaaatttttcgtagggacagggtctccactgtgttaccaaggctggtctcaaactcctggtctcaatccatccttccttgatttctcaaagtactgggattacaggtgtgagccactgagcctggcctaaccttattattaaagcaactccagggcatgcagagaggggcggagcag

SEQ ID NO: 537332 - DNA, 452 bp, Homo sapiens
ccgcagtgagattgacctgctcaacatccggagggaattcattgaggaatatgacaagtctctccaccaagccattgagggtgacacctccgaagacttcctgaaggccttgctggctctctgtggtggtgaggactagggccacagctttggcgggcacttctgccaagaaatggttatcagcaccagccgccatggccaagcctgattgttccagctccagagactaaggaaggggcacgggtcgtggcaagggttgggttgggctctgatcttcagtggagtttaggaaaggctcccactcccgcgggccatcgagggcccagctcggctgaccggctgaagccccgcacccatagatgctgtccccctccccttgtcacagtcctcggccctggtttgggctatgtcagatcccataacatcctgaacctctgtctgtaaaaaaaaaa

SEQ ID NO: 537333 - DNA, 830 bp, Homo sapiens
gaccgcgctctcacataaatgtggtctgtttgagagctgcaataatccacaatgactactctgatctatgtcgatgcatgataaatgtacaaccagcgcaccctcagttcgcctggtatgctaaggataggtctgaatcctgaggtctgcaccttcaacccaaatgcctcagatggggagattctccatagttttcatgcactcatcggtatcagtggctatactacctgcttgcgaatgcccgccgtcgcagccttacctaccgctactacaaaaggcttaggagaacagtcagcatagctcctgagaagtctgtaaacatcaaggtgtaaccctcttacacaataaataagtgcaagcttatgcgtgtcaaattaaatgatgaatgcagaataggactgttgccagcagaaatgctctgttcctggcctcagatgatgcctatcgcaagaattattagaaagattctttcccttgcatatcctactagtacatggagagctattggaccttgtcctgaaggagtcaccagattggtcggcaccctccccttgcagtgcgaagtgcctctcatgatcctgtgcacagcatgagagcagagcttgaaaagaactgtgtgaacttgggacccacgctttcacctgtgtactcatgtccctcttccacccatggtgaatcctctgctgaatgcagtcctcccttcaatgcgttctgtcgaacctggttgtttgaattcgccaacgtttggttgtgacatcgctctttaaattctttttgccgccaaggtcgtgagtaattgtaataaagccttttaacgcaaacgaaatcgg

SEQ ID NO: 537334 - DNA, 254 bp, Homo sapiens
ggcccgctttttttttccccaaacagaggaaaccggggtgggttagggtcccaaaaaccttcagggggccggcgagcccccggaaaagcctcagctcccgggtggggctttggcttctggagcattttttgggtgggggggggggcccagtttcccttcccccccccccgggagggttttccccccccaaggtcccccagggggccccccaagggggccgtcggggcagggggggattaaccttttttccagga

SEQ ID NO: 537335 - DNA, 123 bp, Homo sapiens
gctcagggccttggggaacgggggggactcctacacggtgccccggcctggtagcctgtaccctcagctagccgggcgcctggctgcccctgctgagcaacggcccccatgcgtggattgcca

SEQ ID NO: 537336 - DNA, 163 bp, Homo sapiens
gtgggtccatagtattactcaaggtttactgtaatgcactaaacacaatgaaaactatacaagaaccatgagagatcaattttactgtgatacacaattagctggagagataaacactcacatggtgatgactagcgtcacacaacattgaaccggatcgctt

SEQ ID NO: 537337 - DNA, 313 bp, Homo sapiens
ttatgcacaacctagggtcagttcgcaggtttaagccatttaccaagatagttgtaggtaagaagggcagatttattagagaaattgtgaaaatatgttgcagtgggcagctcagcagagaaggggctacctgcaaagaggcaagggctggaggaaagttttatagggtcctgctgaagggtgctacgtgtggaatgaggtcattgtgcccgcaggttgtttgtgattagctgtttctaacaattgttcatacaataattgttcattattgttctcaacttggggctctccccaacctggggacccttcctta

SEQ ID NO: 537338 - DNA, 577 bp, Homo sapiens
ctatatactcgatcgtaatccggaatcattgggtttaaagggtccgtaggcgggctaataagtcagggtacaaatcgttcagctcaactgagcaactgcctatgaaactgttagtcttgaatagttgtagaagtagttagactgtgtagtgtcgcggtgaaatgcttagagattacacagaacaccgatatgcgacggcatattactaacaattgattgacgctgatggacgaaagcgtggggagcgaacaggatatagataccctggtagtccacgcttgtaaacgatggatactagctgtattggacgcgagtttgagtggctaagcgaaagtaataaagtatacccatctggggagtacgttcgcaagaatgaaaactcaaaggaattgacggggtgccctgcacaagcgcatgagcatgttgtttacttcgatgatacgctaggaaccttaccaagggtttaaatggagactgacaggtgtagagactcctttttcttcggacagttatcagggtgctgcatgattctcgtcagctcgtgccgtgaagttgtccggttaaggtcctataacga

SEQ ID NO: 537339 - DNA, 513 bp, Homo sapiens
aatgtagatgatggacaccatcacaggtgggagcagagttcctggtttgacactgtcgtgatctagtgacgatcctggcggggtgtatgtttacacagggttttcccatccttgattaaattaggtccttgcaatagtcctcagaggtgggaagagcaagcattttatcccagtgtcacagaagaggaaactgaggccaaaagttgagagagattgcccatgattactggagctaaaattgggcccaagtgttctcattcccaagcgtgtattcttggttctctccaccatctcgaacacaggcgtccctgttccctgcagccctgacctgcttctcttgtctctttcttccactgtcacacaaattccagagggcaatttgagcatagccgctcttttaaatgtcatttggctctttgtggaatcctggcaggagttagtggagagcagggaggggggtcagcccagcctctaccagtgccctctcactgcctcaggagaataggacccagg

SEQ ID NO: 537340 - DNA, 380 bp, Homo sapiens
aagttcccctcaatctcaggacctcgccaacgaatcatgtgtagatcatccgggcccatatatgacgagctggcgtcggaaaaaccgacgaggtagtctacaccagtactggtctcagcacattgacgagatctccacagtggtcaccacacagtctgctgaggttggacctgctaagacgtacagtccagtcccttggagatcgacctggactccatgagaaatctgatggccatcttggtgaacagcctgtgtgtggtggtggtcccgctataccctacagatggagcagctcaacgggatcctgctgcaccttgagtcagagctggcacagacccgggcagagggacagcgccaggcccaggagtatgaggccctac

SEQ ID NO: 537341 - DNA, 700 bp, Homo sapiens
  misc_feature (451)..(451): n is a, c, g, or t
  misc_feature (456)..(456): n is a, c, g, or t
  misc_feature (461)..(461): n is a, c, g, or t
  misc_feature (466)..(466): n is a, c, g, or t
  misc_feature (546)..(546): n is a, c, g, or t
  misc_feature (561)..(561): n is a, c, g, or t
  misc_feature (575)..(576): n is a, c, g, or t
  misc_feature (581)..(581): n is a, c, g, or t
cacaccttccttcgccccgggaccaggggcatctcaaacacagtcgcccaagactcccctctgggtggcactctcaacccagctagcgctccaggagacctgccctcgtgtcgctgggggctgcagccctctcctctctgcaattcgtctctctctggatttaggaagacttccatttcaggaagggctgagattcctggaagccgcttcaggggctggagatgaggccccagagtgagggtcaccatgtgtctgtctgtcttggattgatttgcgtctgtacctgccactgtgtatctctcgcctccaacggcgtggtttacaaactgtgatgggtcctcacactggggtctggcttgaaacacgacccccacctccgctctgtacaaccccgccctatggccctggccccgtctagttgtcattacatcgcccactacaggcatcagcnccaanggccngaagnaagccgggattgagccactgctatctgaggggccctggcactccgctagactctggggaagggaaggaatgagcctagtnggatgagacaacagncccggcctcagttnnctctnctgcatatcgggacgaacgcaggacacagatgcgagtgggagtgggagtgctttgcaaaactgggaagcgccacgcacgcggcagcgctggctgtggccgttgggtcttctgtccccac

SEQ ID NO: 537342 - DNA, 429 bp, Homo sapiens
aggcagacattttacatatcaacatgaaaaaagaattggtgtaaatcaattcttttttccgtagctacttcaacctgaatcttgtatggttgttggacagcgagcaacgccgtgccgtcgcaacatgtcccatgccaccagtgatcacaacggatgacagcgctaatcgataggtcatcatggcctgatgtgtaggtgtcataccaaccatgaccagtgtgccaagttcacgcgcttgtaattggttaatgccccccataattttgatgtcaccaccgacttcaaccatatcaaaatagggtaaaagcgtgcctgggtgattcgcaaaaatcacatcgtgctgtaaaataatttgccgttgtgcctgtttcaccaagatggccataatcttgttttcatcagcccgagttgcatcaacgccgtggctaa

SEQ ID NO: 537343 - DNA, 157 bp, Homo sapiens
tagaggatcctgacagctgtcatttgatcttgagtgcacgaatctactgggactactccaaacattgacatcagatctgctttcaagagaagtggagaaggtcaagaggatgcaggagaacttgactttagtggtctcctgaaacgtagggaggtga

SEQ ID NO: 537344 - DNA, 188 bp, Homo sapiens
cctacgcagctattcaggcatacatgatgttggtagcagttcggagcccaaacaagtagggggctgccctcttctggctcatctgtgattgcacaaccgaggccacacggagattaaacactgccatctttgaaacatccctttctggtcattctcccacagcctgtctcttcatgcttacttcacat

SEQ ID NO: 537345 - DNA, 438 bp, Homo sapiens
acaatcgagctcggtaccattcgtgtctgccggtaccagcctgacagtacaggtccagcttgtgtttgttcccaactaggccctagtgtagtctggtgccagatgtgcgctcaaatcctgggcatgatgggccgagccatctcggatcccactgattgtccagccgagcgaaaaccaggctgctgcatggctactgaccggcgcttccagctatcactctgaagaccagcagggcctgctacgcgggcaagcgtgctgcctctcttctgtgtcgttttgttgccaaggcagaatgaaaagtccttaaccgtggactcttcctttatcccctcctttaccccacatatgcgatgacttttaattttcacttttgtagtttaatcctttgtattacaacatgacatatagttgcatatatagacacgaatgttcaggtga

SEQ ID NO: 537346 - DNA, 264 bp, Homo sapiens
acggtcggaactacaagcgactgtgaggcggatcgacgatggcaccgctgtcagcgactcatgaactgctgcatgagcggcgcgcatcgggaaggcgtatgcgcagcagctcactgacgtgggccggcgctggaggcagctcgtggagacagggcccgagtacgggaccgtggagaaggcctggatcgccttcatgtccgaggcagagagggtgatcgagctgcacctcgaaggtgaagcgctcactgatgaacgatgacttcg

SEQ ID NO: 537347 - DNA, 133 bp, Homo sapiens
tgagataattattcagggtttctccccacctttagtccattaataggttgaattaccttaatacaatttctaatgttgacttaactttgcattcttagaatacacccccacctggagcaaataaaaaaacata

SEQ ID NO: 537348 - DNA, 148 bp, Homo sapiens
tataactgaactcctcacactaattggaccaatctatcaccttatagaggaactaatgttagtataggtaacatgaaaacattctactagctagactgcgtccagattaaaacactgaactgacattaacagaccattatctacatca

SEQ ID NO: 537349 - DNA, 505 bp, Homo sapiens
cgttcggagggtcccggagggccacggaaacagaaatctgggtatcgactagatcagggagggatctcagttgatccagaaccaggcacccgagaaaataatggagaaaacattactagaacaatttggagatagaaatctgagtgttgatgaaaggtgtcacaacataatgaaagtagctcaagccaaactggaaatgataaaacctgaagcacagtcaaacttggaggaatcatgaggagtggcatcaggattataggaaattcagggaaacaactatgtcatctccataattgggctcagcaaacttttcaacagagaacagttatatagcattccttgctgttcctcatctgtgcttatcagacataacaacagacactctggtctaaaggcttatacagaggacatgatgaagaattgatatcacattatagcaagagcaagtttgctaaaattaaatgagcaagccgcagaactcttcgaatctggagaggacgagaag

SEQ ID NO: 537350 - DNA, 160 bp, Homo sapiens
ctccgctatatctgctgtggttagatgacgagagggactcgctggcagcagcccagcctgactgctcggagtgtactttccttgacatggcaatggctgttggccatgactcgcttgacatgctcctcctgcgcagccttcaggttctccttcttcccgc

SEQ ID NO: 537351 - DNA, 801 bp, Homo sapiens
atgacatgagagattcctctgaaatacagaagtgaagagatcatactgccgtgttccagacaggccgatgggagggcttggaccatgaggaggaggccctgtcatcgggcaggtgtgcgagaggcagaagccatgtagatgagcctcaggaatcaagcggagggctccctgacttgtgtactgtgatatcgtgaacactccttcacttcttccccaggacatgatgagctacattgggcccaagaggacagcaggtggtgcggggggataatgcaccgggaggtcttgtaacatcattggccgtcgatacgtccaggtggtccaggccgatgtctttgactgatggatgtgcttgcgtgcgtgcttctggctgacgagcttccagaggacaaggtggacgcgcgtgagaagaggcggctcgtcaagtcccgagcttgggctaggagatcgagccgttcagttgactcaagaccagacccgaaggtcccgatgagtgtctacgtgggagcatgtgaggggcctgtccggcgctctgttgcagcgtttgctgaatgcctcggtgccgttggtcaagcatcatctgggggactctcagagtacgttaacgaggcgagggtgagggtgaaatccccgaatggagtcagatatacatcagcatacaaattagagaatgcacaaggaataccccaagtgtaacacaccaggggggccggggaggacacaaggtgcgcacaggtaccgtgtacaagttaaccaaaggtgacgtgagaacaagccgggtgacaacggaagggaatggca

SEQ ID NO: 537352 - DNA, 2879 bp, Homo sapiens
gggtattcgaatcggcggcggcttctagtttgcggttcaggtttggccgctgccggccagcgtcctctggccatggacaccccggaaaatgtccttcagatgcttgaagcccacatgcagagctacaagggcaatgaccctcttggtgaatgggaaagatacatacagtgggtagaagagaattttcctgagaataaagaatacttgataactttactagaacatttaatgaaggaatttttagataagaagaaataccacaatgacccaagattcatcagttattgtttaaaatttgctgagtacaacagtgacctccatcaattttttgagtttctgtacaaccatgggattggaaccctgtcatcccctctgtacattgcctgggcggggcatctggaagcccaaggagagctgcagcatgccagtgctgtccttcagagaggaattcaaaaccaggctgaacccagagagttcctgcaacaacaatacaggttatttcagacacgcctcactgaaacccatttgccagctcaagctagaacctcagaacctctgcataatgttcaggttttaaatcaaatgataacatcaaaatcaaatccaggaaataacatggcctgcatttctaagaatcagggttcagagctttctggagtgatatcttcagcttgtgataaagagtcaaatatggaacgaagagtgatcacgatttctaaatcagaatattctgtgcactcatctttggcatccaaagttgatgttgagcaggttgttatgtattgcaaggagaagcttattcgtggggaatcagaattttcctttgaagaattgagagcccagaaatacaatcaacggagaaagcatgagcaatgggtaaatgaagacagacattatatgaaaaggaaagaagcaaatgcttttgaagaacagctattaaaacagaaaatggatgaacttcataagaagttgcatcaggtggtggagacatcccatgaggatctgcccgcttcccaggaaaggtccgaggttaatccagcacgtatggggccaagtgtaggctcccagcaggaactgagagcgccatgtcttccagtaacctatcagcagacaccagtgaacatggaaaagaacccaagagaggcacctcctgttgttcctcctttggcaaatgctatttctgcagctttggtgtccccagccaccagccagagcattgctcctcctgttcctttgaaagcccagacagtaacagactccatgtttgcagtggccagcaaagatgctggatgtgtgaataagagtactcatgaattcaagccacagagtggagcagagatcaaagaagggtgtgaaacacataaggttgccaacacaagttcttttcacacaactccaaacacatcactgggaatggttcaggcaacgccatccaaagtgcagccatcacccaccgtgcacacaaaagaagcattaggtttcatcatgaatatgtttcaggctcctacacttcctgatatttctgatgacaaagatgaatggcaatctctagatcaaaatgaagatgcatttgaagcccagtttcaaaaaaatgtaaggtcatctggggcttggggagtcaataagatcatctcttctttgtcatctgcttttcatgtgtttgaagatggaaacaaagaaaattatggattaccacagcctaaaaataaacccacaggagccaggacctttggagaacgctctgtcagcagacttccttcaaaaccaaaggaggaagtgcctcatgctgaagagtttttggatgactcaactgtatggggtattcgctgcaacaaaaccctggcacccagtcctaagagcccaggagacttcacatctgctgcacaacttgcgtctacaccattccacaagcttccagtggagtcagtgcacattttagaagataaagaaaatgtggtagcaaaacagtgtacccaggcgactttggattcttgtgaggaaaacatggtggtgccttcaagggatggaaaattcagtccaattcaagagaaaagcccaaaacaggccttgtcgtctcacatgtattcagcatccttacttcgtctgagccagcctgctgcaggtggggtacttacctgtgaggcagagttgggcgttgaggcttgcagactcacagacactgacgctgccattgcagaagatccaccagatgctattgctgggctccaagcagaatggatgcagatgagttcacttgggactgttgatgctccaaacttcattgttgggaacccatgggatgataagctgattttcaaacttttatctgggctttctaaaccagtgagttcctatccaaatacttttgaatggcaatgtaaacttccagccatcaagcccaagactgaatttcaattgggtaagaattatttggataatataactttaaattcttgtttctctatgagaagttgatggtaacgtgtgtgtgtgtgtgtgtgtgtgattctcctatgtgccccccaactccaatagggagttgtatctgtaatactaaactgatcattgtgttaagccatgattgtaggattgtgctttgctgtcgggactataactcctataacctcatagagggcaattgcccaatatctattcacactttaacaagtgccttttacttttaaaagaccagctatcccactttttaacgcgatctcctaatagactattcatcatatcctttcttattagtacaccacactcaatgtaccatttgggcacacacgaatacaagaacaggccacccctgttccgataagcgagaaatgactcccaaaaaacaccactaccggttacacgggccacccgttccgtcttac

SEQ ID NO: 537353 - DNA, 85 bp, Homo sapiens
tctgactctacctatctgctgctcatgggaagaacagaattgtcctgcatgcaactaattcaataaaacttgtcttgtgagcttg

SEQ ID NO: 537354 - DNA, 1882 bp, Homo sapiens
gggtattcgaatcggcggcggcttctagtttgcggttcaggtttggccgctgccggccagcgtcctctggccatggacaccccggaaaatgtccttcagatgcttgaagcccacatgcagagctacaagggcaatgaccctcttggtgaatgggaaagatacatacagtgggtagaagagaattttcctgagaataaagaatacttgataactttactagaacatttaatgaaggaatttttagataagaagaaataccacaatgacccaagattcatcagttattgtttaaaatttgctgagtacaacagtgacctccatcaattttttgagtttctgtacaaccatgggattggaaccctgtcatcccctctgtacattgcctgggcggggcatctggaagcccaaggagagctgcagcatgccagtgctgtccttcagagaggaattcaaaaccaggctgaacccagagagttcctgcaacaacaatacaggttatttcagacacgcctcactgaaacccatttgccagctcaagctagaacctcagaacctctgcataatgttcaggttttaaatcaaatgataacatcaaaatcaaatccaggaaataacatggcctgcatttctaagaatcagggttcagagctttctggagtgatatcttcagcttgtgataaagagtcaaatatggaacgaagagtgatcacgatttctaaatcagaatattctgtgcactcatctttggcatccaaagttgatgttgagcaggttgttatgtattgcaaggagaagcttattcgtggggaatcagaattttcctttgaagaattgagagcccagaaatacaatcaacggagaaagcatgagcaatgggtaaatgaagacagacattatatgaaaaggaaagaagcaaatgcttttgaagaacagctattaaaacagaaaatggatgaacttcataagaagttgcatcaggtggtggagacatcccatgaggatctgcccgcttcccaggaaaggtccgaggttaatccagcacgtatggggccaagtgtaggctcccagcaggaactgagagcgccatgtcttccagtaacctatcagcagacaccagtgaacatggaaaagaacccaagagaggcacctcctgttgttcctcctttggcaaatgctatttctgcagctttggtgtccccagccaccagccagagcattgctcctcctgttcctttgaaagcccagacagtaacagactccatgtttgcagtggccagcaaagatgctggatgtgtgaataagagtactcatgaattcaagccacagagtggagcagagatcaaagaagggtgtgaaacacataaggttgccaacacaagttcttttcacacaactccaaacacatcactgggaatggttcaggcaacgccatccaaagtgcagccatcacccaccgtgcacacaaaagaagcattaggtaaagtattttatctgagtgtgtagcacctgatgacaagttaatgaaagctcttttgcaacctgtttacaattattctttttgttctttaaggtttcatcatgaatatgtttcaggctcctacacttcctgatatttctgatgacaaagatgaatggcaatctctagatcaaaatgaagatgcatttgaagcccagtttcaaagtaataactatttaaaagctactaagtgcatagcattataggtggttatcacagaaaatatcaagaattatttaagaggtgaccctgcccttgattagcttgtcacataaaggcagggaatgcatgaaataaaaataagacagttcttgacaaggtactcaatgtgtgtgatagatttgcttgattaaagggaaaataaaa

SEQ ID NO: 537355 - DNA, 1662 bp, Homo sapiens
  misc_feature (1061)..(1061): n is a, c, g, or t
gggtattcgaatcggcggcggcttctagtttgcggttcaggtttggccgctgccggccagcgtcctctggccatggacaccccggaaaatgtccttcagatgcttgaagcccacatgcagagctacaagggcaatgaccctcttggtgaatgggaaagatacatacagtgggtagaagagaattttcctgagaataaagaatacttgataactttactagaacatttaatgaaggaatttttagataagaagaaataccacaatgacccaagattcatcagttattgtttaaaatttgctgagtacaacagtgacctccatcaattttttgagtttctgtacaaccatgggattggaaccctgtcatcccctctgtacattgcctgggcggggcatctggaagcccaaggagagctgcagcatgccagtgctgtccttcagagaggaattcaaaaccaggctgaacccagagagttcctgcaacaacaatacaggttatttcagacacgcctcactgaaacccatttgccagctcaagctagaacctcagaacctctgcataatgttcaggttttaaatcaaatgataacatcaaaatcaaatccaggaaataacatggcctgcatttctaagaatcagggttcagagctttctggagtgatatcttcagcttgtgataaagagtcaaatatggaacgaagagtgatcacgatttctaaatcagaatattctgtgcactcatctttggcatccaaagttgatgttgagcaggttgttatgtattgcaaggagaagcttattcgtggggaatcagaattttcctttgaagaattgagagcccagaaatacaatcaacggagaaagcatgagcaatgggtaaatgaagacagacattatatgaaaaggaaagaagcaaatgcttttgaagaacagctattaaaacagaaaatggatgaacttcataagaagttgcatcaggtggtggagacatcccatgaggatctgcccgcttcccaggaaaggtccgagaatgcttgaagaaggagtatggggaaacttcnaggaaaaaggaatccattgaagacagatgccatgctttgagaagatgtaatgcctgattagtagtattctggacttcatggttttgtttttgttgtttgtttgtttaatatgaaaggttaatccagcacgtatggggccaagtgtaggctcccagcaggaactgagagcgccatgtcttccagtaacctatcagcagacaccagtgaacatggaaaagaacccaagagaggcacctcctgttgttcctcctttggcaaatgctatttctgcagctttggtgtccccagccaccagccagagcattgctcctcctgttcctttgaaagcccagacagtaacagactccatgtttgcagtggccagcaaagatgctgggtaagctgaaggtagtcctagagatcacagtgatgtgagtggcacctgtcaccttcttacatgacctgcattatcaggaacagtatgtaaaagatgaatgatgtctgccttttatttttagataggtatgttgttgaaaaagcaagtggcaaaacattgctcccaatcctttaggcttacttattccatgcttcttttagaatatttattttatactttcgtgaa

SEQ ID NO: 537356 - DNA, 786 bp, Homo sapiens
cccattcctgcgggggaggccccaaaattagcagggcttggaggtgctgtatgcctccagtaccacctactggcgcgagctgcggtaggaggatcacctgaccctggaaggcggacagctgctcgagccatgatcacaccacgggactccatcctgggtgacttgtgtgagagctatgtctaataacagaaacaaactctcaatgggacccagcatggtggctcacgcctgtaatcgcacggcttaaactgactgggatggaagacattgcctgaagccggaagtgtgagaacagaccgagctacatggactcctaccaaacactgtttctaaaaaatagccacgtggagaggcgcatgcgctaaacactatctactcattaggctgacgcgggaggatcgtttaaggccaacaagatcacgctgcagtgcgccatgataggaccactgtactcccgcctgaacaacagagctagtggagacactgcctcttaaaaaagaaaaaaaaaaactccgagggggggccgcgacccattttgcccataaggaaggcgagaaccaatggctgggccgagagtttaaacaaggggaggggcgaaaagcctgggcgtacccaactgaataagcgttgcagacaaccccctttcacaaggggcggaatagcaacaaaggccggaaggagtggcctttccaaacagtccgatcctggtggggaaggcagattgggtgcaccatcactcgcaaaaacacggttaatctcggaaaaaaactcactttctacgcccgc

SEQ ID NO: 537357 - DNA, 733 bp, Homo sapiens
  misc_feature (379)..(379): n is a, c, g, or t
  misc_feature (398)..(398): n is a, c, g, or t
  misc_feature (403)..(403): n is a, c, g, or t
gaggacccgtcgtccatgggccggtgtgatccgtggacagaagaagggcgccgggtctgtgttccgtgcgtcacgtgaacgcaccgataaaggcagctgcgcgcctgctctccgtggattatcgatgtagacggacacgcgctacatcatacggtgcatcgctcaagggatcgatcatccacagatacctgggaccgcggtcagcagcctcccgtcggccaagagtgagtcattcctgggagtcctggtagtcagtctttaagtaatgcgcggacggatcatgcttcatgtgccgacagatggagctatatcatgagcggcgctcaggatttgatggtatatgcaggacaaggcaacgggcgcctacgcttacaagcanttgggcgacattgatgcgntcccntggtggcgtcgacgcagatgctcctgaatgggttaggcgaagacagctggtatgccttgtcacgtagggaggtgaggaacgcctgggtaggaccgcgctggacacagcggtgtgctcgctggcgtcgactctatggagtaagacgttatggcaccacacggatctgagttctcacgcgacagaaacccgtgagaacccaatgcacagacaccggtgatggagagcctggccactacccgagtcttcccaattgagaaggtatagttctcgctctatgctcaaccagaagctcgtgtgttcgcgtggttggtgcgcttggtagggttggcc

SEQ ID NO: 537358 - DNA, 374 bp, Homo sapiens
aactctcgaggatccccaacgcgctgatagcctcctgcctcagcctgccgagtgcctgcgattgcaggcgtgtgccgccacgcgtgactgtttttcgtatttttttggtggagacggggtttcgctgtgtcggcccggctggtctccagctcctaaccgcgagtgatccgccagcctcggcctcccgaggtgccgggatggcagacggagtcttgctcactcagtgctcaatcttgcccaggctggagtgcagtggtgtgatctcggctagctacaacctccacctcccagccgcctgccttagcctcccaaatagctgagactataggcacgtgccacacaaccctgggtaatttttttttttttttttttgg

SEQ ID NO: 537359 - DNA, 112 bp, Homo sapiens
gtctgagggcggccgaagtggctggctcatttaagatgaggctactgctgcttctcctagtggcggcgtctccgattggtccggagcgaggcctcggccaatcttgggcggc

SEQ ID NO: 537360 - DNA, 210 bp, Homo sapiens
gcatacggattacactgacattgccatccttacaggtactactccatcccttaaccaagcatttagcactatgcactccagcatgtaatcaccattccaaccacaaattggcacaaattctactgtgtctgggttgtagaccaattttcttaatgtgagtgcagacttccttatcaatttcctcatatctcttctggctgtacggatgga

SEQ ID NO: 537361 - DNA, 170 bp, Homo sapiens
cccccaacgaccgctccatacaccgcgcgggctcggcccacacagcgcgccgaccgcccgcccgcgcgccccctggatcccgacacgcggaggacgcgggctaactgcgacaccgacgctcgccccagggccccgcgcgctcctcccgcccaatgggcgcatggcggccg

SEQ ID NO: 537362 - DNA, 111 bp, Homo sapiens
ctcgcggggggggggggttgtgtgttttttttttttcctctcccccgcggagaaaaaaaaaaggggggggggcggggggccgcttcttctcttttttttttttataaaaaa

SEQ ID NO: 537363 - DNA, 884 bp, Homo sapiens
ccaggaacgtggtggtggtccctactttagcaaaggtagagaggaagcccggtggactgcagcttgtagcacagcctgttggcctgatacaaggagctgagccttgtgtttcaacccaaggaattggatggatatggtgactaatgaagcatgcacctcattacgtgcacagaatcttgccatttcttgtcatggacgtgctaatattatttgctaaatgaatacagtgcttgaggggcaggcaacaggcatgagtgtgcataggtattgctagcattattttatatattgaaggagagttctgcttggacaggaagaactcctattgattgtgctctttatattgatcaacttattgatattatggttttattgacgcaaaccctactgttacaaccaatatgatcgcaacatgttactctactattaactaggcttcagtatatcagggtttatttcattgtgttaaatgtatacttgcaaataaaataggtgcctacctgccccaaaagaggaaactggtctccctcttctctttggggggggtctgtggccggttccctttactgaggggtatgtcctgatccttgctcactggctgactgggttcagtcctttcaaggggggagagcgggttttccctcactcccggggggtactccgggtatacccatcggtacccggatgcccccagaaggcaacataccgcaaaacgcccgcgctagggccggttttccttaaaatgccccgcccctggccggtattccataaggttgccccccctgacgaggtggccaaaccccccggtcttttaaaagcccgggactcccccgggaagattattacccggttctttcccgaacgtcgtttagggtttcctgtcc

SEQ ID NO: 537364 - DNA, 920 bp, Homo sapiens
gaagccgcgagagcgcgacggtgggctgctgctgggcgcgcggggcgggaggggctgccgggactcgggtccccgcgtgtcccgtgtccccagcttgtcttaagcctctggcctgctgtaccccggggtggagcggcggcaattgggccgcaacccgggtggcgcttgggcccagggagcacctgttggtgcggcccggtgaaggactgagggaccggcttggagaaaaacctccgggaggggacccggaaaatggccgaggaaagccctcttggtgtgggataaaagaaaacgcgggcagcggcgcggggaaccaaaggggaggaagcctggcaaggagagcatgggggggcagaatgggatgggaacgggaccccctgaaggttggcagcgcccaaggcgcttggggaagaaacgggcccgaaaagtgtgctgggcaagcctgaaacgagtcgagccaggagcggcagtcccacacaggtggttggctacctctggcgggagaccccggggacgagcaccccaaaggcgagcagagagccagtctgttgagcgggcgcgaaaaggcggaaggcggaaagtcacaacgcgacaggcgccgcgggccacaaccatccaccaggcgggccaagtgccacggagtgggtgacaccaccatgttgcggtgcggccccacggcgtggcagaggggcactgacgagaacggacaagcgcggcgcaacgaggagaggaccttcccggtgaacaccagcgggggacgagagagcccagcggccagggatgtgcagaggaggggcgacagacgctaacagaagaggcacatcggcggggggggacaaaaacgccccgagaggggggggaccaccaccgagagagcccgcgagcaacggagaggcgatgccccgtcgaggggcagactc

SEQ ID NO: 537365 - DNA, 489 bp, Homo sapiens
actccttaccccactattagctactggttgggaaatgaacaaacacatgctagctgatttagctgcattcggtttgttctttaactgactatactcttacttggtgatatgtccattgaaactgtaccacttttaaatgggtcactgaggggaggggaccgcttggtttcgcattgtcttacattggaaaacaccttgcggcgggcgcagtttgagtccttgctgtccctccctgggcgtggactctggttctgatctcccctgctttgttttcctactctctctcgtgcagagacagggcagggcattgttcatgcactgaccgacctcagcagccccggcatgacctcagggaacggaaactctgcctccagcatcgccggcactgccccccagaatggtgagaataaaccaccacaggccatttgtgaaacccaaatcctgacgcatgttatcgaagggtttgtgatccaggagggggcggagctt

SEQ ID NO: 537366 - DNA, 313 bp, Homo sapiens
  misc_feature (11)..(11): n is a, c, g, or t
  misc_feature (82)..(82): n is a, c, g, or t
  misc_feature (105)..(105): n is a, c, g, or t
  misc_feature (120)..(120): n is a, c, g, or t
  misc_feature (191)..(191): n is a, c, g, or t
  misc_feature (220)..(220): n is a, c, g, or t
  misc_feature (226)..(226): n is a, c, g, or t
  misc_feature (243)..(243): n is a, c, g, or t
  misc_feature (255)..(255): n is a, c, g, or t
  misc_feature (261)..(261): n is a, c, g, or t
  misc_feature (269)..(269): n is a, c, g, or t
  misc_feature (285)..(285): n is a, c, g, or t
  misc_feature (288)..(288): n is a, c, g, or t
  misc_feature (299)..(299): n is a, c, g, or t
  misc_feature (305)..(305): n is a, c, g, or t
  misc_feature (311)..(311): n is a, c, g, or t
agccaccatgnacgtctttgtgttttggtgttttttttgttttgttttgtttgtttttaagagacaggatcggccaggcgtnagcacccgtgcccagcctctttnttctttttgagacanagtctcactctgtcacccactgcactccagcctgggcaacaaaatgagactccatctcaaaaaaaaaaaanaaaaaaaaaaaaaagaaagttaggaaatntatctnggggagggctggtaagnagcagaatgagntttgancccagggntgtttaaagccatatnctncatcactatgntatgcngaaatngg

SEQ ID NO: 537367 - DNA, 179 bp, Homo sapiens
attttgcctgtaatggtgatcctaatggctatcagaagggtacattgtggctccatgccgccttgccccgaggctcgcgcgatcatgaggatctgtcgctgatcatccacagctctcgatttgatcgactcgtcgtgcgcttcatctatcgtgacggtgccgtcgagcagcaacatgtc

SEQ ID NO: 537368 - DNA, 224 bp, Homo sapiens
  misc_feature (130)..(130): n is a, c, g, or t
gaggaggggaattccttcctgaggatttcagagatggagagtatgaagctggctgttacttttagagaagcaggaggatcttgacagacactttctatgcccacctctgtggacccttgggtggagcaancagtgtgaaacagcgatgaaacaacgacgaggcagagcttcaaaacagaaaaaactagaacaacagatcaaacgcttgaaaactttagacaggg

SEQ ID NO: 537369 - DNA, 185 bp, Homo sapiens
gttctctgctgtacgtggtaattaaaactacatgttttacaacgttaaagtaaagggtgccccgaataacaactaggttctttaaagttagtgtttcgggggaagcatgggggcttctttgtagcactcctttgaaaactatttccgagaaagctccaatacaaacacctttttcttcctaagga

SEQ ID NO: 537370 - DNA, 347 bp, Homo sapiens
ggagagccccggccggcttgccagagagatcccgcgcgggagagagcgcccagtgtgtacactgagagttcacacccaagtgacgcggcgcgcctgtgcatacagacgcgtctctcgttttacgcactacacgtctggacgcacgtctctcacagagttcaacgggagagagtgcgctctcgtagagagagagcagcgtctacgctatatcccccgtgttgtcccccgtctctctgggccccctcacagaccccctcgctctatgctctgcagcgtctgggagaggggtgagatcccagaattgaaagagggcagagaaaggggatatttttttgacagacaatctg

SEQ ID NO: 537371 - DNA, 191 bp, Homo sapiens
cccccccccccagaaggggaaaaggggggggggggggcccctctttgggggggggtccctcccaaaataattcccccccaaaaagggatttcccctccttaatgtttttttttaaccccctttagggggggggggggttggggggcccccccttttttttttccataaaaaaagtcccctggggtcaccca

SEQ ID NO: 537372 - DNA, 118 bp, Homo sapiens
tctagaggatcccacattgacgtcccgagagagatggactgtgggggctcgtccccaagcagcagggctgtgcgtccgagtctgtgtctgctatcagcgcttgccaagctccgtgctg

SEQ ID NO: 537373 - DNA, 473 bp, Homo sapiens
cgcgcaataggcgtgtgaggatcagttatatatagtgggattttttacagtcgatgggtgttcgagcttgacacgctttctttattagatggctgcttctacagcctactataggtgttaaattttttactctctctacaaggttcacacctagtgtccaaagatctgttcctctttggactaaccgcttaatttacgacgtgatttagagctgttctgtgttcaattttcatcaagaactaagattctatcttggacaaccagctatcaccaggctcggtaggtttgtcgcctctacctataaatcttcccactattttgctacatagacgggtgtgctcttttagctgttcttaggtagctcgtctggtttcgggggtcttagctttggctctccttgcaaagttatttctagttaattcattatgcagaaggtataggggttagtccttgctatatttggcccttatgag

SEQ ID NO: 537374 - DNA, 177 bp, Homo sapiens
ataaatgaacctggaaaactatgctactgaaagaagacagtcacaaaatgaccacaacattgtattgattccattttattacaacaatatctaagatacagcaaactctttagatgacatgatacatattttaaacggctcccctcagggctgggagtctggggacaggctgggagg

SEQ ID NO: 537375 - DNA, 121 bp, Homo sapiens
tatatcagctcggccctgattccccagttgcgatctgtgcttctaataagcgaatacgggcccttttcgatgagtcccttattcatggcttggaacaaagagatgatgtttcctgtttcag

SEQ ID NO: 537376 - DNA, 776 bp, Homo sapiens
taaaaggaaaacccggtaatgatggtcggggttgagggataggaggaaaaggggggataggttgtttgaactatgagggtgtttcctcgtgtgaatgagggtttaattgttgtgttaagtggtgggtgggtgtgagtgtgacccccaattgtggtgttggggtggctaaatctattgttagaagggaagtaataggcgcgtggtgacctagctagtgttgtgagtctccgtgctaagtatagagagaggtgcatattgtgactcaggaagaaacggtggtttaacatagaccacacagagagagagttctctctcccagttaggtgtataaatacgcgtggcgcggcgtataaaggggcgcaggttatagcgcgagagagcctgttgcatagaaaagtctcatctcacaaaaagccatatttataggtggggaagtataagaagttgtgtgaaaagtctccctttgtgagagaaggacggcaccttaagtgaacgtgcgcagcaccgtggtgggaagtgtgcgccgttcgcgcataagttgtgtagcacgttttgggctcataggcgcaagcaaatttagttaaagtgacgagggcattgtatatagcgccccgggtgtggcgcagaaattatgtgtgacaaacagtgtcacgtggcgccccgggtagaaaagccttctgagggggggggcgttggggccagtgaacacaagtggggcgtgtgttcacataacgagaggggccctagtggtgggcgtgaatggcaacaagaatagt

SEQ ID NO: 537377 - DNA, 142 bp, Homo sapiens
gctaattgtgggttgaccgtgtgcttgctcaatgtgttgcccagaaggcagaggtgatcatgaactacccatgtctggggagacggtgctgtccttgctgacagaccacgctgatacctgtgaggctcagacagtcacttgt

SEQ ID NO: 537378 - DNA, 184 bp, Homo sapiens
attttttttttttgggtagagatggagttaaccatgtaagccaggttggtctctaactcatgggctcaagtgatctacctgcctcggcctcccaaagtgctaaaataacaagcgtaagccaccacacccagcctgtccacttttaaaattcctttttcctaaatttaatttttaataatcattt

SEQ ID NO: 537379 - DNA, 440 bp, Homo sapiens
cggcctggacgaccgctaccggggcgtgcgcggccaacgtgaggtgctgttcgccaacgaagccgacatcatccgcctaggcttccagccagggcagaaagtcgacatcgtttcgctgtggggagatgagcatgtgcgccgggtgcaaggctttaccttgctgcctttcgacatcccggccgggcaggcggcggcgtattaccccgaggtgaacccgctggtgccgctggagagcattggcgatggcagccacacaccgacatcgaagttcatcgcgatcaaactggagcgcgcgcgggacgacgggcgcatcctgtaaaaacgaaaaaagccctgttccgttggggttcagggctttgtcataaaggtctcagacagccgaaaatcgataaagtttcacagcaaatacagtaacttagagaattgtgtacaactcgtgt

SEQ ID NO: 537380 - DNA, 1501 bp, Homo sapiens
  misc_feature (1090)..(1090): n is a, c, g, or t
  misc_feature (1501)..(1501): n is a, c, g, or t
ttcttttgcgtcgccagccgatccacatcgcgtcagacgcgggtggcggcatatggtgacatggtcggagtcagcggcattatggtcgtagtatgggctgccctgggtcaccagggtctgcttgttaaactgtggtgaaagatggatacttgttgccatcaatgaccccttcagttgacctcaactacgatggttgacatgttccggtatgattgccataccatgggcaaattccagtggtcgaccggtcaaggtcgtgacgaacgggagagcgttgtcagtcaatcggaagatcccatcactcactcgttccaggatgctgagatcgcctccagaagatcaagatggggcgagtgctggcgctgatgtagcgtcgtggagtccagtggctgtcttcgatcgaccagtggcagaaggctggcggctcatttgccagggtgggagcctagaaagggtcgatcatctgctgtcccctctgctagattgtcgccctatgtatcgtcgatgcggtgttgaaccgatgatgaagtattgagcaaaaggctcaagactcgtccaggaatggctacctgtgagccaacaattgcttaggcacccctgtggccaaggttcatccaatggaccactttggcgtattcgtgcgacaggacttcattgacacgagtccagatgccttcacatgtcaaccctaaaagaagtgttggttgggccccttccggggaaaactgtgggggtgaaaaagggccgccgggggtctcccaaggaaaagttttctccctgggtgctacacgggggcacggcacaaggtctgaggggggaccagggggcaaacctcggaagatacggaacgggggaaagacacccaatgggcgatagtgcactaccacgtgggaccccccaggggcgccacttcgcaacaatgtggggcaccacgaagaccgcggttttaagaaaaacacgcgcgcgcttattatatgagactcacaccatcaatggtgaagacgtacataatagaacagaccacaggagagtctaatacagacaaagaacaacgaggatattaatcataataagaaagacgagctacctncccaggcagggaggggagggacggccacaacacgactcgatctcagtgataagcgcacagaagaaacgagggagatcgctgcagtcagacgtaaggcagcccactcaggcaatcgagatgcgggatgcctcctccttctcgtgtcgtttcagtgggggctcagccgtgctgtaagaggcgctagcgagcgcagatacaactaaggcaaacagagaaaagacagctacgtaggactgagctgacacgtgagcagcatgagcaacagaatacggcctacacagaagagacagtagcacgactgcaagtaggcgcacgactagccaatgacagtgacgagtgagtaccagcacagaaagacgtggaggacgactgcgaaacaaaacgcagcaaaggacgtacacgcagcacgan

SEQ ID NO: 537381 - DNA, 866 bp, Homo sapiens
  misc_feature (194)..(194): n is a, c, g, or t
  misc_feature (201)..(201): n is a, c, g, or t
  misc_feature (675)..(675): n is a, c, g, or t
gggtcccagtgccccccgagtgggctctcccaggcccgagacctttcccgtcggcgttttacgccccctccctcctttttcgcctctttagggccctgtgccagaaaccgggtccgctaacttggccctcgggttctttttgccccccccctttttgtggtgttcttcatgccctccccgccctagacagcctngagaggncggcgatgaagaagataaagaaaatcaaggagagtgagacccaaggtcagcagaccacctcaacgtcggtaccgccgcgaacttcaagttaccgagcgcagacgcccagaaaaccctaaaccacaagatggcaaagagacaaaagcagccgatccaccagctgagaattcgtccgctcccgaggctgagcagggcggggctgagtaaatgccggcttaccatctctaccatcatccggtttagtcatcctaacaagaagaaatatgaaattccagcaataagaatgaacaaaagattggagctgaagacctaaagtgcttgctttttgcccgttgaccagataaatagaactatctgcattatctatgcagcatggggtttttattatttttacctaaagacgtctctttttggtaataacaaacgtgttttttaaaaaagcctggtttttctcaatacgcctttaaaggtttntaaattgtttcatatctggtcaagttgagatttttaagaacttcatttttaatttgtaataaaagtttacaacttgattttttcaaaaaagtcaacaaactgcaagcacctgttaataaaggtcttaaataatagtcttgtgtacaacgaaaaaaaagaaaacacagaaaaaagacacgcaaaagccaaag

SEQ ID NO: 537382 - DNA, 950 bp, Homo sapiens
  misc_feature (194)..(194): n is a, c, g, or t
  misc_feature (201)..(201): n is a, c, g, or t
  misc_feature (675)..(675): n is a, c, g, or t
  misc_feature (761)..(761): n is a, c, g, or t
gggtcccagtgccccccgagtgggctctcccaggcccgagacctttcccgtcggcgttttacgccccctccctcctttttcgcctctttagggccctgtgccagaaaccgggtccgctaacttggccctcgggttctttttgccccccccctttttgtggtgttcttcatgccctccccgccctagacagcctngagaggncggcgatgaagaagataaagaaaatcaaggagagtgagacccaaggtcagcagaccacctcaacgtcggtaccgccgcgaacttcaagttaccgagcgcagacgcccagaaaaccctaaaccacaagatggcaaagagacaaaagcagccgatccaccagctgagaattcgtccgctcccgaggctgagcagggcggggctgagtaaatgccggcttaccatctctaccatcatccggtttagtcatcctaacaagaagaaatatgaaattccagcaataagaatgaacaaaagattggagctgaagacctaaagtgcttgctttttgcccgttgaccagataaatagaactatctgcattatctatgcagcatggggtttttattatttttacctaaagacgtctctttttggtaataacaaacgtgttttttaaaaaagcctggtttttctcaatacgcctttaaaggtttntaaattgtttcatatctggtcaagttggggggggggcccgggggggaaaaaggggggcaaaaaaaaattttttttttgtttttttngttgaagaaggagagagccttccacagatttttaagaacttcatttttaatttgtaataaaagtttacaacttgattttttcaaaaaagtcaacaaactgcaagcacctgttaataaaggtcttaaataatagtcttgtgtacaacgaaaaaaaagaaaacacagaaaaaagacacgcaaaagccaaag

SEQ ID NO: 537383 - DNA, 117 bp, Homo sapiens
gcgtggcctggctgtatttcactcgccaggtgcttattaggccgtgctccaagtcatcgtccggtttctcactgtgatgatgaagcatggttacattggcgagtgaaattacggcca

SEQ ID NO: 537384 - DNA, 173 bp, Homo sapiens
ccgagagccgctagaggccacctactcatgcacctaagatggaagcgccaccctattaatatcaaccattaaccttccctctacactgatcacctgcacaatgctaatgctactgacgatccgaagcagcgctggcgcattaatccaagcgtacgtattcacacttctagtac

SEQ ID NO: 537385 - DNA, 820 bp, Homo sapiens
  misc_feature (194)..(194): n is a, c, g, or t
  misc_feature (201)..(201): n is a, c, g, or t
  misc_feature (675)..(675): n is a, c, g, or t
gggtcccagtgccccccgagtgggctctcccaggcccgagacctttcccgtcggcgttttacgccccctccctcctttttcgcctctttagggccctgtgccagaaaccgggtccgctaacttggccctcgggttctttttgccccccccctttttgtggtgttcttcatgccctccccgccctagacagcctngagaggncggcgatgaagaagataaagaaaatcaaggagagtgagacccaaggtcagcagaccacctcaacgtcggtaccgccgcgaacttcaagttaccgagcgcagacgcccagaaaaccctaaaccacaagatggcaaagagacaaaagcagccgatccaccagctgagaattcgtccgctcccgaggctgagcagggcggggctgagtaaatgccggcttaccatctctaccatcatccggtttagtcatcctaacaagaagaaatatgaaattccagcaataagaatgaacaaaagattggagctgaagacctaaagtgcttgctttttgcccgttgaccagataaatagaactatctgcattatctatgcagcatggggtttttattatttttacctaaagacgtctctttttggtaataacaaacgtgttttttaaaaaagcctggtttttctcaatacgcctttaaaggtttntaaattgtttcatatctggtcaagttgagatgcttaagagcttcagtcatgataagtaattaaagtttgcagcttgagttttcagtgaaagtcgaccgagcccctgcacctgataatgggcgtcataaataattgtctgtgtgta

SEQ ID NO: 537386 - DNA, 242 bp, Homo sapiens
tgttgtggacgagctacgctatcggcgccgaccccttgcgagcacttgggcaggtgcgttgaacacgctgggctccttcctggtgccagctgcggtcgtggctgggatgcaccctcgcgtgtgtgaccgtatgtcgatcgaggtgctcttgtcggcggcccctggccgaagatccaggcccacaggtgccctttcgaaccccgcgatacgtgtgccagtatcaccctgctgatctagctact

SEQ ID NO: 537387 - DNA, 234 bp, Homo sapiens
aaaaggggggataaaaaagggggggaaaacccccaaagggaaaaaaaacggccaaaataaaggggggaaacccaaaatagttaaaaaaggggggggggccccccccccaataagttgggggttgatgggaaaaggaggggggttttaaagaattaatttgggccttaaaccccaaatttaaaattggtttttttaaatgggactcagggggaggaaaattccccctttttttta

SEQ ID NO: 537388 - DNA, 272 bp, Homo sapiens
tttccccaaaattaaattttgtttttcccctaaaatggtgatacaagttgaagacccctccctctgaaattggaagacccccccccttaaggctccccagtggcttactcagctgaactctaggttactactctttacttttttcccccattggggggggcagtttttttaaaatgttggggggtggcccttctaactactgttgaatgtctcttttttggggaggtttaacaagaaataaaaaagaatttttttgaagggggggactggta

SEQ ID NO: 537389 - DNA, 109 bp, Homo sapiens
agggttaactttttttttattggggggtttgattttttcccccaaaaatgggttttttttgagggacccaagttttaggtttcccaaaaaaaaaaaaaattttccctta

SEQ ID NO: 537390 - DNA, 522 bp, Homo sapiens
aacacgttccaccaccaggaccccggtgtgagaaaaacaccccgcccacccgcgtctttttggaaactctaacatggtcgtacacgcgccttattcggagttttctcttggggtctttctctcgtgaaatcttacatgttgtcgtgtgtgcgtgtgtgggagacacgcgtgagtcccccgcgcgtgtgtaactcacaccgcgcccgcgctggggggggagtgccacccacacaggcgcgcgaatcccctcgccacacataatatctcggcacccgggaaccagagcgcgcggggatcccccccacaaaaacccacgagagcggcggggggtctcacccactatggattttggggacgatttttgtgggttattgtgggccctctttatcctaggggcctcccctccatctctctctacagaaactttccacccttttgtggcaactccctctagtaaaacacccaggtgcggcgtgcgcacaacaaataacaaaacaaaatatacaagaacaataaaaaaaa

SEQ ID NO: 537391 - DNA, 619 bp, Homo sapiens
caggaaggagctatttcagcaaagtgacaggaacagaagcttcataaagccaaggaattgacagtggtgaccttactagttgggctgccgttatcagaatgcaacttattgcagttaacttgagcctggttgagtggatttatattatctgcatttaattacattaatcttcacaaaatgaacaagtggcttagagatttgctcaaagaaatagtagattagagataactgtaacactgcaaacaataacaagaaggtagaactgacatttctcctcctggtgggagctctttgtcacatttcaaggtaattacatctgtcaaggagtcagcctaaaaaatgaaattgtcaagaagactatttgaaatatggatatatatacacattatcatcgataatgaatttcaccttaagaatgtattgtactttgagtcatatagtagctaatgatataatgacttcatctgggttatgtttatatcttatatattttgctgtatctcagtctttcttgggttctgtatttcatatatgggttatagtatatatgcgttaataaatattcatagagtgagggacatatactcacatttttactgatgtacatgtgctctgaaaa

SEQ ID NO: 537392 - DNA, 148 bp, Homo sapiens
tgtgtgtgtgtgtgtgtgtgtgtgtgtgtgtgtgtgtgtgtgtgtgtgtgtgtgtgtgtgtgtgtgtgtgtgtatgtgagtgtatatgtgtgtatgtgtatatgtgattcaccagagcttgcaaacagcatattatagagctcttcag

SEQ ID NO: 537393 - DNA, 662 bp, Homo sapiens
  misc_feature (577)..(577): n is a, c, g, or t
tgctgaggccctcacctgtgatcttagcacttagggtggccaaggcgggcagatcgcttgagctgaggagtatgagatcagtctgggcagcattgtgaaaccccgtctctgcaaaaaatacaaacattagccaggtgtggtggagggtgcctatagtcctagctacccaagaggctgaggtggtaggatggcttgagcccggaaggtggaggttgcagtaggctgagattgcgccattgcactaagcctggatgacagagtcagaccctgtctcaaggaataaatagatacgagaaaagcttaatggcttgtgtatattcactcttgtgcgtgtcacttatttacactgtgaagccaagtctccaactctccaactgtcacccaggctggagtgcaatggtgcgatcatggcttgctacagcctccaccttccgggttccagtgattctcctgcctcagtgtcccgagtagctgggattacaggcacacgccaccccatcgctcctaggagacagaggttgcagtgagccaagatcgcaccactgcactccagagcgagactgtcacaaaaaaaganattttacaattatgcatgcggccggaattcgggctacttggccattcgccctatagggagtcgattacaaatcatggccgagttt

SEQ ID NO: 537394 - DNA, 920 bp, Homo sapiens
  misc_feature (36)..(36): n is a, c, g, or t
  misc_feature (66)..(66): n is a, c, g, or t
  misc_feature (97)..(97): n is a, c, g, or t
  misc_feature (101)..(101): n is a, c, g, or t
  misc_feature (106)..(106): n is a, c, g, or t
  misc_feature (127)..(127): n is a, c, g, or t
  misc_feature (142)..(142): n is a, c, g, or t
  misc_feature (197)..(197): n is a, c, g, or t
  misc_feature (212)..(212): n is a, c, g, or t
  misc_feature (254)..(254): n is a, c, g, or t
  misc_feature (276)..(276): n is a, c, g, or t
  misc_feature (310)..(310): n is a, c, g, or t
  misc_feature (332)..(332): n is a, c, g, or t
  misc_feature (353)..(353): n is a, c, g, or t
  misc_feature (671)..(671): n is a, c, g, or t
  misc_feature (795)..(795): n is a, c, g, or t
  misc_feature (846)..(846): n is a, c, g, or t
  misc_feature (848)..(848): n is a, c, g, or t
  misc_feature (894)..(894): n is a, c, g, or t
ggggggggcagttattgaacaagaaggagttccacntttacaaatggacaaaaaatgttgtaatgnttttcaaggaccaattgaacaattcaaagtngttnttcanttttcttttgaccaccaacanttgcgtgtaatgaanagggcgagttaaggacgcaaaaggtacggaggaagtaccttgcgctttacgcacntgattgaaaacaaantaaaaaaaggaggaacaaatcaaaaatggttggattgccgantaagaggaaaggcgagagggcnacaaaaaagggaaggccgtaggggaccaaaaaangatatttcaaggagttcctaantcacaaaagtacacttcaggncatggaaaaagatttcagtaccaaaaggcgacctcagtctcacatccacacattcaaaaataattaaaattttacatgaaaagttggaaacacaaaatgaactagaaaaacaatatataaattaggacaaacactgctttgcaatgggaggacctttgtaaatctgacagtgaaagtgaagaaggagtttactagggatctgtttgacattacagaagcattcatattcatacaccataaaacctcatatacaacattataagacaaacaacagatttgggggaaaaacactccaccatctgtgaaagactgtatgtnaatagtcaaaaagacttaatcagaaaatgatagcacccaacagaagaaagaccttaatgggcttggccagttaaaaaataccaatcgatgcctaagatacctataaaaatatgtgcaaactggntaactaaaataatgcaaattaaagcaatttaatgccattatttttcctgtntntgaaaggcaaagatttaaaagaaccataatccctggtgcagggccnaggcatagatcagcagcccctcatct

SEQ ID NO: 537395 - DNA, 392 bp, Homo sapiens
agacccagacatcttcaatatgtggacgagacaactacatagcagaccagactataaaagaatctcaaaatcacacggacacagctactcttaaactttctcgctatcaaagggtatagggtctccccctccaaggcccaactctccatctccatgatgacttacttaggaattcaactttcccctggggcccaggctatgactccagccagggcagcattaatagaaaatctacccccaccctcctccaaaagcgaaatcctttccttcccagggctagcaggcttctttagaatatggatttccaactttgccctcctagctcatcccctctatgaagtggacaaaggccctcccaatgaacccctaaacccctcacataacatactccc

SEQ ID NO: 537396 - DNA, 177 bp, Homo sapiens
tctatttgcagtagatcgtagcttctcttagaagccatcttatccgctgacctgtgtgagattttttcccacaataatagctatgataaagaaatcagtgtactacatgttcttagctctcacaatttagcctaaatatttgccctggcatgcttatagtggtccaagaaagcatta

SEQ ID NO: 537397 - DNA, 201 bp, Homo sapiens
atgatgtaactgttttgttcaagtctttatgggtcaaggttgagggctcgttgagaagagggctcagaaaagcctggctagtttggctgggtagagaatctttgtcaggagtgttgagtctggctagtagtgtctccttttataaggacttggcttattcatcactgttgaacatactcctaaacccttgtactcttcaca

SEQ ID NO: 537398 - DNA, 297 bp, Homo sapiens
ctctacaggagctatgtgcatagtgtactattcacaatagtaagactggaccaacccaaatgtccatcaatgatagactggattaagaaaatgcagcacatatacaccatggaatactaagcagccataaaaaatgatgtgttcatttcctttgcagggacatggatgaagctggaaaccatcattcccagcaaactatcgcaaggacaaaaaaccaaacaccacatgttctcactcataggtgggagctaaatggtgagaacacaatggcacgtggatccacaatggcacgtggat

SEQ ID NO: 537399 - DNA, 137 bp, Homo sapiens
cctttactaccagacaacctttagccaaaccattttacccaaattaaagtattaggccgattagaaatttgaaaccttggcggcaattaggattattagttaccttcttgcattaattgaatttaacttaggaatta

SEQ ID NO: 537400 - DNA, 223 bp, Homo sapiens
acagtcaccaggatgattaaatttaaatcccaataacaaggctgatttcagatgtctcaccccaaagaaggaggataagggagcgaggtgatggatatgttaattagcttgatttaatccttccacattgtatacatgtatcagaacatcacattggactccatcaatataatacaattattatttgtcaatcaaatattaataaaatcaaagatgagcagga

SEQ ID NO: 537401 - DNA, 785 bp, Homo sapiens
gtatcgaaaacggggaaggaaggcaggaaggaggcggaataaataaagaataaaaatagagaagtaagacagaataagatagagtacattttaagagcatgtcaagatggataatacaagtgaagatttaccagtaagaaagtatcatatcgtaagccaagatatgcaaaaggagtgcattcagtaagctgtaagcgtctgagaaatgtaactgtgaaagtcaggctcaccagttcaagtcactaggttagccacttggaccggtcttggtttcagcgagcatagcgagtggctgtaagaaagtgtccatgccagccaatatccacgtgcgtacttgcccaggtagtgatcagtgagagtgagaagcaatgttttctctaagccgatgaggcagaagaaaagttaagcagtatttgaagagcagcgattttctctcttaacgttcctgggagactccaacaaatggagaccagaaacaaggcaaccacgaccttgctaggttctctgaggaggggactttctatgtacacgtcccaccttcttcgaggacatgaccaagggacaggatcatacagatgaggtgaggggattcgttagcagcgataaacattctcagagcctggagagaaaccgtctgctagcgtagctgggtcccgaaagatggcaacattgggctgctacagaaaggatagaaccgttacaggggggagggtggcgacgggagcatcttataggtgcccagaagcagctcatgtatgctccggacgtgggctaacagaacaaga

SEQ ID NO: 537402 - DNA, 533 bp, Homo sapiens
gagaggtagtatgataccgaagtagtgaagataatgatttggagagtgagctatcagtgagagagaacaagacattctgcaggttatatgtaggaaacagcacagaagactaggaggtataacctctggaaaaattttcttccactcttctatttttacttctctactcttccctattcctatattattccctagcattccctttttctcatcctagcttttcctctccaccgtgctgcgctatttcagtatctttctatgcagaacgttactttttgttgtattatgcaactacagtgtaatctttttgaatactttaattagtaatttaaactcaacatagtcttagcaacagtgcacgttacttagctggcatgaccatagtctgagcggtgtggccagtgtgaagcatgagtgtgcagtgagcaccgcatcacagcagccacttgccggcagcagctgtaaggttgtatctaagccgtgtcttgattttagctatggtcaaatgagaattcatgaatgtttaaatttct

SEQ ID NO: 537403 - DNA, 1322 bp, Homo sapiens
aatcgcaatggcattccgtaagtgcttacctgaatgacaaaattctagtgctatatacaactacttcaaaggccccaacgttgtaggcccctacgtgctactacaatccttcgcatgacgccataaaactcttcaccaaagagcccctaaaacccgatcacatctactcatcactccatctacatcgaccgcacccgaccttagcgtcatgaccgatcgactcattcatactatgaagcaccccgctcccgcgatagcgccgacatctcccttggcttccggaactagaaactgaggcccttgctcataatacttctagaccgaacggctaatgcgatgacaccgactgaaggcagaagcatctgacatcacgagctgacactaatctaaagaaaaacagtgaaagccaccctggactcggcacgcacagtggctacagacaggacatgcccaaccagggactccgtcgctcatccgcagtttggagcccaaagtgcactacgaccttgcctcatctactgcaacatgttgcgacagtaaagatagaccgacccattgaaacgtcattcaccctggctctaaaatggcaaacaaacaaacagcaatcgacacatcctcacgataacaccactaatacatgaactcacctcaagccgatcgagccgcaacacttatggcaataaatcacagtccaaaacctaagacagcaagacaaccagccacagacacaaccgtacaaagctctggaccgaaagggcaacgaaccggaaaaacaagatacacacgggacagcaacacaaaccaaggaaacagccagcacgggacgccagaacaagaccacaaacaacatcacagtagaaccgacacgccacacacaaacaatacacgcaggacacaaaaagagacagaacccaagaagaaagagcgcacaaggcaacaaagaatgaaaccaacccagactgggaggactaaacgcaaccaaggaggccgaccaagaggccacgaaggaggaacacggggaagagagacagaccaagaggcaacacacaaacagagccacacgacaaaacacgaccagcagaatacacaaacaaacagcaacagaaaagagtagccagcacgtaaaccccagatagcacacgccagcccaaccacgccaggaagccaaacaaagcagacggagacagcaacccaggcacccaccccacgaaagaacagagacaactaacggaaagcgcaacgccggcgcagcgccaacacagacagcacaccacacacagagcccagcgcccgaagccaaagaaaaaaaggaagaacggaga

SEQ ID NO: 537404 - DNA, 517 bp, Homo sapiens
ccgggcaagagagaggcatgtctctcactataaatcaaaagctagatatgattaagcatagtgaggaagacatattgagggcggattaaggctgaaagttgggccttttatgcccaattgttagccaacttgtgactgcaaagaaaagttcttaaaggacataagaagtgctactccagtgaaaacaagaataaaaaagtgaaatagccttattgctgatatggagaaagttttagtgacctagatagaggattaaaccagccatgatatgctcttaagcgaaaacctaatccagagctaggtcttaactctctgcaattctatgaagggcaagaaagttgaggaaactgtagaagaaagtttgaagctagcagaggttggtttataaaggttaaggaaagaagccatttctataacatacaagttcaggtgaagcaaaaagtgcagatgtagaagctgcagcaagttatccagaagatctagctaagattatggatgaaggtggctacactaaaca

SEQ ID NO: 537405 - DNA, 211 bp, Homo sapiens
acatgatacaacttcgagcttggtacctgaacattcgtgtccagagccttagactttgagaggactctatcctccttcagtttctggggttacatgagggaaacaggggtttttcctagaatggggtctgtgacgcctcctctgtttttccccaggagtcccaggctgttagtaattatcttaggttctctcatgtggacacgaatgttca

SEQ ID NO: 537406 - DNA, 530 bp, Homo sapiens
cacaccacctgagtcatattcatattacgaagagacatgctggagtcctgggggaggcgctatccatgcggccatgagacgaggtgtgcccgccttatcggccatgcgactaaagtcttaagggggcgcgcgcttttgtcgcatcggaccaggggttgggtgagttcaggaaccagatcgggtaaatgcagtcactaaggctcgaaagtgcggcccggccttgcatcatcggtctgcgcggccagggataaccctggcatccgaggtgaattttctttatcgtcaccgccctttttaaaagcccgagaaatcaaaatgttagaagcatccctcagccaattggaacaactggtcagcgacctcgtacagcagaatcaagaattgctgggcagcaacgaatccctcaaggccgagctggcccgcgccaaggacgaaaacgacagcctgcaactgaacctgatggaacaggaagaaaagcacggcgccaccgccgcccgcatccaggcgctgggactcaggtggtgtggggg

SEQ ID NO: 537407 - DNA, 646 bp, Homo sapiens
gcaggtccgtaggcatgcattgtgcccagcggaatggcattgtcttgaatgccccacttccacaatggactggcagcggcgctgtggccacgtggttcaaccagccggccgtaagatccgcagacgtaaggcccggaagccaaggcgcgcctgatcgccccgtgcccgcgtcgggtcccatcctggcccatcgtgcgctgccccacggttcgggtaccacacgaagtgtgcgcgccggccgctggcttcagcctggaggagctcagggtggccggcattcacaagaaggtggcccggaccatcggcatttcttgtggatcctgatggatgtgcggaacaagtccactgggatggtccctgcatggccaactgtgcatgctggcttgaatggaggtaccggatccgaaactcattcctcttcgcccagtgaattgccctccgtggccccaatgaaagggagcacatgttcctgcttgaatgagacctgagaacttgtgccaatcctcagtcttgacccgggacccgggtcatttgccccggtccgggaaacggtcgtagtagaggacacggaggacaagggctcgagttcagtcactgtgatgcgacacgcacgaacggaaattttccgaagagcgcctttcgcctt

SEQ ID NO: 537408 - DNA, 208 bp, Homo sapiens
ctacctacagccactttgccagagaagagcgatgattcatgctgaatcatgcctctagcttatttgttcggtcataacagagatcctgccagctgttggaatgaaagtagcgcttctctttagagagtgacaagcctgaggcaagggacacagcgcgatgagagatcccactcagaagcggagatgctccttggagtctgacacactc

SEQ ID NO: 537409 - DNA, 385 bp, Homo sapiens
agacctgatgatccgtcctcctatagcctcccacatcctctctttacacacagtagataactcagaaatatttagtaaaagcaagagatctatcaatttacattttggctctagtcataaacagaggcaaagaagttaggacagtaaagtagagtgctaagagctcttaacgcccctccccttcttacccaagctataccaacttcctagcccttttatacaactcctagaatagttaaagagaggacacatctaaaataggaataagaggtgccccctaaagcaggaaaaagtgaagaaaaggctagaggcatgggccagggcacacattgagcctaaacgtgaaagactgtgctgtcgttaagagctttcgaggcaggagtac

SEQ ID NO: 537410 - DNA, 199 bp, Homo sapiens
ttattggtacctgccttttaaactttgtttacccccctaaaatctgcttatggccccatttgccccaaaatcccttcccagttggatatttgttttcccataaaaaaaattccatttaccccatgggtgctctgcctttgagtccttttactgttgaagtttaataatttttaaaataaaatatggccttgggttttta

SEQ ID NO: 537411 - DNA, 187 bp, Homo sapiens
gccagaatgtttggcattcaatcgttggcagattatcttctgatgacacaaagttcagagaggctgagatgccttcatctgtgttgaagataatctggaggatggatgccatgcggttctaccctctgttggggcggccgcggggggtctggggtgtgtggggcccgtgtgggtgcttggcgcgggc

SEQ ID NO: 537412 - DNA, 172 bp, Homo sapiens
gtgatctgaggatcccatgcccattcgagtgcataaatacgtagagaactgcctggtcaccggcgccgcccccggagcccacgcaggcgccgcctgagaaccagttctgcgtctcctcgtcgtacagctttgtggagctccgactgcaaggccatcagcatggccaggcagg

SEQ ID NO: 537413 - DNA, 629 bp, Homo sapiens
ttttgcagtagaaaaggaagtttaatcataagggtggcgaataaggagacagggggaaacctcaaatctgcctgtctgagccgtttaggtctaggtattttaagggagttggagtgaccgaggtgggggatcactggttgaagaatacaggatggtgagatgaaaaaactgcattttcatgctgattcatttcctcttggggagaggcgggggggcggtcttcaaactggttggcaatagcttttttgctggaattcaggatctgaaaaacatctgtttcactgaaagtagacccgcagagctgcggcttttgctgccatttcctcctctgatctccaagaggcaggaaagtcctccttgttatgtttctggagctcctcatagatgctgtcattcttgtgaaagtctccagcctctctgtgaagaacatggacgtgaacgtgctttacagtctgtccggctttcgggccatcctgtatggaagatgtgagataggtcccatggtaatgtcttttcaccactgtctcgattctgtgtgtctgctgatacaaatcgctcacgttatgaggacgtaggtcattgatactctgcactgtccatagctggcacactatgtcatgttctggtac

SEQ ID NO: 537414 - DNA, 118 bp, Homo sapiens
ctgcgggcttatgatcctcgcacgttacgtgggaattcctcgttcatgtggtgaataattgcaactccccgtgtggtatcctctagatgtctgaccttgcatgtgcatgcaatgcttg

SEQ ID NO: 537415 - DNA, 250 bp, Homo sapiens
gtgctcacttcatcgcgttatttggaaacaaacaagaacatagggcaggctgggtgaggtggctcacgcctgtaatcctagcattttgggaggccaaggtgggaggatcatttgaggtcaggagttcgagaccagcctagccatcatggtgaaaccccgtctctactaaaattataaaaaattggccgggtgtggtggtacacgcctgtagtcccagttacttgggaggctgaggcatgagaattgcttg

SEQ ID NO: 537416 - DNA, 227 bp, Homo sapiens
gagttacccataccctaaattgattatgcttcaaagactaagacgatagtggaagacaaagagaaaacataaatgggatcttccacaaaatgaaaaatcttttgtgcagcaaaggacgttattaatgaaagtaggcccatgcgcagtggctcatgcctgtaatcccagctactcaggaggttgagtcaggagatgtcacttgatcccggaggcagaggttgcatgca

SEQ ID NO: 537417 - DNA, 370 bp, Homo sapiens
  misc_feature (33)..(33): n is a, c, g, or t
cttacgtccccatcccggagtcccctcctcccnacagtccccactgacccaaagtcaaatcaggagctgtatcatttctttgctgatttcctcgctctgcagttctattttaattcaacttcagcaatcttcaaggagaggggtactttgttttgtcctggaaacattcgtaagacataaccgcggccgcggttatgtcttacggagttcccattgtggtgcagcggaaacgaatctgactaggaaccatgaagttgcaggttcaatcctgacctcactcagtgggttaaggatccagtgttgccatgagctgtggtgtagatcacagacggggctcggatcctgcgtaagacataaccgcgggtccagg

SEQ ID NO: 537418 - DNA, 560 bp, Homo sapiens
atcaatgaaagcaagagtttattcttgaaaaatagactgctagctaaattaacaaaaaaaatgaaggagaagatcctaacgagcacaatcagaaacaacaaatgatattacagctgatcccacagatatgcaaaagatcctcagagacttatgaatttatgaacaactctatgcacacaaattcgaaaatctagaaggaacagataaattcctggaagcacacaatctcccaagattgaatccggaagagattaaaaccctgaatagactaatatcaacttctgaaattggaatcagtaataaagatcctaacaacaacaacaacaaaaaagctctggaccagatagattcacagctgaattctaccaggcatacaaagaactgatactgatggtactgaaactattccagaaaattgaggaggagggactattccctaactcattctggtgaagccagcatcagcctgatacaaaaatctggcaaagacacaatgaaaaaagaaaactccaggccaatattcctcatgaacatagatgcaaaatcctcacaaaatattg

SEQ ID NO: 537419 - DNA, 926 bp, Homo sapiens
gctctcggtttcggctcggaggaggcaaggtgcaattccttcggtcgtcccgaatccgggttcatccgacaccagccgctccaccatgccgccgaagttcgaccccaagagatcatatgtcgtatacctgaggtgcacctggaggtgcaagtcggttgccacttctgccctggccccaagaatcggacccctgggtctggtctccaaaaaaagtgggtgatgacatgccaaggaaagggggtggcctggaagggcctgaggattacagtgaaattgaccattcagaacagacaggccaagattgaggtggtgcttctgctctgccctgatccatcaaaagcccctcaaaggaacccaaccaaacgagaacgagacagagaaccggaacaaatatttaccacccaggctgtgaccttcttcactttgggatgagaatgtgtcaacacattgtgctacggacaagatgcggacccgattctgttaaggcagagaactctctggaccccactttacacgaagatgcctggggacttgcccagccagccgggtttgcactgttgattggcggacactccttactgacactccattggatgaccgctcaaccagtgggtgcttggggaactggcccagaccaggtaagccacagggaagacccttcactaacgcgctatgttgaacagtggggcacccgccacaagaacgccacgacacaaccggtgggcaccagcgccgagcaaagctccaaccaaccggagggacgcgccaagaaaaagaaggagcactggcgccgacagaactgccactaggtgaggcctccaacaaacaccgggcacgggccacacccaggccagcaccggacaacgaggacgcgaacgcgcggagacagagacgaccaagacggcagaccacggcaccagccacac

SEQ ID NO: 537420 - DNA, 269 bp, Homo sapiens
  misc_feature (2)..(2): n is a, c, g, or t
  misc_feature (7)..(7): n is a, c, g, or t
  misc_feature (12)..(12): n is a, c, g, or t
  misc_feature (39)..(40): n is a, c, g, or t
  misc_feature (56)..(57): n is a, c, g, or t
  misc_feature (60)..(60): n is a, c, g, or t
  misc_feature (74)..(74): n is a, c, g, or t
  misc_feature (93)..(93): n is a, c, g, or t
  misc_feature (95)..(96): n is a, c, g, or t
  misc_feature (101)..(101): n is a, c, g, or t
  misc_feature (121)..(121): n is a, c, g, or t
  misc_feature (124)..(124): n is a, c, g, or t
  misc_feature (160)..(160): n is a, c, g, or t
  misc_feature (164)..(165): n is a, c, g, or t
  misc_feature (177)..(177): n is a, c, g, or t
  misc_feature (179)..(179): n is a, c, g, or t
  misc_feature (185)..(185): n is a, c, g, or t
  misc_feature (205)..(205): n is a, c, g, or t
  misc_feature (234)..(234): n is a, c, g, or t
  misc_feature (237)..(238): n is a, c, g, or t
  misc_feature (242)..(242): n is a, c, g, or t
  misc_feature (251)..(251): n is a, c, g, or t
  misc_feature (265)..(265): n is a, c, g, or t
tncgtgnccgtncgccaaatccccccaggaccttaaggnncccccccccatgcctnnccnccttcccggaaacngggtaggactgtaggaccntnnaaggntccatggttcgccccagtcntcngataaaaggcccatgcctcaggcctgccccttgtcngctnnccctcttcgacntncctttnctttgaaagatgtcaagccntcattgcccctaaacaattctcactaacnganncccnccaacctcntcgatcatagacgncgcc

SEQ ID NO: 537421 - DNA, 112 bp, Homo sapiens
tgatgctgcgcagcgtcagcgattgtccacgtctagctcagcatcttctacagcaggtccgcagcctgggggctggcccgtggaaacagctgagtgaaatccttcctggggg

SEQ ID NO: 537422 - DNA, 146 bp, Homo sapiens
gtcaatcgcaagggtgccatcgtcatcgccaggcatgcgcacgagcaacccgaacaatgttcaggcgctttcgttgaggtttgccgcgttgcgtatgtctctttgacctaatgccggaaaattggtcgcgattgtagatgttattg

SEQ ID NO: 537423 - DNA, 726 bp, Homo sapiens
atggtagccaaggaagcccgctatgttaccatggaaaactgagtgagtggttgagaaatgaagacttgtcagtgtacttagaagaagtaaatatcttttgaattagagaaagtgtcgggacagaaagtactttatgtagctaagtgggctggttgcagaaaagcttagaggtcattatgtcggtaattgttctgttttgaagtgtactttaggagagacgtagggatgcaaactgtttctcagttagaaagcctttatttgatcttttggaaattgaactagatgaaatgctgtctgtcttagaaactggagatgattctgatgtgtaggtaaaatatgtgaatgtttcttctggggaaattttgtatcagtgtaattcgaaaattgagaatacttaggaaggaagcaagtgtcgtatcttataatagtttatgttcatcttttctgttaaaagaagattaaatgtaactcattttggtcagaatccagttattgtggagcataaaagtatgactgtgtgtgatccaataatatataaacactattggtaaattggatattaacttgccaacagcatagtatgcttcgtgtagtactatatctgtggtgactctaattatgtatagcagagtagtctcaactcatatctggactggtaattgtgatgaaacaagtagtgttgtggcttatgtccgggatgtaatgctagggtgtcaatattaaggg

SEQ ID NO: 537424 - DNA, 181 bp, Homo sapiens
  misc_feature (169)..(169): n is a, c, g, or t
  misc_feature (173)..(173): n is a, c, g, or t
tcgcagagaaggaacaatcagggccatgacaggaaccgcaaagaaccagagggtataggcagcaaagaagggcacataaaaaggctgcttctcaggaaagtgtcgcagtgagacaaacacacatacagaccacacacagaccaccacctcaatcatgggccctagccgncctngtaatacg

SEQ ID NO: 537425 - DNA, 608 bp, Homo sapiens
tgtgggaaatcctttacttataactcactacttcttcaacacagaactattcataccggagagagaccttatgtatgtgatgtgtgtgggaaaacgttcagaaacaatgcaggcctcaaagtcccacaggaggctcccatactggggaaaaaccatataagtgtgatgtgtgtgggaaagcctatatctcacgctctagccttaaaaatcacaaaggaatccaccttggcgcagaagccctataaatgtagctattcgtgagaaatccttcaactacagctctgccccttgaacagcactaaacaggcacttcataccagggcaaaaacccctttggcgtgtgactgagtgatggtaaacgctctctcagcaacataattctggcctctaaagctacactaaacgcaatccacactggggaacgacccttacaaactgtgaagaactgtgggcaaagcatacatctctctctcgagccttataaatcactaaaagtgctacaccctggggcagaagcccctttcaactgtgacgagatgtgacaaggccttcatcacataccgaaaccttacaaaccacaaaacaagttcatcttggggagaagccct

SEQ ID NO: 537426 - DNA, 1427 bp, Homo sapiens
  misc_feature (722)..(722): n is a, c, g, or t
gagcggagagtcgctgcagctgcgtgtggcggtggcggcactgcagctcagagcggcgcacgcggctggccggggcgggacgcggggccgggcgcggagaagtctggggcgggctggcagagaggcctgggactgcggaccgggcctggggcgcccaacaaaccagccctgactggcggccctacagaagcgctgcgccccctggagccccggcgcctagcccggccagggcaattggggctgcgcgggaagccggcctgaaagcccccccggcactgtgggcccccgggcacggcaatcaccgggcacggaagtgcggagaaggggcaagaaatacggcagcatgcgccgaatattggcgcccggggggcacccaaaattcgggaggcctgcgggacgttggccggggaaggtggaccccaaaaaggccagggaagcttgggaaaaaatttggttccttttggacgccacgcatggacaggagcagcattcccatgtggacaccaaaggacatttaccccgttgtgttttccccccgaggggcaccccattcaccttggggcttttacaaaccgagtggaacccttgaggggagaagcaacgggggcattaaccgttgggcgccccgttcagctgatgttacgagactcccagcaaaagaacccgatgcgcacaaggggcaccatacaaagttcacaccgataaagagggatctccccccntttttagagaagggaaaaaaaggatgtgttgccacctttggggtcagagggagcgaacattatgcctatacaaggggagcaacggaatacacacaaagttgttggccaccagaatatcagaaaccaagtttgtggccgttccaaagaaaacagcaatgtcttaccacaagcacaacaaatgtggcgattgtgcacaaacaaggggggaacattccacagcgaagaaggtgtgtgccacaaggagaatgttgtgccgacgcaagatcgccgatttatagaccggacgacacttccacgggaatggtgcgtggagacccacacaacgatttgtgagggggagttacaattaccccagacaacagaggagcgggcccttttgggtgtgaaacaaacggcgttataagacaggcggatgaactacgaaagcgggagccccccaccagaatgaagatggtattataccaatcttgccaccgagaacgggggagcttcccccattattaacacggacgaagattttatccctatataggccgccaacacaaagtttaaacagagcgacgccctgttttcacatacaggtggagcaccttgtacaacaccaagaggttatgagtagaaatttataaatattggcggaccacaggagaccaaacaccccccggagtgttgtggccacacaacagaaacaatttctccccgaca

SEQ ID NO: 537427 - DNA, 106 bp, Homo sapiens
  misc_feature (79)..(79): n is a, c, g, or t
  misc_feature (100)..(100): n is a, c, g, or t
cgctaagcttcaggcttcagtgccatagatcactaaatgcctatcggtctgaagggggtactttatgtttccagattcnttaatgggtaccggagctcgnaattcg

SEQ ID NO: 537428 - DNA, 229 bp, Homo sapiens
ccccaatggaatccgtcttaaaaaaaaaaaaaaaaagaaagcaaaagaaaaagaaaaacagctcaggggtgaaaacaggattttgggcaacaaaacaacacaggaaaggaaaacagcaagaaggaaaagggaaaggaaaaaagaatgctctccacaaaactggtttagagtttcaaggaaattgggaaaggaaaaaaaaaagggtggaagggaaggggtagacaccagg

SEQ ID NO: 537429 - DNA, 962 bp, Homo sapiens
gcccaggagcccggtgggtccgggactcccgtccgtgccggtgcgggcgccggcatgtgtgcttgtgtggaggaccagggcggccgtcctgggccctttctccgttcctgcatgctatgtgctgctgctggctgatcgcggagcctcggtcaattgcctgcctcctcaccggcaggcctcttcgttctactgcgcgtcttcagctttgagccggtgccctcttgcaggggcctggtaggtgctcaagccccgggacccgcagtttctgccagtcgtcccaccgtagtgcggggagccgacgacagcgcccgagaatcatcgcctggatggccacttcggcagactaaggaactggacgcaacaggcgtggatgttgggaccatttgaagtgtacttactgacgggattccctgtcttaagtgcccgataacaacagtacataggacgagctgatgggactgggacgatatgagtgattgtgacagttggaccaaattcaggaagctgaatcctgcagcaaaccatcagacctcaggcaatagagtttgccctgattgcactagagattcccgtacccgtaagggagagcctggttgcagagtgcctaagagcatagacctcagaggtcttcttagatagtcaaagggccatgcacagcaaggctactgtaggctcgtagcagaagactgtactatgcgaagatgcccgtcaaccggtagtactaataggtgggggctggtccttccttggcagaagttatctacaaagactcagacaaacacagatcggcggatgtacaacagcgttaaccttacacaaacccttggaagcctaaaacaatacaggacagtggaaaacacctaatatagatgcatggaaacattaaatatggaaaaatggagcctttgccccaagggccaactaagaatatgtgacaggttcgaaaatgcccaccaggaaag

SEQ ID NO: 537430 - DNA, 143 bp, Homo sapiens
cgcagataaggccaatgaaggaggagatcatcaagactttataccaaggaggaagagaccaatgaaataaaacctcccactttgtcttgtacatactgggcctactgtagattacataagatacagccatataaaataaaact

SEQ ID NO: 537431 - DNA, 155 bp, Homo sapiens
aatgcagatatgcagagagaaatgagtggcagttcgcctacaccaggccatctgcggggtcagtgggggctgctgtatagtctatggctagccgaacggtgaacggtgacatactgcgtccatagccaaagcaggcacgtagcgaattaggccca

SEQ ID NO: 537432 - DNA, 393 bp, Homo sapiens
gtgactggacgcgagtatcccatactgatacaagagttctaatcagaataggatggaagagtgttggtgctgctacaatgctgaaacatataccagagtgctacgataaaagggaacggaagaaacacagtctccatgaaaatccatcaaagatgcccttcccctataaagtgctcaaagacctggatcctagaaatctatcgtaatgtagaatcctgatgtttgcttggacagcagaataagaacttcaaaaatctgattacatggagtatgctgggatacagtactatttgggatacaagtgtcgggtttgctaggcatctgaaggaagatgttataatgctcatatacaggaagtaggaaatgagaacaattcactaacatgttaccttt

SEQ ID NO: 537433 - DNA, 219 bp, Homo sapiens
cgaggatcctgggggaggtggatggttacagcgtccaaaatagagcagactagttgcccggatatggctaccgtaatcggtgagctactgggcatacacagatgactcgtgtgggctccaggtgctgcctgggcccaggaggggtgggtggggcatgcttgggccccacacacagcctggaaccctcgaaggaacagcagataatggacactgcagaga

SEQ ID NO: 537434 - DNA, 212 bp, Homo sapiens
gaagattaacctcaagacccaggtaattgcagtttctgtttgctcctcagtcctgagagagtcctatgcccctggggggaagctcccctgggatggaagaggagtaacgggtaaatttccagccacttactacttatcaagggctcatcctgtgacagcaggatactcattagtttttatttttatttttatttttttgagactctgtttca

SEQ ID NO: 537435 - DNA, 146 bp, Homo sapiens
tggcatagatttctcactctcgccatctggcagatcgtggaccctctgcaccgggacattgagacatttgccaaggagggacctaaggaagatattgacgtatctattctgccccagctggagcattgccgctccagtaagatgaa

SEQ ID NO: 537436 - DNA, 258 bp, Homo sapiens
ctgctccctcttcacttcttcttctgatcttggacccaaactggggctccatactctcttcggctcctccaggtgggcatgggaggctccagctcatttgggcggccccccggtctggaacgtttgccataaagcacttgttgatggcaccagcaggtccctctgcggacagccacgctgggtggctgggaccgagacaaggaccagggtcggctacgggcaagccagaaacgtgttgcaattggagactgttccgat

SEQ ID NO: 537437 - DNA, 735 bp, Homo sapiens
ggaccgaacctcaacaccacttcttcgaacccgccggaggaggagaccccattctataccaacacctattctgattatcggtcaccctgaagtttatattctatatcctaccaggcttcggaatactctcccatatgtaacttactactccggcaaaaaaagaaccatttggatacataggtatggacatgagctcatgatatcacttgggattccctagggtttcatcgtgtgagcaccaccatcatatttacagtaggaatagcgtagacacaacgagcatatttcaactccgtaccataatcatcgctatccccacctgtgcgtcaaagtatttagctgatcgccacaattccaggaagcaatatgaaaatgatctggctgcagttgctcttgagccctaggattcatcatttctttacaacgtagtgtggcctgacttgaacatggtattagcaaaatcatcactagaaatcgtataacacgagcaggtcctacggtgtttagctcatttccataatgtcctatccaattaggacgctgtattggccaccatagcgaggctccattcacgggatttcccctattctcaggctacccatagaccaaactaggccaaaatcattacaaatcatcatcatggggtaatctaaattatacccacaattttcggcaacggaatgccgagtactcgacaccgagctaacattgattcttatgggtcatcttttaagg

SEQ ID NO: 537438 - DNA, 226 bp, Homo sapiens
gaccggcttaggctagatcagatggcttcgcaggtgaattataccaaacatttaaaggcgtgataaccagtgcttcacaaactcttcccaaaaacggaagagggaaatacacttcccaactcattctacgaagccagtattacctttgcaccaaatacacaaagatagcacacagaaaacgacaggcacttgcctgtagtcccagctactcaggaggctgaagtag

SEQ ID NO: 537439 - DNA, 158 bp, Homo sapiens
  misc_feature (87)..(87): n is a, c, g, or t
  misc_feature (105)..(105): n is a, c, g, or t
  misc_feature (121)..(121): n is a, c, g, or t
  misc_feature (158)..(158): n is a, c, g, or t
tcttgctcgtagtcccagctggagtgaatggacacccttggctcatgtacctccactcttggtctcaagtgatcttcccagctcagnctcccaagtagctgggancacaggtgtgtactgncatgcccagcaaattttttattttttctatggaggtn

SEQ ID NO: 537440 - DNA, 760 bp, Homo sapiens
cttggccaggggcgaaggcggataggaaacctactccctggcctctcactccgggagctaaggctccaagtcgggaggtgacaagatgttctacctcaagaagtggagcgcggtggtcatgtggatctggcacgtggagtgcgatacgtgcgctatctgcagtttccaggggatggatgcctgtcttagatgacaagctgaaaacaaacaaaaggactgtgtctgggtctggggagaatgtaatcattccttccacaactggtgcatgtccctgtgggtgaaacagaacaatcgctgccctctttgtcagcacgactatgtcggccaaagaattcggcaatgagagcggttagaaggctctttaacagatttgttcagagacctgcaggttcttgtaatccattgccctacacaggctagaacactacaggggatgaattcttcacatatgaccccacggatctgaggtcctgtgggactcatcaaaacctatgtttagcagtatggcagaaatatcttcagaaattctttgcaattaagaatatcttttatttaacggggggctttctacccttgtggcgtgtgttgggcacacagcttacacctgctttaaaaaagaaagagttcaaaaagattaactttttttttaccctttgcttacacaagctaaggacgcgcttagaaaaattatgaatgttatggttgagcattaaaaagaatggtgagcgcaaaaatttcagttaggatctaagaaggaaaa

SEQ ID NO: 537441 - DNA, 396 bp, Homo sapiens
cgtacccggtcccatcacagacccatgatgtactgtggcattctaagcttagcctggcacctaagtgcccttctgctcctcaggtaaaggtgggatggatctcattcacaagcctggcaacagccaccaacccctgagtcaagccagctgactatctcccagccaggaacacagtgtgccagtctcttctaaggacagcatccccagcaggccccattctccctcattctaccgcctaccccttcaggctctgttgctcatgccggtgcccgtgctcagggtcacaagatcctggctgagatagggagggagcctctgcttctgcctaccagtgagagttgaggcgagtagaaggatgaggaagttgtcttttgcttctcctcattccaggtgggc

SEQ ID NO: 537442 - DNA, 647 bp, Homo sapiens
ccgccgtcgggccttctccctccagtgtgcccaagagccactggtactcagtgtctgggtggcgggcatgggtggtgatttttggttctcccagcacctgcgggcttgttgatgaccatgatgaaagctgtgtgtgtctgagccagcagcctggggtattatgttcaccccctagcttctcctccatgctgagaggcccagtggcccgttgtggcacacggtgacttaatgcctcttatctcgctctacggttgcagagcagtgcaacgacaatatggccacatgcagaggccaacatgctgcgctgcgagctcattgcatgctccaccacacgcacacacatcttgccgccttgttgcgcaggctgggccacagggttcgcgtgcgcgtctcacagcttgcagctggtcctgctcacgagcccaccaacgtgatacccacacccccatttcgccccgcactacacgcgcactaacccactgcaaccctacgtcgcgtcgcacccaccgctaacgcggcccaaccagcgtccccagcaacgttcgcaccccctggccaaccttcccccccaatggccatggccctctcctctgagaccccacgcctcccaccgaccgcgtggattccaccacgcgcacaacgcgtta

SEQ ID NO: 537443 - DNA, 298 bp, Homo sapiens
gctcagagatcccccacgatgaggaattgttaggtcagcaagctctgatattcttgtttagtacatctgtgacaaaggtaaagacactgtcttaaaattttaagaaagtcattcatgatttatttgacttcctctcatggtttggagaaactttcatttttaagttgaacatgtagaacaagcagtggtatgagttttccttccatagttctttgctatgtttttcttcaagaagaccaagagaagtactagaaaatggacatcctgttaaaaaaacaacttctccatttgtcagttc

SEQ ID NO: 537444 - DNA, 362 bp, Homo sapiens
gggtaagcatcaggttcacggcacattattcagtccaccagccgcgtgctgaaggagttcgccacctttgacggcgcgggcaccacctcgctcgaatggggcggctatccgatcctgcgctttgacgagttgccgcaggtggatattcaactgctggactaccccgacgagccgccaatgggcgcgggggagtcggcgtcggtaccaagcgcagcggcggtcggcaatgcgctgtttgacgcactgggtgtgcgaatgcgcgaagtaccctttacgccggaacgcgtgctaaaagcactggaatccgcagcacaggttaaggaagacaaagcatgagtcagataaagacagtcgccggatgg

SEQ ID NO: 537445 - DNA, 143 bp, Homo sapiens
  misc_feature (84)..(84): n is a, c, g, or t
cagggaacctcttttaccaggtcaactcccagacagtgagagagtggctcaactgtggccatcacccgtgaccctgcaccaggncgatggagagccttttatgagctgactgaaacatgatcttgctctgtggtaccgatgct

SEQ ID NO: 537446 - DNA, 87 bp, Homo sapiens
gcggccgcctactactactactgctcgaattcaagcttctaacgatgtacggggacatgtcaataaagaacagctaaattctcctat

SEQ ID NO: 537447 - DNA, 472 bp, Homo sapiens
  misc_feature (447)..(447): n is a, c, g, or t
ctgcctctacaacccattattctgttctggatctcaaacatgccttctttactattcctttgcacccttaatcccagcctctcttcgctttcacttggactgaccctgacacccatcaagctcagcaaattacctaggctgtactgccacaaagcttcacagacagcccccattacttcaatcaagcccaaatttcttcctcatctgttacctatctcggcataattctcataaaaacatacgtgctctccctgccaatcgtgtccgactgatctctcaaaccccagcaccttctacaaaacaacaactcctttccttcctaggcatggttagcgtggtcagaattcttacacaagagccaggaccgcaccctgtagcctttctgtccaaacaacttgaccttactgttttagcctagccctcatgtctgcgtgcagggctgccgtnttttaatacttttagagggcctcaa

SEQ ID NO: 537448 - DNA, 622 bp, Homo sapiens
cttgtggaagacagatccgtgcatgttgccccttccatacttcgctgacgctccccacggaagccgatccgagcggtatgcctacataccgacacgcgaatgtgctgaccaagctgcgtcaggagggcttcgagcccttcatggtgtgccagacccgtgtccgcaacgaggaccggcgcgagttcaccaagcacatgatccgcatgcgccatgcgagccagatcaatggctcggaagccaacgagatcatcttgctcaatagccatgacggcaccagcagctatcagatgctggctggcatgttccgcttcgtctgccacaacggcctggtctgcggtgaaaccactgccgacatccgtgtcccccacaagggcgacgtggcgggtgaggtgatcgaaggcgcctacgaggtcctccagggcttcgagcaggtgcaggcgtcgcgagacgccatgcgcgtcatcaccctggaaacaggggaagaggaaatcctcgcgcgctccgcactggcgctcaagtacgacgatccgaccaggcctgcgcctgtctcggagactcaagtgcttgcggcccggcgcttcgacgatcgacgagcggaactctggtcggtgtacaccgcatc

SEQ ID NO: 537449 - DNA, 127 bp, Homo sapiens
tggaaagggatttccactcttgttggcccaggcttgaagtgcaatgggcacaatctcggctcaccacaacctcggctttccaggtacaagcaatctctccgtgcctcagcctcccgaagtatttgga

SEQ ID NO: 537450 - DNA, 183 bp, Homo sapiens
ttagtttttaaggctgcccagggaagggaaagactgggctttggccaatttaaaggtaatttatatccgcccccaggtggagcaacatgggattttggaggcccgggggtaactgaaagtgagtacaaatagtttttttggtttttggagataacccatcaataaaaggtgcttcctttggta

SEQ ID NO: 537451 - DNA, 724 bp, Homo sapiens
ctgagtgttgccgcgaacggtggggtgtggtacgagcgaggggtgccgttgcggccgatgtgttcgtcagatgtgtaagtgtggtgttgcgacggcaacatgacgttgtgtgggggcaaacgacgcaccctttgtttgcatgtgtggtctcgggcccggtggagttgcgtgtgtgtgtggcgcagttgcggggacagtgtgggagttgcaacgtgtgctggtgggcacttccagagtgaagggttgctgcattcgtttgatttttcttggtccagcgggggcatccgtgagctcgtggtaattgcatggcgcagaggtggggccaatcaccaaaaggtgcaggtgctgtgcacgttgataaaaggttctgcgtaggacatgcagcaaagtttgtatggaccaggcgtgtgctttctgtgaaagcaggtccgcattgaggtgacactcccgacctatgttcccaggaagctggcacctcttgatcttgaggtcccaaagggtccccatagttgtcattcagtgccacacgtgttgcgagagcgagatactctgggacgcctcgcagcagcgagagggagacttcatcccgaaccctcgatggatccgcaaggcggaaaggcctcttcgggattgacaacccgggggcaactcgcagcagccatatcctgggagatcaggcaacccaactccaacgcatcctcgcttacggaagcaacaaaagaca

SEQ ID NO: 537452 - DNA, 325 bp, Homo sapiens
gttgtttataggacatccatagacatattaaccattatttacagactttccacacatacagattgatttacatagaactcagagactggttgttagcaaagaactgaggaaactgaatactttttgcatcagttggtgcaggtttgccaaatagttgataagctccaagggctccatgaccttagaaaagcatggtttagcagaaagggcatgggctttgaagtgaaacacctgagtttgtatccaagctctgtcgcttgctagctgtgtgacataaaggaagggtaacctttctgcagtatgatttgattatatgtaaaataaa

SEQ ID NO: 537453 - DNA, 1089 bp, Homo sapiens
agcgggagttccagatggcgccagtggaagctgcggcggcggtgtctcgcgttcggcgggatttctcttcgctccggctcgaccgtaggatctacgatccccagcatccagccgccggctcgaagactcggtctctgaccacccaacttcggtcccctagatccggcccccggctccgggtcccacggatacccgtcggtccgtagccccgtatgatgacccatagaaccgtgtcacggggtgaccacatgagacccgcggttcccagcgcgatgccccaggggacacaggaggactcgacagggcctctggcggaaccagcgagcaccactcgtaccgcccgagaggcccgcgggccacccaaccgcacgggctaggcgactcggcggccgcgcggccgcaggagtggcagccactgcaggacggacgccgcgagctccccggggcagaaccagcgctggaggtgaccatggagcacacccaggcggaacacaccagtctgggtgaccgaccagccggcagtcagtcaccaccccgggcccgaagccatggcagcccccacaaaagaggcacgccctggaactagcacccccgcacacgtacaggaacagcttgcgtgacgagcaccacgggcaccccgaacggcacttcccccggccatcttggggcaccacggacggtcacccacgagagcggtacaggcagctgcgacggcggtaacacgaccgagacagaccacgacacgaacgcaccagagctacacggacatgcacacccgaacggtccaccaccccaaaccgacagtcagcgatcaggaagccataccacactcagtcatgcaccgcctgcagaccaaccgagcaaacgacgggcaggccgggtgagccatccaaacagcgggctggtccggcgtgcggtcttcttcgcaccgactcccacgtcgcacgcactgcaagggcgccgtagtctaatcagggtgagcaccccacctgtacgaagcggcgcttccaacgactcatgacctagtaagaaacagcaaagaacaaacaccaccagcgacactaccccacacagaaaggcagcgcagac

SEQ ID NO: 537454 - DNA, 729 bp, Homo sapiens
  misc_feature (277)..(277): n is a, c, g, or t
  misc_feature (290)..(291): n is a, c, g, or t
  misc_feature (293)..(293): n is a, c, g, or t
  misc_feature (296)..(297): n is a, c, g, or t
  misc_feature (326)..(326): n is a, c, g, or t
  misc_feature (359)..(359): n is a, c, g, or t
  misc_feature (363)..(363): n is a, c, g, or t
  misc_feature (365)..(365): n is a, c, g, or t
  misc_feature (370)..(370): n is a, c, g, or t
  misc_feature (397)..(397): n is a, c, g, or t
  misc_feature (416)..(417): n is a, c, g, or t
  misc_feature (474)..(474): n is a, c, g, or t
  misc_feature (484)..(484): n is a, c, g, or t
  misc_feature (490)..(490): n is a, c, g, or t
  misc_feature (528)..(528): n is a, c, g, or t
  misc_feature (681)..(681): n is a, c, g, or t
aggaattcggcacgagctcaggctgcagctggacagaggggactctgggctatggacacagggtgacggtgacacagatggctcagagggggactgctgctgcctggccactgctccctaagccagcctggtccatgcagggggctcctgagggtggggaggtgtcacatggtgcccctagctttatatatggacatggcaggccgatttgggaaccaagctattcctttcccttcctcttcggccctcagatgtcccttgatgcacagagaagctntggaggagctttnntntgnnggtcaggcagccagtgagatgagggatgngcctggcattcttgtacagtgtatattgaaatntatntnatgtnagttggtctggactgacagcatgtgcnctcctgagggaggacctgnngcacagtccaggaacaagctaattgggagccaggcacaggatgctgtgttgcaacanaccaagcatnaggggnagaagcagagagatgcggccaagataggccttggccanatccgctccttcctgcctctctatctctgtcttcctatactgtcgcttgctattccctctcttcttacttcttcctctatctctccccaactctcattctcatctgcacgcttcctatctcatgtgtatgcatatacattcctctaacttctntctaatttacttgtggttgaattaacaatggctcatatgaactcccaa

SEQ ID NO: 537455 - DNA, 1044 bp, Homo sapiens
ggcaggagaatcacttgaacctgggaggcagaggttgcagtgagccgagatcgtgtcactgcactccagcctggcgacagagcgagactccatcttgcataataaaaaaaagataaataaaaaagatcttaaggcagccaaggggaaataccaagtttggggcttgaccatttggttttggggcgggttatttggagagcaaaataaacggggcacccaagttccgtctaaatatggcggtgtgaaaaacgttactactgctagaatttcctaggacctagccgaaatttttttgtcacaaggggcccagtgtgattgacacatttgggcggcccagtagcggagtgtacagtctattaaggtgcgtccctatagcgaatagaatagcacaatatgtgtattgcccggatttggtaacatgtgctcatgatctcacttaagcgggcatgtgaaatagggccctcccaaaaggtggctcaactttgtgttgggggccatgcttttgttagggcattttttttcaaaaaacgcctctgttaagaggttttatatgcaagcagcaccatttattgtggcattatacgtccccccatacattgagtaccccacgtggtagggtgttacaacgtttgctactagaccagccctgttcgttgcacacaaagtgagaaattttctctagtgaaacagtctggggccctgaataagaggttcaccacggaacaggcaagcgccagaagtgtgttctatacaacagggttccctacgaggtggttttcaatacccggggaaggggtatctcgtagacaatgtgaccccccttttgaacaggtgttggtaccggtggcaactcgtttaccacacttggtgtgctataaagacctgtgctaattgagcacacttatttagcgcagaattctcccgagcctttacagggctctaatgtaaaggttacaacacaacaatggggcgtttggtttacaacaggtttcctcccgctgacgcttcacagacgcaaacggcgccagaacgccgagtgggaaa

SEQ ID NO: 537456 - DNA, 180 bp, Homo sapiens
acatctacaccttaagcacagttcttgacgacaacgattcatcccacctgaggaaaaaaagccaacagaacgtctgaaaatggtgggatcaggagaccagaatactacatgcactgcaaggcttaagtcagttcacacagacaagatggctcaacatggtggatcattctgattgcagca

SEQ ID NO: 537457 - DNA, 328 bp, Homo sapiens
cgcaacaaaaaagacaaagcggggcaaaaagaggccagggccccccaaggaccacaaacgaaaaaaaacgaacacaaacacacaaacaaggcaagcaagacgccagaagagacacgcgcggactcacccacacaccccacgcacacaaaagaccaggcaacagacagaccacgcacaaccagacaggcagaacaagacaggacgagaagagacacacacaggaaaaacacacagcagcccaaaagatcaccacaacgaaaccacaagaaaacacacacaaaaacacgacgcaagacccgcacaaaaaacccgaaacacccacgcaaac

SEQ ID NO: 537458 - DNA, 532 bp, Homo sapiens
ggcgggcttcatcactacgatgagttcggcgtcctcatagacaatgtcgagcgggatcgactgcgcttgcggccgggcctccgtcggcgcgggcacatcgatgagaaagtgctcgccttccttcacgcggtaggacgcgtcgaccagaaccttgggcgcgccgtctccggtgcgcgagacgcggccctgatcgatcagggtcttcagtctggcgcgggacagcggctcttcagccgccttgcccccaagggcctcggtgagatacttgtcgaggcgcgtgcccgccgcttccggttcaacggtcacggtgtggcgttggccgcccatttctacttccagcgaggacatcatgcctgaagatacagtccagacggccgagatggaaatggtgccttcgctgcgcacacgccgcatgcttgtggcggtggttatcgtcacggcgatcgtgctggttgcgggtttcgcgtttgtcatcgcgacgctcgtcaagcgaacctctcatccgcaaaccagcaccgcgctggtcggcccc

SEQ ID NO: 537459 - DNA, 151 bp, Homo sapiens
gcagatagatgtggagacttccaagaaatgggctgctggccagaacgaacaacattctattaccaagaacacggccaatgctggacctgggagacagagcgagctgcacctatgacagggtgaccctggcaggtgggcaaggctgatccag

SEQ ID NO: 537460 - DNA, 498 bp, Homo sapiens
ccctctggtggagactcctccacacatgagctcaccagagcatacaagacagagtggacagagacctggggaaggaagctgaactatgcagagatgaggacaggtgcaggctagggtacagggatggtggtagaggagacaagaataatctccaggaaccacagactctgcccaacaacaccccaagacttccagagggagttaggggtgcccccgtgaccaggcctctccagcttcacactcttggccagcatatctccaaatcagctcccagaaactcctgaactccagattagagatcattgcagctgccacaggttggcaatatactcttacaggccacagttgctcggcctgagctggggcacgctgctgggtgaccagttcccgtagctcagcaggggtcagcgtctccttcccaccctccacggagtactggtgcaagtacttgatgagggtctcaatggacctctccagatcactgaattcctgagcatc

SEQ ID NO: 537461 - DNA, 305 bp, Homo sapiens
gtgggaggttagtgtggccccgggcgtccgctccctcagcggatgtggcagcccccgagccatggctctcgccgtccgagtcgttttattgtggcgcttgaggctacaagtccaagtatcttcagctcaagagaagttagaagatgagttccccggccgcctggacatctgcggcgagggaactcccaggccaccgggttctttgaagtgatggtagccggaagttgattcactctaagaagaaaggcgatggctacgtggacacagaagcagttctgagttggtgccgccatcaagccgcttgc

SEQ ID NO: 537462 - DNA, 389 bp, Homo sapiens
  misc_feature (263)..(263): n is a, c, g, or t
  misc_feature (292)..(292): n is a, c, g, or t
  misc_feature (322)..(322): n is a, c, g, or t
aggtgtgctgccctcagcagcgattctgtaaagcagagggaggctttgggccaggtgctcttgagaggatttctgggagcgaggatggaggaacgggcacctgggggctgtagggagggggctggaccagcgccaggctgctgagcccgaggcctgggaggtgggactgcgtgcactctgccctcacacactcagagcatcggaatgggagttggctgcagtctctctcctcattgccgcatccaggttcgttctgactggtnaacagaacctcaaggaaaaggtgccaggncccaagggctgggctttggcttgtttgggnccaaggaccttgtggggaatccttaaaagcgacttgaagcatcaacttggccttgccgcgtttacaa

SEQ ID NO: 537463 - DNA, 1444 bp, Homo sapiens
cccacgcgctcgatcgaccccaacatgcaacgtctctgaggtggtcaaagtatgcctacgtacagtggctaagctccgtgtgtgacaagttattacatggcctcacctgacctggagatccaggagatcaatgcagccaacatccaaacagccgattcacagtggtctacgtcccctcaccaccatactaacacatgctctttgagctcttcaagaatgccatgagggcgacatttggaaaagccatgaggtccagcactcatatctcccacccatcacaggtcacaggtaggcctagacgtgagcgaagcaactggaccatcaagattgaagtgaccagacagaaggagagggatgtaccacatatagagcgaaagaataagaaccagaccacaatacaaactaacaagacaatcccacacgcaaacaaaaccaacccaagacctggaacacagcagggaaccagaccgcaagagacagtaccaaaagagaaaaatgggacataccacaaacacaccgaccactaacagcaaaagtaaaaaaccaaacgaacgaaaaagaaaaacaacaatacacccaacaggaaaccgccacacaaggaaaccacaaaaaagcaacaaacaaaccacaaaaggacacctagtaacaacaggaacaatcagagcgagaagaccgcacacgaacatggaaaaaacaaccaaagacaacaacacagaagacgcacaacaacacacacaaaaaaagaaacaaaaggaacgacgcgaagacacaggcagcagacacccacaagaaaagagaaaaacaaaaacaacaagaaaccacccacaacacgagcatcaaaaaaaggggcaagagcgaagacaccacagaacaccagcaaaacaaaaaaaaccggcacagaccgcacggacaaacacacacacaagacagagacgcccaaccacacgcacccccgacagcagccaagagcagcgatagcgaagacacgaggaggaacaagcgaaaaagaacgaaacaaaaaaacgaagacagaaaacagcaacgaaacagaaacaaaacgaacagtaaaacagacagacacgaaagacgcaagcagagcagacgaaagaaaacagagcgacaagaaggcagacacaggcacgcacaccggaaagacaggaaggaacacacacaggcgcgcccaaacgagcaacgaggaaggaaacagggaggagggagggaagacgcgaaagcaagacgaaaaaacaagagacgacgaaaacagacactcgaacaacaaccatacaaaaagaggacaacacggaacgaaaacaaccacacacagaacaacaccgaagagcacggaagacgcgacagaggcgagcgaaacagaacagaaggcgcacagcacggcagaaacgcaggagaaagcggaagacaaggcgaacaggcacaacagagaaca

SEQ ID NO: 537464 - DNA, 881 bp, Homo sapiens
  misc_feature (332)..(332): n is a, c, g, or t
caacggaaggagctgaacaagagcatcaaccccgacgaggcggtggcctatggcgccgcggtgcaggcggtcatcctcatcggcgacaaatcagagaatgtgcaggacctgctgcttactcgacgtgaccccgttgtcgctgggcatcgaggacagctggcggtgtcatgaccccactcatcaagaggaacaccacgatccccaccaagcaagacgcagaccttcaccacctactcggacaaccagagcagcgtactggtgcaggtatcgagggcgaacgggccatgaccaaggacaataacctgctgggcaagttcgacctgaccgggatncccccttgcgctcgcgggggtcccccaaaattcgaggtttacttttcgacgtgtgatcgccatatggcatcctttatcgttaccgcccgccgataaggacgcaccggtaggaaaacaatatcaccattcaccaggacaaaaggtcgtctgagcaaggacgagattgaccggatgttgcagtgaggccggacgcgtaccaagtcgcaagatgaggcgaatcgcgaccgagtcgcgccaaaaaggcctgagtcctatacctagcaaattaaagcagacggtggaagacgagaactgaggggcagattagcgagcggacaaaacagatctcaagtgtcggagtgtcactggtcgaccgaaccgtgcgaaagtgttgaccagcgagagccgaagttgcaccctctggattcagtggcgggcgacagagggtcagccggcccgaagggatgccagcgaccgctcccctgggtaagatgacgaactgggtgaaggcctacacgatatctcctgtggtctaccatggataaaaaaacacccggcgccggaaaaaag

SEQ ID NO: 537465 - DNA, 479 bp, Homo sapiens
ttgggcgcctccctaggcgttcggcctttaaagggggcccgccccattgtgtgagccactcgtgcgtacccccttatgttggggccccccggacctacacccccccccgatggtgttcccccaggagctctcactaattattggtcgttgtcttcccttcccccagtggggggcccctactttttttttttagctcgcacacgcggggttccccttttccggcatagtttaccaccaggggctccccttgtatgttacccgcccgggtccctggggctcgggcacgcagtcctctacctcgtggattttcctttttcctcggtgttaaccacactcgcggcgagttttgtagagggggggcacggccacaatccaaagggaaggcccttgctcccccccccttttttttgtccccggggtggtaaaaccctacgcccggtttatagaaacctttttttccaaaaaaactttaaaagtga

SEQ ID NO: 537466 - DNA, 107 bp, Homo sapiens
aggaggacaaaaataaggtggcattcccccccaggttttgactttcagcatcatgcaggggcttatttgtttggaggcagttccctcataataaactataaaatata

SEQ ID NO: 537467 - DNA, 566 bp, Homo sapiens
  misc_feature (97)..(97): n is a, c, g, or t
  misc_feature (102)..(102): n is a, c, g, or t
  misc_feature (105)..(105): n is a, c, g, or t
  misc_feature (150)..(150): n is a, c, g, or t
  misc_feature (158)..(158): n is a, c, g, or t
  misc_feature (162)..(162): n is a, c, g, or t
  misc_feature (165)..(165): n is a, c, g, or t
  misc_feature (180)..(180): n is a, c, g, or t
  misc_feature (190)..(190): n is a, c, g, or t
  misc_feature (192)..(192): n is a, c, g, or t
  misc_feature (250)..(250): n is a, c, g, or t
  misc_feature (275)..(275): n is a, c, g, or t
  misc_feature (285)..(285): n is a, c, g, or t
  misc_feature (291)..(291): n is a, c, g, or t
  misc_feature (298)..(298): n is a, c, g, or t
  misc_feature (327)..(327): n is a, c, g, or t
  misc_feature (339)..(339): n is a, c, g, or t
  misc_feature (341)..(342): n is a, c, g, or t
  misc_feature (352)..(352): n is a, c, g, or t
  misc_feature (387)..(387): n is a, c, g, or t
  misc_feature (416)..(416): n is a, c, g, or t
  misc_feature (419)..(419): n is a, c, g, or t
  misc_feature (421)..(421): n is a, c, g, or t
  misc_feature (423)..(423): n is a, c, g, or t
  misc_feature (427)..(427): n is a, c, g, or t
  misc_feature (429)..(429): n is a, c, g, or t
  misc_feature (434)..(435): n is a, c, g, or t
  misc_feature (480)..(480): n is a, c, g, or t
  misc_feature (504)..(504): n is a, c, g, or t
  misc_feature (534)..(534): n is a, c, g, or t
aagtcggcggtggaggctagccgcctggtggctggcaagctcaaaaaaaacacggcatttgagaattagaagctcatctcaggaaagcgccaggagntggtnccnagattgccacattctggatgccctgtagcccctggccgcatcctncagggggnccanggngcctgcccttttctntggcaggcanantgtggtagtgggaggttgtgcatggaggccagttaaaacttacctctgttaaaggccntcaaggaaaaaaaacccggccctgngtcaggcagngtgagnttgccgnttggccctaaccttctttttttttttttnaaaaaaaaaaancnnttaaaaaacnccccttaaaaaccaaacctctttgtgttttgaacnaaggaattttccaaatttgattgggattntgntntnaagntnagganntttttcagcccataaagccccccgttttatgcccctctaattttnatgtttggggattgggggagggcntgtgtttttttttttttttttaaagggggngtgaacaaatggaaataaagcaggggctgtga

SEQ ID NO: 537468 - DNA, 338 bp, Homo sapiens
catggcgaaacgcagaagctgctcgttcatcttcatcggcgcaggtcttccatgctcattctgactatcgctgatcagttgtttccaacacgcgccgcgatctggttgatgctgcctatacactcggcgccaacggatcgcggtgttattcgccgtgtgcttttgccgtcaagcgctcccgatattgctgaaacgctgcgcctcgtgcttggctgggcatggacctatgtaatcgtcgctgagctgatcggcgcatcatcgggcatcggctatatgatcatcaattcgcaggcgcttatggcgaccggacagatcattttcggcatcattgtgatcgg

SEQ ID NO: 537469 - DNA, 927 bp, Homo sapiens
ggagcgccaccgggagggctacgcggcggcgaagccatgggtggctggcctgcgggggcgcggtgggtgcgcgagacctgcgggcgggcggacagaaggctgccggacggccctagaacatgagccgggtggatccccaacccgctcttgagaggggcttgggagcggcaggaaggcgcccacagatgggaagcgagggaaaggcggcgggcccactttcaggggggggccccggcttcgacgggccggggggggcagaagagaatcttggcgggccacattctccgggggtggcgcgggtgacccggccggggggatttccggggggccgggcggccgcaattttcgccagggggcaccttcttggaggcccggccttggctttcctgggcgcgggcccccgtggtgatacccccttgggattgggtgtgggcgtggttgcccctcgccggacatgcctgggcgacccgggagggggcttagagtttccggcgggaattcgccggggcgggccgcctttttgccaccgcggtagattgtcgcgggcccagggtcggggggcccatctgtggatggcacttgggcccccttgggtcccttattgtgcgggcggcctgtttgtcgccctctaagtgtacacgggggcaccggggcacccgacaatggtgctgatccgtggaaagaaggcctccctcaagtgggaacttcggcccacaggtggggctggtttccgtgcccgggaaatgaccaagggccccgggaccttggggggcgccgaacgcgggtgggctttacgaggcgaccggacacgacggttgagggcactggaagggctgatggggccctttccaaagacggacattctgacaggcagaattcggatgtgggccactggggggcccagaagacccctggaccgccacatgg

SEQ ID NO: 537470 - DNA, 329 bp, Homo sapiens
cggtacgtgactagagagctgtctctcgtgaaactcatctttattgagaatatactatattccaggtacataaagatgctctatagatcacaacagccttgtggttgacatgtcagtatccctcttttaacagtgtagagtacttgtggacaaggatttgagctggtatgtctagttctgaaacctgtgttctttccattatggcacatgtgtgtttttcttttcagtacaggtaaaacagtttctgtacagtcaggggaaggttcatctaggacatatgtcagtcaggcatttcgccctttgacaccccaaggatagtagtgaaaatt

SEQ ID NO: 537471 - DNA, 125 bp, Homo sapiens
  misc_feature (28)..(28): n is a, c, g, or t
  misc_feature (73)..(73): n is a, c, g, or t
  misc_feature (84)..(84): n is a, c, g, or t
ggctaacctcgagcggccccgggtccgngaccccatcccacctcttcctctgagccgttcagagcaccttgtngtgtagtcggngctgggtggggtggctccgccaggaggcgcatgcacggttc

SEQ ID NO: 537472 - DNA, 662 bp, Homo sapiens
cggctcaggagccagtggttggggctctgagaagaactcaccaccttgaagaagttcttcggctttgggagccgcaggggccggcggtccggggctccctaggccacgtctacaggggttcggggtaccgaatcggaagatccacagggcgctgtcaagggcgaagccgcggaagtggagcgctgcctggcgcgcaggagcggagacctggaagccggggacaggcagcacaggcagtggggtgggggctcagcccaggtgggagggggtccccaggcccggcttccccgcagcccctgggatggggcctcggagggcaccctcagaggggtggtgccaaacggagcctcagctgctctgcatcccccataattccccagctggagcgcttggtggagaatgtgagtgatttaactcaccaagctaagcatacacagtgttatttttaacctacacgtttaaaacatggtgttatatacattataggaggtgcctaatgagagaactcattcctctatcaaaaaataccgtgagtcggccgggcgcggtggctcaggcctgtaatcccagcactttgggaggccgaggcgggcggatcacgaggtcaagagatcgagaccatcctggctaacacggtgaaaccccgtctctactaaaaatcc

SEQ ID NO: 537473 - DNA, 124 bp, Homo sapiens
tgaacaaaagcgtataccaaacggtacgacagcagcatatagcaccctactacatagctgtagaagcgcaggtagacccttgagggttgtcagccccttgatactagtgctatcttggtccggc

SEQ ID NO: 537474 - DNA, 128 bp, Homo sapiens
  misc_feature (68)..(68): n is a, c, g, or t
  misc_feature (107)..(107): n is a, c, g, or t
  misc_feature (123)..(123): n is a, c, g, or t
gatcccctgctggctgggggcagctcccaggatatactgccttacaactgtttctaaagcccatcctnctaacatggcgattccggaggtcaaggccttgggctctncccagggtctaacggntaagg

SEQ ID NO: 537475 - DNA, 1046 bp, Homo sapiens
agcgggtcgcgggcaggcgactcacagcgatggcggccgagcagggtccggtggcggggggctggttgctggctagcgtgccggagacggcacgctgctcggcgcgataggtgggtgggctggacaggggcgcgtggtgagccggggagactgtgcccgcgggagcgccgggcgaccatgaggcacaatggccccgcccagcagggcgacgagacatcgtgagacccgaactcaagagacggtcctgcaacagcgtaaggccggaagtatctagcgcggggtctgatgggatgagacggtctgttggccaggtcggtacattgaactcttgcgattgcgcatattaggttcaacgaatacatctgatttcatctaggatgagagggtacttgcaaaacgtcaaggagagacatcgattaaggccatgaagggaaacacaagcatgggggtgagcatcatgacggtcacacgctataatgtatcgcgttggcgactgggaagtgggacctattgggatggaaaaaggacatgtgagtgcacgctgctgttgaatgggatagaaaaaaggggtaatatacatgagtgaacatggtttcatgccgaagttctttacttcaaaaggaaaatggatagcgagagaaagatgtcagacaattccaacctagggctcggatagtgcaaccctttgggaggtaaaatgctgaaacgtgaacaaaggggaacgacgagcccatggggttgaggcaggggctagtatggggacatttcaatagcgccaagaccaaatttttttgccagttacttctgttatttaggtcccgaaaggtcactctatctaagcacacgtgggtgagaaacgggggcgatggtggcttggaactcttgaacggttggataaccgattgtttgatcgatgaattctggcacaatcgaataacgagaatggacagaagaacaggacaaagggagtcgatggtcttcgagggggcaaagtggagaggaattgggacttttggggagcgatggggcatgtgggagttggtaac

SEQ ID NO: 537476 - DNA, 592 bp, Homo sapiens
  misc_feature (34)..(34): n is a, c, g, or t
  misc_feature (180)..(180): n is a, c, g, or t
  misc_feature (367)..(367): n is a, c, g, or t
  misc_feature (383)..(383): n is a, c, g, or t
tttctccatccgaaccagactggccaactaacancaaatatacattatcaatccctacaacacaccattccacctcattcatcgcccaccacatatacttctaatacatctcatcatatccaaatcatttacacaaacctctaattcacattataacaattctattggggggggacacancaaatgcccccccccaaaaaaaaaactaccaattctaaaattaattgcccccccaccttccatatacaaccatcactcaatccacacccccaatggtccattcccctattaactaacccaacccattcccaactcaaacaaccctgtacctctttcacccttctcccccccctcacccacccccccnaccactcccccaccancccctccccccaaacaccccatactatttttctaaaaccccaaacaacttcttactcacacaccaaaaccaaatttttttcctcccacctccacccccattcctacttttctcctctcccccactcttacacttcctcacatcctactatcactcccccacctctctccttcctcctcctctcctctccatccaaccacactacacaat

SEQ ID NO: 537477 - DNA, 526 bp, Homo sapiens
ttctgtgctgggaacagatctgttttattcagttagtggttcagcagttgcaaaatcaagatggtggcataaagtgactctagccacctcagaatgtgtagagtgagacaaagcaattgtctgagcaatgaaatctgcgggcaataaccagctttaaagaacttaatggcaccagaggagacattcagcaacaacacacagaaggaagatcaagagccacaaaaggaaactcagggggatatgcggtcccagacatcaactcggtacagtgtgtccaggggagtggtcatcaaaagggatccacacagcagagcagtcccgcaagcctgttgcccctggagacctcagcaagagcaaattcactagaaggctgcaatgcgaagagaggtagatgctgccgatgtggcctcgtgaggctgatactgtgcctagccctcaccctgaaactgtgtcttcctgacatcctccctaatgacaacctgcttagtagtcatttatctttgtctcactaaggtgaactgaagca

SEQ ID NO: 537478 - DNA, 342 bp, Homo sapiens
ttatttacctttaaggttctaacttaggtataaccacttgaaattcacagcataagtaatctacgtaaccctctaaaaatttatttagccaaatgtaatggaataaatgctgtgtaaataaccttgtaatatcccttagattctgaaattagatatataaatatgtattaaatgtctggctcagttctgattttttaaaaattcacattataggaacccatttttctaaaaaatgtgctcttagtgcttgagcactgtgcgctcacacatataatcaccactctttgagagcacaaggtgcacagctcacaagctcaggggttcgagcacagtgtggacacc

SEQ ID NO: 537479 - DNA, 1028 bp, Homo sapiens
cgcgggggctcacgcctgtaatccgtggaaaagaactgagagtccaggccgggcgcagtggctcaggcctgtaatcccagcactttgggaggccgaggcgggcggatcaccaggtcaggagatcgagaccatggtgaaaccccgtctctactaaaaatacaaaaaattagctgggcatggtggcgggcgcctgtggtcccagctactccggaggctgaggcaggagaatggcgtgaacccgggaggtggagcttgcagtgagctgagattgcgccactgcactccagcctgggcgacagagcgagactccgtctcaaaaaaaacacaacacagcgcatcgcagccgtctgggaacatacacccccacgtcacagggccacccgccatctctcacaagggcgggctcaaaccccttccacgtgtggccaagcactagctccccacgacaacatggtgcttcggcacacctgggactctcccacttcgcccaaacgcaatctcagcgcccgaaaccccctcgttataccattttacccttaattcaccaccaaacattacccacaaaccttgccccacacacccctaatatgttcacgccagcctaaaaccccaaacttctttcaccaagaaaccatcggcagtcactcttcctgaacccttcgaaccaatgagggagttcccccttggggcccacacacgatacaaaacgtttgaagcaacccacccaaaactcgtatctataaacccaacgctctttcaaccaacgcttaaaacctctgtggcccctcacagcgatggcctcaggaagtgttgactggacaccctggggcaggcgcgacgaacccttggacattaaatcccgatcgagagacccgggggttgagaaataaaagggcctgaacatgggacacgacacgagacccacaacacaaacgcagcagcgcggtgcgcgcgtgcgccccgcaagcgcctgcaaaacccagcggcgcggcccacagggagggaacctggacagcggcgccagaggc

SEQ ID NO: 537480 - DNA, 1468 bp, Homo sapiens
agcggggttgttactctgggaggactgtatgctcagaagagagggaggacgtaaggggagaatgtggtgagttggtaggaaggaagtggttgatcttagtacaatctaaagtgtgtgatcggatgcgggtgagagaattgtgaagctaatgtaaatcgaactatagtgtttgacttgacgaaagggacgtgctagctgacaacgtggatcacttctttgtctattacatgcaacgaatgtgactagttctagtagacctggcagactgagatatcatgttcatctctctaaaaaaaaaatggtcctgtgcttgcattgtcaattcctgggaaggaatgagttttactcagataagcatagaagttagataccaagtcgtagaccggataaggatatcgacgggttttgggcactgcttttttggggataaaacaattactctcattgtgggtagaggaacaattgcaagcaacaagatagcaatgttccctggtgcctcactcttagagttagtcttatctatgggacaccgcaaaagcgaatcgatcttctcatttctaaccggttaaatgtgtcgaatatggctatagagacaaaaggcgcatatttttaagtttctaccatcagggctttggagattcgatttacacggaaaatgtaggagttccgaataacagggcacaaaaatttggtgagactaccggttatacaggtgaaaattaaatggggacgggaatgggctctttttaacgcattagggcgcgttggtgcgcagctgtgaagcccttcataggaatttaagcgttttcaacgggtctgaagcagttatactatggttattggccacccatattttatggtgttgtgcgggaccctcggcaacagcgagctatagcgtagcttcaaactctggtaacatgttgtttggggtggtaaacacaatcgcttgttgggccaccttcgagatgtacctaggccttggctgtaattcttgggggaacctcttcatatgtgcggcactttggcaagtccgcgaatgtacctctttgcacaccacaggccggcgtctacgccaatcccggggcatcgccattcgccacgcgctcccggcgaaaatcccctcgtgggccgggcggatcacttcaccgtctaccatactggaccccgggcgaccaatggcctggaccatcccttgcccaaccggagggacagcgctaccttcaacggtggccttggaacactccggccacgtacatcgtcgcttgaaaccggcacctcaacggccgcgctacacaccactttgcggtggcgccaaccccacgcaagtctggccaccccggcggccagcttggcacgatgtaccggggctcataccaccaaactccgtacacttcgccgcgtcacaccctcgttgggcccctcgaggcgaaccactcgcctgtgcacctctacgcatccgacgtacatc

SEQ ID NO: 537481 - DNA, 200 bp, Homo sapiens
ctagaggatcccggagtcgtgtcgccaatacggacgctcaggcgctgaccatgtgaaggcgcaggcagtgtgcagatgggcactcaggtgacccagggcctcggcgccggttcgcagcctgaatgtcggtgccgaagccgcgcaggaagtcatcgacgaaatccggggcttcagctcgctgatatcaggaacgttgagat

SEQ ID NO: 537482 - DNA, 277 bp, Homo sapiens
ttagaggatcgctgatataaaataaaaggtgtctttaagctaagcataaacttattagagaatctagttagtgttttgttttccacatacatgtaaatagcttaagatcgaataggatcaataaggatatattagttatcaaagtttagtcttcatacttaaaagaatttgtttttaaaaacttaacctaagatgcaaaaaaattagattagctagtcttgaacaaagagttgagttagccgaaaactggcgtatctgaattctagtacagataaga

SEQ ID NO: 537483 - DNA, 1059 bp, Homo sapiens
  misc_feature (926)..(926): n is a, c, g, or t
  misc_feature (1042)..(1042): n is a, c, g, or t
agtcatcctgctcaggttgggcatagtggctcatgcctgtaatctcagcacttgggaagccaaagtgggaggatgcttgagcccaggagttccaaaccatcctgggcaacagagggagacccaaaccatcctgggcaacagagggagaccctgtctctaccaagaaaaaaaaaaaaaaaaaaaaaggttaaaaaaaaaattaggggcccggggggggcccccccagttaggcggagggtggaaggattcccttaaaaccggggagacggaagctgcagggtgagccagtgattcgttgccacggcacttccagtatcggggggacaacagtgggaccctatctcaaaaaaaaaaaaaaaaaggtcctccctcccccaaactaatgggttttggcctttggggcctcaccgagtgcaaacccctccagggaaatacaggaatccccaaagggggtcttataaaaaaccggggacgagcaggggacctcttacacgaggcggcgttgttgttgtgccgttgcaacatgtggatatttatggcccattaaaccagcgggtggcccgggaacttggaacgagggtccccaatttcttttgggacgaccgggggggaaaacagagggtcgcgtgccaaggttcccactccggggcgggggtatccccttttggccccatttgggaaaggccggcatggaagggtggaccctaggggaagagcacctgttgtggcaaaaggagatcccttgttaacgtgtcggcggggcctcttcaaaagaattagaggtagccaccttttggggttgggggagatttgggggagaaaattcatgaagagctcttgtggccaagtattgcacaattcttttgtggtgatcttgaaggaacggcagggatatgcttgagaaagctcatattaatgggcatttnggcgacctcaaaggagaagtcttgaggtatagtatctctattgataggtacagagagatttctttagcgtcttaatattttagtggaccgatgtattaggttcaaagaaaattgtnggataaggtgattgaga

SEQ ID NO: 537484 - DNA, 138 bp, Homo sapiens
acatgagaccccgtactgagttgctgaagaagatactaaaccaggctgctcgtgtgttgcgtatacgccggctgaacgtgagaaggatggatcgtaaagacagtctgttgtgctgctattgaaacttctaaaactagg

SEQ ID NO: 537485 - DNA, 205 bp, Homo sapiens
gggtgctctagaggtcccatgtatccccaacactaggctacattcataaacttagcccttctccatgagatacaagcagaaaagaataaagtcattagctagacgattctaaaagtcaccacagtctattcacaggaaatcatcatgccaaaaggtgtagggagacactcatatgaggggaggtggagaattgtgttgggcgata

SEQ ID NO: 537486 - DNA, 347 bp, Homo sapiens
cgtagatactaaaagatctgtattttcctaagctaagtacaagatgctgcagggaagtgcgactgctcagaaggattctgatcctgaaccaaaagaggtagtcgatatatcatcagattccgcatcctcatcatcatcagattctgatgatgatatacccataggactcctttatcgtaaaccaataaaaatccatccaagatcaaacaagaacaaaaaaaagccctctcagtcaagctctaatgaacaagttggtcatataatcactcagaagctaggagaaatggctgagtagagagacggcattcattgatagtatcctcagccataaaaccagacaatttccg

SEQ ID NO: 537487 - DNA, 342 bp, Homo sapiens
  misc_feature (64)..(64): n is a, c, g, or t
  misc_feature (71)..(71): n is a, c, g, or t
  misc_feature (100)..(100): n is a, c, g, or t
  misc_feature (115)..(115): n is a, c, g, or t
  misc_feature (138)..(138): n is a, c, g, or t
  misc_feature (149)..(149): n is a, c, g, or t
  misc_feature (163)..(163): n is a, c, g, or t
  misc_feature (174)..(174): n is a, c, g, or t
  misc_feature (182)..(182): n is a, c, g, or t
  misc_feature (203)..(203): n is a, c, g, or t
  misc_feature (217)..(217): n is a, c, g, or t
  misc_feature (221)..(221): n is a, c, g, or t
  misc_feature (225)..(226): n is a, c, g, or t
  misc_feature (233)..(233): n is a, c, g, or t
  misc_feature (248)..(248): n is a, c, g, or t
  misc_feature (285)..(285): n is a, c, g, or t
  misc_feature (295)..(295): n is a, c, g, or t
  misc_feature (297)..(297): n is a, c, g, or t
  misc_feature (311)..(311): n is a, c, g, or t
  misc_feature (332)..(332): n is a, c, g, or t
  misc_feature (338)..(338): n is a, c, g, or t
aagcgggtggcagctccaaagcattggatgctggataaattgaccggtgtgtttgctcctcgtncatccancggtccccacaagttgaagagagtgtctncccctcatcattttnctgaggaacagacttaagtatgncctgacaggangatgaagtaaagangatttgcatgnagcggttnattaaaatcgatggcaaggtncgaactgatataanctancctnnatggatncatggatgtcatcanacattgacaagacgggagagaatttacgtctgatctntgacacaagngncgtttgttgtaaancgtattacaactgagggggcnagtacnagtt

SEQ ID NO: 537488 - DNA, 275 bp, Homo sapiens
  misc_feature (21)..(21): n is a, c, g, or t
  misc_feature (34)..(34): n is a, c, g, or t
  misc_feature (53)..(53): n is a, c, g, or t
  misc_feature (79)..(79): n is a, c, g, or t
  misc_feature (249)..(249): n is a, c, g, or t
atgacgacgcagaaaggagantctacgagcagangaacgggcctgtggaaggngcctcccgcaggagaacggcgccagngggatcctccgggacattgcgagagccaagagagaacatccagaaatccctgctggaagctcaggccccggggcctccaagcggaccagcggagaccacggggagctcgcggccggattgcaagctggaaggggagaaccagaagctgcggggcgggggacaggagctgnaagaaggccatctcaaagctggaggg

SEQ ID NO: 537489 - DNA, 341 bp, Homo sapiens
cgccagtgtttccggcagttccgttaccagaatggggggggtccccgggaggctttccggcaattgggggagttttccccccaggggttggggcttgccttccgccccaaggaccagtttgtggaaattttggtccaaaaccagttgttccccttcctgcccaagggggttggggcccgggggttccccccccgccgggttgggggcttccttggttgaccggtggagttggggggggccagggcggggcgttttgtggggattggggccatgttggggccggggggcttgagcttgggccccccccccgtgttaataaaaaatgggttttggcggcccca

SEQ ID NO: 537490 - DNA, 607 bp, Homo sapiens
ccttgctcaagaggttgtgcgcccccctgggcattgccccacaaagtacggggtgccccaagacccgcggggacataatcttctatggggccccccttttggagagggacgacattatctagctcttacaagatattctcttgtccccaatttcaccggtggtctttctttcaacaacaatacaagaagagggcccacacatgctaatgggagcacccgccgtaggaataataaccgcacttgttatttgaaacacacagcaccctcagtcacccaggagcaataccaatcatctctcattatataccagtcgtcacattagagatttctgttcatcacggcccacgcacttattaatattcaccacacactgaccactgctaccagctcataacataaagataataaaatttttctcacacatttatattttaaaccccctactttttcattgtgcgtgtaggggggcaccgagcaaacatgacgcgtctgtgcaggggcgtacacatactcatgttcgatcctctactgatactgatgggctattcttatcaaaaagaatttttgtccggggcgtcccccgggtgcaatcagaagaccacgaaga

SEQ ID NO: 537491 - DNA, 153 bp, Homo sapiens
acgacagatcccaagatgtatttccatcacgtgacggacagatcttctcggaaacatgaattgttctacaagaggtatccggccctcgcacttaaccgttggtctgtcatgtatctcgtgtcggactccgctgcccaaaccagggctatgaag

SEQ ID NO: 537492 - DNA, 209 bp, Homo sapiens
ctttcgttgctgtatagcgccatcatgggtcgcatgcatgctcccgggaaggggcctgtccagtcggtttaacctatcgacgcagcgttcccacttgggttgaaggtgacatctggacgacgtgaaaggagccagatttaacaaaactgggccaagaaggggccttactcccttcaccagatctggtgtaatccctggagaggatttca

SEQ ID NO: 537493 - DNA, 743 bp, Homo sapiens
  misc_feature (20)..(20): n is a, c, g, or t
  misc_feature (528)..(528): n is a, c, g, or t
  misc_feature (545)..(545): n is a, c, g, or t
  misc_feature (547)..(547): n is a, c, g, or t
  misc_feature (568)..(568): n is a, c, g, or t
  misc_feature (644)..(644): n is a, c, g, or t
  misc_feature (662)..(662): n is a, c, g, or t
  misc_feature (673)..(674): n is a, c, g, or t
  misc_feature (680)..(680): n is a, c, g, or t
  misc_feature (697)..(697): n is a, c, g, or t
  misc_feature (701)..(701): n is a, c, g, or t
  misc_feature (708)..(708): n is a, c, g, or t
  misc_feature (710)..(710): n is a, c, g, or t
gcagaacaagcccgacagtnggttgatgctaacagcacgatcacttcagcgttacacacgctttttctccagcgttggcgtttaagtctgatcggtgcaagcaacgacgttaacatcaacagctattagaagaagaacgcgaacaactgttgagtgaagttctaggaacgcatgacgctgagcggacaacttgaaccgattctcgcagataacaatactgcagctggtcgtctgtgggatatgagcgccggtcagcttaaacgtggcgactatcagttgattgtgaaatacggtgaatttcttaacgaacagccggaactgaaacgcctggcagagcagctggggcgttctcgggaagccaaatcaataccgcgcaacgatgcgcagatggaaaccttccgcaccatggtgcgcgaaccggcgacggttcctgagcaggttgatggtctgcaacaaagcgatgatattttacgtctcctgccgccagaactggcgacactagggataacggaactggagtatgagttnaaccgtcggctggtggnanaaaccagttggctcacctatncgcctgcacggtgagtcgtggcgtgacaaagtgatcgaacgttccggatggtacataaacgattacgatgaacagncgcgcgggccgcatcatngtctgtgtggnntacttnccggctcaatgggcggncttnaatgaancngtgtgcgaaagcggtctggctggcctgatgcgc

SEQ ID NO: 537494 - DNA, 966 bp, Homo sapiens
tgggttttacgggtttccccaggggatccgggaaaaaaaaccccgggtttttggcctgtcccccgagggtggttaaaaaagaatttcggccacttaagagaggaaaattatcaaaccattttctatcaaaacaaagggtccacaggaaatataagaatgccgcatcaaaaagaggagggggtccggtcccattcacgtgggtggatttggttactctccccgcgtgcgctcaaagtgggcagcggctctccaagtgcgggtgttcccgcagggcgacaaagaagtcgcccggagaccccacctgcgtggaaaaaacacagcggagaggggggtccctgcggttaatagagcgccgcagaaaaattagttctccgaacggcgtggtggggacaccgcgggcccggagggagaaaatccgcgagaagggttttgtggagacagactctcctcctctccgcggggggggagtggagctctcatccgcgggtggatggagtgtgttccccgcagagagtgtgtgttcccccgtttggtggcgccacagcaattttttaaaacaaacaaaagaggttgtggagattagaaacacccggtttaagccacctcgagaatagaggaggggacaaacagcgtggcgacagtgggggtgaaaaagcacgatgtagagtgacacacaccgccaagacaacccgtgaaggaggcccacccccgacaaaaacctctgggggggcgcagaggggagacaacacccccccgtgagaggaagagacggagaaacaggggtgagaaaacggcccccccgtgtgggtgcaaaacccccccacagcggggcaaactctcttctcccggggaggaacaccccagggggcccctcggtgagaaaccccccctttaaatacatcgctacaagcagcacatggggagggataggccccgtggaagagagatggacgataaagaatgtaa

SEQ ID NO: 537495 - DNA, 921 bp, Homo sapiens
  misc_feature (274)..(274): n is a, c, g, or t
gaggctgtggccgttgcgttctcttggctaaaatcgggggagtgaggcgggccggcgcggtgcgacaccgggctccggaagccactgtcacaaaggggctggagctgacctgaaacaaaatgtctggatttctacagggcttgagatgctcagaatgcattgacttggggggaaaagcgcaatactgagttgcttccgattgcctgcttggttgtactcattgtcttggtacaagggctaggattgggactctagtcgatacgtatggcagacntggtatactcttaatcgcacactcgagtgaagaagatcttcacaccagcctcgagtaccgatgcactgtggatgttataggcgaaccatagccttcctaatgattaactgcagtatcgaatggacaagtccgaggtgatagttacagtgaaggttgtctgggtcaaagcaggtgctcgcagtttggactcttgcgtaggttatcatgatcggccctttggcatctctgattgcatctatgtggcattcttatataggagcgttatgtttgctcacaagataacaagacattacgtcataccctggcaattcgcttgtacttttgccgagtaatgcctctcgatctttctcttggcagggcatggttataatacagtatctggcaggaactgaaagacttcatggcagtgatacacatcgtgatttccgcacgaggcaccaatgagtccctggcaagtgggctatggtggagaacgttttgactgcatcactcccagaccattagtgtacatgccatatttcgtaaagcttatggtctggagcgtaagtctcagcttcagcagttgtgtaatacgtaacatccacgagaacaacctaagagaacaatcaaaaattctatggtggtatgcggcttgatttggtttatga

SEQ ID NO: 537496 - DNA, 1181 bp, Homo sapiens
  misc_feature (9)..(9): n is a, c, g, or t
  misc_feature (22)..(22): n is a, c, g, or t
  misc_feature (37)..(37): n is a, c, g, or t
  misc_feature (53)..(53): n is a, c, g, or t
  misc_feature (66)..(66): n is a, c, g, or t
  misc_feature (120)..(120): n is a, c, g, or t
  misc_feature (151)..(152): n is a, c, g, or t
  misc_feature (208)..(208): n is a, c, g, or t
  misc_feature (567)..(567): n is a, c, g, or t
actctactngcccctaatccgntttaaaattctcagngttccctagtggttcngcatactttatgngagtgctatagctgtaccattaccactttatttgctgttggtgtttcgtgactntggtaattcggcattagaaacctttcacttnncttcaaaacgtagttatattttggagttttcatttgatatataattatttattttncccttttatttcccaaagacattgtaagggttaattagatcattatattttattattacagattaaagttgggcagtaatcttaattatgatggaattatcattatgctaagtaattaactttacctagtttgttttacaactagaacctgccctaaatgttgaatatcttcctagcaagaaacagtctgtcattttacttacacgatgtctaaccaaaccataactttacataaactagtcgtttcggtcaaatagaaaaatgtgtgaatgccataaaaacaaaaattctcagttaaatgatactgggaaatagggaagacagcaaagtgagacttgggctcaggatggttcaggaanaaaaaaaaagaaagacccctgagtaccattaatattcctcagaaattattatttcaaaaggaaatatttctgtattataaatttttcatgagcagccattatgaaatctcacaagaatcatagaattcaataaaaaaggtagaaagtaattttagatacttaaacactataaattaaacataaacatttctaaaatcataagcacataaatagaacttaccaggccagaaacgcaaaagctgaaggcaaccatatctatcctgttcaaaaatgtgaaacccaggatgatctctagaatgagatgcgcatgaatagagaggagagaaaaacaaaaaaaaaaacacaaacaaccacaaaaaagaacaaaacaaacaccaaaccaagataacaccggaacgataaacagcagaaacagagaaaaaacataagaccatataagccgggaaactaaataaacacaaaaacacgaaaagaagctaaaacaagggaaacaagcctaagaaaaaagcgagaacagaagtagaaaacaggaaaaaaagcggaaaaacacaagaaacaacaacgagatatagaaaacaagcgaataaagagaaaaaaacaggaaaaagaacaat

SEQ ID NO: 537497 - DNA, 522 bp, Homo sapiens
agacggcgacagcgacgacggcagcgatggctggtgtgctggtggccagccccgtggactcccgggtgcagtgagtgacccgtggtcccgggtcctggcgctggcatcccggtgcaaaatgcggctgaggaacgcttgaagtgaaatggagtgcggagatggccctgtttgagcagtgaatgttctggtgggctccagtacctggaatcccaactgctgtgcctgcggtgcccactgtccccacggtccccacatgtagaagctgatgcatggtcccagctgtgctcctgtgatcctgcccaattatctgctgaccaacacataccagcatgtgtccatgcagactctgtgagtgccctgagcatgctgctgcagccacatgtagtttcctcccatggctgggtgtgccctcctttttgtagtgccctagatggcttttggcccttggtgatctggagtcaccttggacatgcccagatggctcgagaatgccatgttccttgcggctgggcagctgtgagc

SEQ ID NO: 537498 - DNA, 336 bp, Homo sapiens
gccttttttttttttaaataaaaatttttttttttggtttttcccctttaaaagggcccagggttttttggcaaactttttttttattaaaccttttttcaaaaccggtttaccggaccaggtttttttggggccaaaggttttttttttgagggctttttttttttttcccccattttccccttcaaaaattggggaaattttccccaaaaaatttttaaatggggtaattttaccaaatttttttttttggaaaatttttccggttttcccggaccccctttttttttttttttttttttgggggggggttttcctttttttcccccttgggga

SEQ ID NO: 537499 - DNA, 413 bp, Homo sapiens
  misc_feature (28)..(28): n is a, c, g, or t
  misc_feature (98)..(98): n is a, c, g, or t
  misc_feature (134)..(134): n is a, c, g, or t
  misc_feature (143)..(143): n is a, c, g, or t
  misc_feature (244)..(244): n is a, c, g, or t
cttttttactttttattcatccttgggnttttatttatctaaaatggggattgatttttaggccggttttgaaaaaaaaaagtgttgggaatgaagcnagtgattgattggaaaacatactgaatggaagaaanatttaattnaaaatgaggtaggttgaagttttttttttgaaatgataaataaatggtgaagataaggcttattgtgaggattcagtgaggtaatatatgccaaggacttncaatgttttggcccatagtaattaattaaaaaaatcgagcccccttaattccctaaaaagcagggttgttagttttttggttgacttttgttttgctggggcattttcccatgttttagggtcatttaataaataatagtacccataaaggttaacctttattaagtga

SEQ ID NO: 537500 - DNA, 291 bp, Homo sapiens
  misc_feature (76)..(76): n is a, c, g, or t
  misc_feature (108)..(108): n is a, c, g, or t
  misc_feature (113)..(113): n is a, c, g, or t
cctctgtccccagagatgatgctgcgcgttggagctttcctgcttttttcccgttttccagatttccttataagcnatttgacttcacagcgtgacctttttatatanatttnatatctggtatttgtttagaccttagaagtgttctgaggccgggcgtgtggctcatgcctgtaatcccagcactttgggtggctgaggtggacggatcacctgaggtcaggagtttgagaccatcctggctaacgtggtgaaaccccgtccctactaaaaataacaaaattagccggg

SEQ ID NO: 537501 - DNA, 438 bp, Homo sapiens
cagtgtcagagaaatcagtaaaaacaaaaggtaaaataagagccagaggcgtcgccacggccgagactctgtctaaaaaaataaataaggagccagtgtctcataacataacacagttgtgtccagaattcaataagaaatcactcaacatatagtcatgtgccacattacctatgtagggggtcaatgagagcccaggttaatgatgcgaaatctgtaagactataaacccatatttttaccattccatttgcggtgctaaattattgtcagatatccaaatacttaccatggcccgggcgcggtgcactcatgccttgataatcccagacacttgggcacggctgaggaggtataaaagagtcataagaggctggcaccaggggtaccacacgctgtaatcccagtacttgggcaggctgaggagggggaatcctc

SEQ ID NO: 537502 - DNA, 242 bp, Homo sapiens
aaaacaaatagcctcatcatccccaccatctagccccctccccctcccttatcctcttcttcttacctcgccttaatcttactccaccttcaatcacacttactcccctatatatctaacacacgttaaaatataaatatgacagtttgtaacatataataatcccactcccattcctccctcacactcatactccttaccacgctactcctacctatctcccttttatactataatcttat

SEQ ID NO: 537503 - DNA, 392 bp, Homo sapiens
agcccgagttccctgatggaaagatgatggaagtcctcatttaactgccatccctgtggaatttcagtacagaaccctgacaaacaaggaaagcggcaaagaaaaaagaaagccctaaaaggttgtaaatgggaaatcaggaatgatttgaactgataaagatttcagactcataagaacccattttataaatgttaaacccaaaaactacatgactgaaaataaaaaaaaatgcgatggattttattacacatggtggaaaaaaaaaaaggggtgtaggtttgcaaacaaagttaaaaaataggaaactgaatttttcattgtacaaaaaatgtattttttggggagggcctgggtacccccattttttgattataaccagattaccccca

SEQ ID NO: 537504 - DNA, 192 bp, Homo sapiens
tttaagggggggccccccctttttttttaaaaaacaaaaaatttaccgggggggggggggggggcctccctttccccctttttaggggggttgggcgggggaatggggtttcccttgggggcaaggttttcctttaacccaaatggggcccctcccctcccgcctggggggcaggggggggctccttttcca

SEQ ID NO: 537505 - DNA, 896 bp, Homo sapiens
ggttccttccggggttcttgggctgagaactgaatggcttgagagagctcggtggaagctgataagagtgcggacgagcagtggagctcatggctgagttatctcgtatgcgcatcatttccactctcactcctatactctgagcaaaccgttgattaaccagcccactagtctgggataccacgccattgctgccagctggtcgacagacctttatcagggacccatacaaacggcatgccgctgattcccagtgagtgtgtgactccgtgtattactatatgacttcgtatccatctgggctcctacatacgacttctagaaggaaaaacaagggaggagtgttgccgtatggcttttccataggaatggcctaacaagaactaggcatcagagagacaaccaggatctttggcagccgcaaactggaacagagaaatcgcgaagcttggaattgagaggaaaattgtacgctgcaaaacatagtcggaccagacccaccagggttaaccccctgtcccaggctcaggaattttcaactggagaaggccaaggtatcgcggggggactaatgatggccttctctgttgacaggccaggagacacacataatgcacggtgtattgccgttctttaaggccttgaacatgcccgccagcttgggttccaataggacagccagcaagttgcaaggcaaaaggcagcaagcgatgaacccttaagcactggttggcttgaaagcattcctggaaaaaatgaagtctcccaatgtgctttttaattaagaattaggcagaattaaggtttgtgcttcaaagagaaaattagggttaagtggttggaacatcatagattcagtggggtaacacatgcaaacatttcaaaatggaataaaa

SEQ ID NO: 537506 - DNA, 168 bp, Homo sapiens
caagggtactaagcaaagagataaacgaaaactccacacctcagccctagagtcatagcatcatttttgaatagtgaccattagtgtacagacttgggcttagaacttctgcaagggtcttttctcattattaaaaagaaaagaaaaggagttcccgtcgtggcgcag

SEQ ID NO: 537507 - DNA, 132 bp, Homo sapiens
  misc_feature (31)..(31): n is a, c, g, or t
  misc_feature (104)..(104): n is a, c, g, or t
  misc_feature (106)..(107): n is a, c, g, or t
  misc_feature (116)..(116): n is a, c, g, or t
  misc_feature (124)..(124): n is a, c, g, or t
gatccagaggcgagaagccaccctgttaganctcctgtccatcatccaggtaagtcaactctctcctttcagggccaatccccagaccttttgttgagccaggncnntatcacctntcctactnacttaaag

SEQ ID NO: 537508 - DNA, 133 bp, Homo sapiens
ggtaagctatcacagacaacaacattaacctactgctgttttatcattttttcttggttttggctctcagcagtgtactatgacttgctaggtgtggttttctatttgccttattggggttagggtggtatag

SEQ ID NO: 537509 - DNA, 1518 bp, Homo sapiens
gggggtgaaaatgacagatttattcaatttaaagggtcaccgaggctacagaagaaaccaaggcgtggttccaaataggcaagccacctacgtggtcagccagcaacattaccattttattttctttcaacgagcattcgtgagcccctcgaggggttatagtgttttccatataaaacaaaaattatctttatttaagcccgagtgtgtgggacacccgcgtgttctacagaggcacaattttataagatgtggcccaagtgtgtacaaaacaaatttctcacgcgtggaacaattcacaattctacaaattcacaagtgtggctatgtgcgagccccactgtggatacagaacacacacagcgtggactataagttatactctcgagacattaatcacatatagacacacagagacaaccttatagagagtgcccgtaccaatataagagcaccaaacatgagtcagagaccatctttatacacacacactgcgtgagacataaaactctctccgcaaagtatctcaaagaaaaagacaagacgcgctctatattctccctgtgtcccgcagagaaactctttctcaaagtggcgctctctgtgaaacaccacactctgtagctctatatagccgttgagcgagcagagagaggctctgtgtctcctcaaaacgccgcgggtagacgcggcggctatacacgagggaaggatatcatcgatgggaccaccaccacctaccacactatgtcgccccagaacgtagacacgctctctataaccacccacaaaacgcccgcaggaaagaagagagacacaccacacgaggggctgtaaccacagggtaggcgaaagcatagagagaagtgtcagcaagcggggcggagaaccacagagacgacgcggacactacaccgggtggaatacacaaaaaaggtgtcgcacacgaccacaaggggagcccttccaacacaacggcgggggcggcatcagagcacaagccgaatgagagaaagccactaacgacaaagggctccctaccagcacaacacacaaataaactaccgaaggagcaccaccccgatggcgccgcccccatgtgtcacacagcacaacaacacaccaaaggaggaagaaacgaagcgaaagaacaaaccgtacggcctacaaacacacgacttttaataaccgaaacaacaaaacataccacatgtttataccactcgtcggggaccacaaccacacctggttgctgttgccaaaccaattactaaaccaagaaatttatattcacaaccaaagaccgtagcagcttatggtaggacgacataccaaccatcccctgcgtggtcgcccatacaacaaattaatgaaaagtcacccacgacaaagagaagactgctactccaaactacacgacggtggtgagcatagtactacaagaccgtacacacgagtatattggtaggagacagctcaccacacaccacacgagatcccccaccacaagtagtgagt

SEQ ID NO: 537510 - DNA, 226 bp, Homo sapiens
ctgtccgtcgttttacactggccgttgttttacactggccgatgtttttctattctcctcttttttcattgtctttttcttttacatttttttttctttttcaccttttttattttaattttttttcttctttttctttatatttttcttctcttttttttctctttttatactattttctttctattctggacttctctcttttattctcccttttccttctttc

SEQ ID NO: 537511 - DNA, 263 bp, Homo sapiens
agctggtactacaggcgtgtgccaccatgcctggctaatggtcatagtttttgttaggacagcggctcactatgctgccaaggctgatctgcaccttttggcctcaagcgatcctcctgctttggccttgtgtttacagatgcattggtgcccgacctcctagaacatcatcgtgtgatgatctgttgcgtgagtggtcttgcctatgagacatatatgagcatcgagtgtgagcatttagcagaactgcagtgttctttctc

SEQ ID NO: 537512 - DNA, 302 bp, Homo sapiens
gagtgcagtggcgggatctcggctcactgcaagctccgcctcccgggttcacgccattctcccgcctcagcctcccaagtagctgggaccacaggcgcccgccactacgcccggttaattttttgtattattagtagagacggggtttcaccgttttagccgggatggtctcgatctcctgacctcgtcatccgcccgcctcggcctcccaaagtgctgggattacaggcgtgagccaccgcgcccggccaccaacgaggattttgaacaagtctatgcatagagtagggcccattgtagac

SEQ ID NO: 537513 - DNA, 329 bp, Homo sapiens
  misc_feature (14)..(14): n is a, c, g, or t
  misc_feature (41)..(41): n is a, c, g, or t
  misc_feature (65)..(65): n is a, c, g, or t
  misc_feature (285)..(285): n is a, c, g, or t
cccaaactgaagcncctagcctaaaaatagggcccccaggncagatgcctagtttcccatagganacaccgaccctgtgtcaaagtcaagttcacccatggctcctggcagcaccccagaagttacccaccctcacccctggaaatgtctgcataaactgccccttcatttgcatataattaaaagtggatacaaataccactgcagaactgcctctgagctgctactgtgggcgcacagcctgtagggcagccctgctttgcaaggagcagcgcctactgctgnctgctgtgcacagccggccgcttcaataaaagttgctaacatcc

SEQ ID NO: 537514 - DNA, 246 bp, Homo sapiens
aacgctcgaaaagggggaacggcagacggaacttaagcgctaatttgcactgataaaataagataggatcactagtataccaggatgttaatctttatgtgaaaaatcttgtattattgtctttattatgaacgtctccggaaagagttttctccattttgtacaatcactagttctgatggttattattgacggttgtcgctgcagagggtttggttttgtatgtttctgggtaccgatgctcga

SEQ ID NO: 537515 - DNA, 256 bp, Homo sapiens
tttttcatttaaacaggaaaattagggtttcccaaggcatcaatcttagccataatctataaatcaaagctgctatataattcccatggcttaacttttaaaatgacattacccctttccatttagaatgtcctagaagcacaattaagccaagaaagtttccagatatatggctgtatagtatggctgttaatactgtatgaccttcactgaggaggtggccataaaatacaaccctttaaaatttgaaaaacca

SEQ ID NO: 537516 - DNA, 332 bp, Homo sapiens
gctctcaggatccgaaactgacatgaggcaggtgataagtattaggtagtgtaaatagtctatgatgctgctcatgcgtgtaatcctctacttattgtctcacaactcttcatatctatgtcgtttatgtattttgatatcagtctgttcaatatggaagaaagcccgtctccaccaccccccagaagagattagtcgggggtggtggcgtgtgcctgtagttccagctactcgggaggccgaggcatgcgcagtgcttgaatctgggaggcggaggttgccgtgagccacgatcatgcgactgcgcttcagcctgggcaacagaatgagac

SEQ ID NO: 537517 - DNA, 411 bp, Homo sapiens
tgttgaaatcgacggaaccatacaccaggtgtatgtgctgaagcgacctcacgtggacgagttcctccagaggatggggcagctctttgagtgtgtgctctttactgccagcttggcaagtatgcagaccctgttgccgacctcctggaccagctggggtgtgttccgggcccgactcttcagagaatcctgcgtgttccaccgtgggaactatgtgaaggacttgaagtcgcctgggacgggaagctgagcaaaagtgatcatcgtggacaattctcctgcctccctacatcttccatccttgaagaatgcaagtgcccgtgcagtcctggttttgacgacatgacaagacacggaagcttgtttggacctcatcccgttcttcgaggggcctgagcaggggaagacgat

SEQ ID NO: 537518 - DNA, 887 bp, Homo sapiens
tcgatggcgtgtgaaaaagttgagaagcctcatactaacagagaacaaacccgtaagccgagtaaggttgatgctggtgagcaacggctgaggaaagagtgtaacctcaagagtcgtaataaagcccgagaaggggagaggccactcgagttggcagcacgccacatcgcctggtaactgtgtctagaggaatcggcacggatattcccgagtctgtcactgctacttccagaaaaggaccactggtacacagaggaagctacatcagtgcgcgtatgaatccacaggttgatgaaagacaacagaacgagtaaggttctcgcaatgtgtttacaaaacccagtcttgggtggttgagaagaatcggcggttacccgtggtgggttacacaacttcgcaaaagtgcctagcatattactctcgtagcatgagagatgtgcgctcgaagagctgttgtatgccaccgtggcaaaaaaagtcgcttccagttcagcgaccgatgaaagtagatacatcatgttgagcccgagcagttacccccgggacgcactctctgactcatccctcaacgttgggacagcccaacagggcgcacaagaggggttgggtctttccttgaagcagacatggcgtagtggcttattacttgtgacgtggaccgtcatggtccgtgcaatcgaggttcctcgtacgaagaacacaccagaaatttgtcattgccaatttgaccaaagagtcgatatcagcaatggtaaaaatccccaagaaatcttactgagtgcttacgttcaaggaagcaagaaaggtgggggaaagacccaaggatggcccaaggaaaggggggagaaatcctttcgaccccggaaaaagaggaggaaaatatttga

SEQ ID NO: 537519 - DNA, 403 bp, Homo sapiens
tgaacggcccggagtagtctttccctcctgaatgccgccactccgcagtccagagtatttgaagatcaagctgaaattgagagactgacgagagtggtccctttttgttcctaacagatttcttgcgacaaggaaaccggcagtcttccgcttccggttgctgttgcatagtaacgcacccataacagccgtggtggttatgctggctgagcggcgagatcccgacggagttcacgcggtcgttccgctcatcgaatgcacgctacgcgaggcgtgactgtggcggagatgacggaccctaggaccgcgccgcctgtcgctgctaggctactgctactaccgcctgcaggagttcgcgctggcgccgagtgctatgagcagctgggccagctgacccggaact

SEQ ID NO: 537520 - DNA, 389 bp, Homo sapiens
gggagtgggtctgtccaaaaggatgccccccatggtgtcccgggcaaaatggaaaagtttccattgttccccaccacgctgttggccttgttgttaccccacagttaagggcaaattttttccccaaaaaatttttgggggttttgggccccttaacccctttaaaaacccgaatagtttccttaaccggtttaggggaattgttcccaaaaaaaaaaaaccccaaaaaaaagggtcctgggtttcattaaaggccccccctccccccccccaaaaagcccccttttttaaaacccatgggaaggggccttagcttttgggcccttttcccttttattttttggcctttttgggttttaaaaaaaaaataaaggccctttggggcccca

SEQ ID NO: 537521 - DNA, 416 bp, Homo sapiens
aaccggccccaattatagcctcggctcccaaagtgctggagattacaggcttgagcaccgcgccggatatatttaatcttttatctatatttacttatgacatttaccaatcaccaagcttgcaacaaacactgctttagacactggggacacaaaggggacaagagccatcctcctttgacacctggtcttcagattctgtgcccaacgtatatagttttgacaatgaccaggttggactgtttaatgtctttcaacttaccacgtaatcctcttgtagggatcacatctttcttatatgatattgtatttctctacctctaacagtaaaaattccattcaacccttaaagctcacttcaaattcttctttgagaagtttttcctttctccgcaaccagatgtacatatttgaac

SEQ ID NO: 537522 - DNA, 274 bp, Homo sapiens
cacgccatgtccacgaattagtgattcagggcataaaatactgcattaaaaggcgtgtatcagatacaggatgaagattcagaaggtgcttagtggcatacttaggatgcttagtctgtcgtgtattgacccacctcaacaaaagcgataactctgatgattccaggagaagagtatgataattttagacccatctcaactctgagcatccttagaacggaatgtctattcagggtggggctccagtgatttcatctgaaggatgctcagagtt

SEQ ID NO: 537523 - DNA, 293 bp, Homo sapiens
gatcgggaccgcggcggcgtcccgcgagcgggatgttccggggcttgagcaattggttggggttgcagcaacctgtggcaggcggtgggcatcccaatggagatgctccacccgagcagccgtccgagacggtgtctgagtatgcggaggaggagctgcagcaagcgggagaccaggagctcctcctccaggccaaagatttcgggaactatttatttaactttgcatttgctcccacaaaaaagataactgactcagttgctgtaacagcacaaacaataaagaaatccgta

SEQ ID NO: 537524 - DNA, 692 bp, Homo sapiens
attcggcacgagattaactcgtcatttagcattaggtatatctcctaatgctatccctcccccttccccttccagcatctgttgtttcctgactttttaatgatcgccattctaactggtgtgagatggtatctcattgtggttttgatttgcatttctctgatggccagtgatgatgagcattttttcatgtgtcttttggctgcatacatgtcttcttttgagaagtgtctgttgatatccttcacccactttttgatggggttttttttcttgtaaatttgtttgaattctttgtagattctggatattagccctttgtcagatgagtagattgcaaaaattttctcccattctgtaggttgcctgttcactctgatggtagtttcttttgctgtgcagaagctctttagtttaattagatcccatttgtcaattttggcttttgttgccattgcttttggtgttttagacatgaagtccttgcccatgcctatgtcctgaatggtaataccaaagggtttcttctaagggttttatggttttaggtctaccgttaaatctttaatccatctgattaatttttgataaggggtaaggaaggatccagttcagcttttacatatgggtagcagttttccagcaccattatttagggtcgtttccccatttctcgtttttgcggtttgtct

SEQ ID NO: 537525 - DNA, 948 bp, Homo sapiens
  misc_feature (150)..(150): n is a, c, g, or t
  misc_feature (193)..(193): n is a, c, g, or t
  misc_feature (195)..(195): n is a, c, g, or t
  misc_feature (216)..(216): n is a, c, g, or t
  misc_feature (275)..(275): n is a, c, g, or t
  misc_feature (294)..(294): n is a, c, g, or t
  misc_feature (303)..(305): n is a, c, g, or t
  misc_feature (307)..(309): n is a, c, g, or t
  misc_feature (327)..(327): n is a, c, g, or t
  misc_feature (329)..(329): n is a, c, g, or t
  misc_feature (338)..(338): n is a, c, g, or t
  misc_feature (365)..(365): n is a, c, g, or t
  misc_feature (367)..(367): n is a, c, g, or t
  misc_feature (377)..(377): n is a, c, g, or t
  misc_feature (450)..(450): n is a, c, g, or t
  misc_feature (472)..(472): n is a, c, g, or t
  misc_feature (494)..(496): n is a, c, g, or t
  misc_feature (513)..(513): n is a, c, g, or t
  misc_feature (521)..(521): n is a, c, g, or t
  misc_feature (528)..(528): n is a, c, g, or t
  misc_feature (573)..(573): n is a, c, g, or t
  misc_feature (583)..(584): n is a, c, g, or t
  misc_feature (592)..(594): n is a, c, g, or t
  misc_feature (596)..(596): n is a, c, g, or t
  misc_feature (598)..(598): n is a, c, g, or t
  misc_feature (603)..(603): n is a, c, g, or t
  misc_feature (606)..(606): n is a, c, g, or t
  misc_feature (615)..(615): n is a, c, g, or t
  misc_feature (642)..(642): n is a, c, g, or t
  misc_feature (652)..(652): n is a, c, g, or t
  misc_feature (654)..(654): n is a, c, g, or t
  misc_feature (663)..(664): n is a, c, g, or t
  misc_feature (753)..(753): n is a, c, g, or t
  misc_feature (807)..(807): n is a, c, g, or t
  misc_feature (842)..(842): n is a, c, g, or t
  misc_feature (859)..(859): n is a, c, g, or t
  misc_feature (863)..(863): n is a, c, g, or t
  misc_feature (877)..(877): n is a, c, g, or t
  misc_feature (914)..(914): n is a, c, g, or t
ctgccggggcggcgatctctcagggatctagggtcacctggagagccgcccgccgtctctgcccgctcggctcctccgcccgggccgctcggccggtccagccgcggccggcgcgctggctgtgaggtggattcccggcgcgcagtctgnccagtgctccctccagtttttccacttcgttcggaccttctcntnactatgtccaccctctacgtntcccctcacccagatgccttccccagcctccgagccctcatagccgctcgctatggggnggctggggagggtcccggntggggaggnnntnnntcccgcctctgtctcctncnacccccgtntagcgggcctagctttcccccaccgcngnctgccgtgcnctgtgagcaggggcgccggtgggctctgggtcgtggggggcctacgtgctgtggccagctgctgtggccagcnggtctggggggcccagggggcngccgggcggctgttcttgtccnnnagtgggtcagttacgcnggcacggngtttatnccagctgcctgtggagcatacgctgccggccctgggactccgaanctcggcccannacccccannntntnctggnggnccttggcanggcccggagtcccttggaggagtggcntcggctgcananctacttggnnggggaggccccactctggctgacctggcggctgtcacagccttgctgctgcctttccgatacgtcctagacccacctgcccgccggatntggaataatgtgactcgctggtttgtcacgtgtgtccggcagccagaattccgngccgtgctaggagaagtggttctatactcaggagncaggcctctctctcatnagcnaggccccgaggctnctgccctcccaaagacagctgctcagctcaagaaagngggaaagaaacgggagaagctagagaaattccac

SEQ ID NO: 537526 - DNA, 756 bp, Homo sapiens
  misc_feature (234)..(234): n is a, c, g, or t
  misc_feature (506)..(506): n is a, c, g, or t
  misc_feature (697)..(697): n is a, c, g, or t
cttttaatgagtggagctggaattttatcagggagctatgcatgcatgtcaggggagatcaagtttatggtttccagaatctacactttctttttgagaatgggaacttttgccagtacattgttttcctatcctcatttccataatttctcaacaacagtaagtagttggaaggtcacatttgcaagttttttgaggagcctgggatgtaacttttctggagacttcaacctnctttaaatggtcacatgccccctgtgtccctcactgcctcccttctgctgagctctccccagtcctgggaaggctgattctttagctagagaacccagaccagccctgtggcctcatatttccacatcagccttcttgaatctgtgttcctcccccctcacttatctttttacatcaaacacatggctcaaagcttttgatatttgacttgactcttcaggaccccaagctcctctgactcagccctccaccccccacccctaacccacggnccactctgcttgagggctcccccctcaaactccaccgtaagctccctgagcagccacaaggattttggggtttggtttggttttgcctcttactcccttttcattttccctggcatcattcacattcaccaatcagattcattgttatcatctcctattcctcatgaagacctgaggtgagggggtatctnctcttgtccttctatccatgcctgtatgggttgtctgtggcctaccctctatcttgatc

SEQ ID NO: 537527 - DNA, 887 bp, Homo sapiens
gcggtgggcggtgcttgtagtcccagctactcgggaggctgaggctggaggattgttgacccaggacgtcgaggttgcaatgagccaagatggtgccatgtactccagttgtgttgacaaaatgagaccttgtctcaaacaaaagagtgccattgagatttgatagggatggcgtgactctgtagacttggtgatatggactttaagtgatatttttccttcaagtgcatgattaatggaatgtcttgtattaatgtgtgcttcttaaattttccttcagtgtttaataatttccagtgtaccaagtctttaaaccttcttgtggctaagttatttctacatattgtcaacaatatttttgtggcttgtggtaaacgggagtgtttcttaattgccgtcttcagatagccgtgtgggtacttagaaatgctgtgatttttatatattacgtgtggatccaggcagttttaggtgtattcattttatgagttctaaccagttttctgttgtggtggagttgtaaggttttctacatattatttgttcattgtgtaacacacgctaattttgccttcccgtgtcacctatcgggaggtcccttttaactccccttaaaggtcttcttctcgtggagattcaccgcattacacgtgcgactacggaggtgcaacaccgtggggactcattggctttcgtgatttaaagagaaacgtttcaggtttccctacggttatgcatcatggggggttattttgaacaacgtggcaggatccccatttggaccagcgggggcctgacgacggagtcaaaccacctgtgggattggaccgtctaaaaaaaacccgggggggagccggcccggtggaggagaaatgtccgcgggtgcc

SEQ ID NO: 537528 - DNA, 306 bp, Homo sapiens
ctctcctttcttactcacttctgtcttcagggaagctttctaaaatgtatccctttcggtccatcaacaggatacctgactggggcagtgaaggaggggatgcacagcgttatgtgtaaaaacaagttctgtttacaatcccgggatcgtttgcaatgttactgaatccgttgctacattgtgaaggcttaaatgagtttagatgggaaatagcgttgttatcgccttgggtttaacttatttgatgagttccatttttctcatgtcctacccgaggagaagaggagtttgttaactgggtttcga

SEQ ID NO: 537529 - DNA, 88 bp, Homo sapiens
aaagaggtttattcattctgtcattaggatacaaaatagaacatgtaaaaggcaccccttctgtcgtcaactcgccgccgtatagtag

SEQ ID NO: 537530 - DNA, 240 bp, Homo sapiens
ttcggcgtcgaacgaagaaggctcgctgggcgcgattatcgacatgcaggcctcgcgcccgttcgacttcagcggtccggcgctttcgatgagcgccaaggtcggctggaacgacctgtcgcgtgagaacgacccgcgcttcaccttcctggccagcaaccgctgggacaccggaatcggtgaaatcggcgctctgatctcggtggcctgggccaaacgcaagacgctggaagaaggctc

SEQ ID NO: 537531 - DNA, 333 bp, Homo sapiens
  misc_feature (81)..(82): n is a, c, g, or t
ttcacacactgcccattatgaacaaaggcggtagaaagttcaaaaccagaagatgccctgactgacactgttcaaatttcnncagtgcgccaggcacagtggctcatgcctgtaatcccagcattttgggaggctgaagtgggtggatcacgaggtcatgagattgagaccatccaggccaacatggtgaaacctgtctctactaaaaatacaaaaattagctgggtgtggtggcgcatgcctgtagtcccagctactcgggaggctgaggcaggagaatcgcttgaacatgggaggcagaggttacagtgagccgagatcacgccactgcac

SEQ ID NO: 537532 - DNA, 853 bp, Homo sapiens
atactcgggggtatggtttctggaagtgttcttcattgcctgtgttgctttgtcacttttgtatctgcggtggcttactctattttggtgaatcgtgcccaggttggtaacctaaattattgctgcaggactatgggaagaagtagatattttgccatactgaatgagaagttagaatgaatgtgtcgtgagaatgggcttaatcacatcgttggtttgaaaacttcgcatgtttaaagaattgagagtgtagtctagttagaagagaataggtaatggacttggacacatgttatatttatatccaaatatacctattgcagagtgtatttgtgaggctgttgtagcctgggtcttttggtgatgtgtgtggtaaagaatggctactttgagtaggcgtaagtcaacgatgaaagggttgagaaaattgctgtggaacatccgaggtgaacttgcaggaaagacagtgaagatggaggagttggagcttctgtggagataatcttcattaggtatatatcttgagggatacaggctgtctttatcttataggcaggaagaatcaagttttgagggaacatagaagggctgcgttacgcaagaatttaacaagtggcattgtcatgagtggcttccttttcactagtaaggcataatgtagggaatatgttgaagaatgtttgatgaaggcgtctgggtgatcagaaacataggttggggctaatctgagatttgtgggatggcgaggatgaccttttaattttatttgggtatgaggacctaatattcaggattgttacagataactcgggaggatccattttataagaaaagtttcattattaggggtgaa

SEQ ID NO: 537533 - DNA, 381 bp, Homo sapiens
  misc_feature (1)..(1): n is a, c, g, or t
nccgcctttttttgggggggcaggatcggtggctaacatctgcaatcccagcaacttgggaggtcgaggcaggcgtgagcacatgcgcccggccaagagaagtttttcttaaaatccttttttggggggggcccggatcggtggctaacatctgcaatcccagcaactttgggaggtcgaggcaggcggatcatgaggtcaagcaatcgagaccatcctggccaacatggtgaaacctcatctctattaaaaatacaaaaattagctgagtgtggtagctcacgcctgtaatcctaacacttggggaggccgaggcagacagatcacctgaggtcaggaggcggcgccgaaagcagatggcgctaaaaaaaaggggggccg

SEQ ID NO: 537534 - DNA, 249 bp, Homo sapiens
gaaaaaacaaacaaacatatgtacgttcagagtggaagagacagaaaatgtttaaaaacaaagtaaaaatccttcttataatgttctcacccaaaaacaggcaatgctatactcaaataattcgcatcaggaagagggtgtttggtttccacatctgtgtgtctgcatgtactaccacctgccatcactgacctgctctgagatagcatctcactttttcaccacggctggagtgcagtggcacgaact

SEQ ID NO: 537535 - DNA, 103 bp, Homo sapiens
acagggaggatgacttattgtgcagtgatggactggtatggaatggagactaagtggcaggaggactggtcaggaatgagtaaggggaggaggactggtcagt

SEQ ID NO: 537536 - DNA, 606 bp, Homo sapiens
  misc_feature (104)..(104): n is a, c, g, or t
  misc_feature (126)..(126): n is a, c, g, or t
  misc_feature (177)..(177): n is a, c, g, or t
  misc_feature (195)..(195): n is a, c, g, or t
  misc_feature (393)..(393): n is a, c, g, or t
  misc_feature (477)..(477): n is a, c, g, or t
  misc_feature (508)..(508): n is a, c, g, or t
ttcaccagttcttcatcgatgcggcacttcacccggcgccagcgctcggtattcagcgcagtgttacaacttgacccggcccacactggcggacagacgctggnacagcgagcccaaacgtgtggncacatcgcccagccagttgttgaggttgtcggcacgcgcataaaacagcgngccgcgctggttcgggtnagacaggcgcgcttcgtagcggcccagggaattgatgccttcctggtattccgactcactggatggcagcacccaactcttgttatcgaagttgaagcgcggctcggccttggccaagtcagcgtcttcagccgactgcgactgggagcgggcgaagtctttacgcagggcgcgggtaaggtcacgcacctgcaccancacgccgtattcccagctcggcatgttgtccatccacaagcccggcgggaaacgatcgttggagatgtagccgcctggcttgtncagcaaggtgccgaccacggtcttgagggtntcgacggtggtgtaacccaccaccatctgcttgccttccttctcggcggcaagctgggcattttgctgcaccggaaacagcgccggctcttggctcca

SEQ ID NO: 537537 - DNA, 1162 bp, Homo sapiens
ggcagagctggaaggtctgtgcaagctggtctcctgctggggaatcaataaagtgaggcagagcaacgcttattatttattattgcgccgttggccatggccagggtttctgccagtggctctatcgccaagtggagcgcaggggtccaccgtggggcctaggacgccgtgccgagatagcccctctcttagccccaagggccgacgggctctcagggctcccggggctccgcgtcgctctgcagggctctctcccggataccggcgaggccgcgtgcggagagctgctatcgctcttaaccttgcaggtgctgtgtgccgcggggcgcccggggcaggcaggacgcagaggaggaggcgcccgcacaatgcccggggcctgcggggctcccacgcacatcgggattacccgtcccggccgcaccccgaggaacggcctgactgcaggccccttgtgacaagagcgaagagaggcgagcgcgacgagaagagcaggaggcgagacgaaggagagcgcccgccccgccatggggcgaagagctcccgagaaccacgggggaggcactcggagcatgagacccctattgcgacggggaatatccctcagaccaccagagaagagggaaccccattgacgagaaaaagggcggggaccacacacaggagcagaccccgtagggggacccacctcgggagccccacattcagggcgagagccgggcagcggggtgcacatacagcacgacaaacaggggggaacccgcaaaggtcccacgaagagaagagcccagaagaagtagtggtacgccttagagaggccctttggggcgccgagggaaccccacaagaagaaaccccacgggaccttccggaaatgcgggagcggaggacagcggcggaccacaaaggacctgtatggaaggggggccgcgaccacggagtgtgaggaccgaccacagggggcgtggttcaccaaatgcagaaagcgcagccccaaatgtgtagttgcaaaagcgccaaccaggcatggaaccccagcagagcagggagcagaaaaaaaaaccgccgtatggaacagagtggacaacactagctgccacccaccaagaggtataacacggggtgggtatcaacgacgaacgtggagaacacacagacacat

SEQ ID NO: 537538 - DNA, 754 bp, Homo sapiens
  misc_feature (180)..(180): n is a, c, g, or t
  misc_feature (182)..(182): n is a, c, g, or t
  misc_feature (198)..(198): n is a, c, g, or t
cccccgggcttccggaattcggctttaggcggagcgtagtgcgcacgccggggtggcaggacttcggcaagaccaactttccggttcggaagcggcgcgggccgcgcggctcctcccctcctctccctcccctgcgttccccctcccttccactcccccctctccccgccccccaacccncngcccccaccgactccngagcgcccgccccgcccgctgctgccaccgggccgcctcgcccccgcgccagcccgcctgggcctctgcgccgccggcggcttcttaaatacaggaaagggaagggaacgtatgtcccccttttaccccatcttatacacatttacctccgtcctacagtcgcatttgcatgcacaagtcactctaccgaaagttgcaacttcatcaatcttccataatcgcccctcttttctctgaaatactgtgttgctcccggactactactacctagacttatctaaacccttactaagaattctctcttgaacctcactcaaattttcctctgccgaaatctttctttcctatcttcccgcctgctctaccctcttatttccctacagactaccttctttatctcgcccgcattctatatcctcactctactattagccatacacgtggcccttacccactcagcccattcgaacgattcccacaatctctcgcatctcccggcctggcttccccactcctatatatattccttgtattccatattatcattacctgtccg

SEQ ID NO: 537539 - DNA, 141 bp, Homo sapiens
agagtgagatgtgactggaggaccaagtatatacggtgagcgcttctcgatgagaactttaactgacgcactacgggcctggctgggtgagcatgtgcaaggcgaggcaaagacaccaactgggtccacagattcttcatc

SEQ ID NO: 537540 - DNA, 373 bp, Homo sapiens
cgaatcagactctatatcatcttccaggcaattgattattgtacatatccctctttgtcactggattatgaattcctatgagagggaggttccagcgatctgtatatatctgtatctccagatgcctacatcacaaaaaaaataggggtgaagctttgcatgtactggcaatttccctttgctctactgatccagaaatagtctccccaatgactgagtagagtatgcgctttcatagtatttaaactacttttgaaaagcacagagcttacaaactttggcaacatggattttcatatcacaaacgcaatcctgggacaatcatatcaggcagacccactccttatctgagggggggatgcagaagatgaga

SEQ ID NO: 537541 - DNA, 991 bp, Homo sapiens
ggcgggacagccagtacgagaccacggacaccatgtgtaagatcttaccgcaaaggggttgtgtctgtccttgggccctcctctagcccagcatctgcctccaccgtgagccatatctgtggagagaaggagatcccccacatcaaggtgggtgccccgaggagacacccctgccttcagtaccttcgcttcgcgtctgtcagacctgtaccccagtaacgaggacgtcaggtgtggtggtctgccgaatccctcaagtccttcaactacccctcgggcagtctcatctgccgccaaggctgagtgcctgtgcgattggaggaactggtgcgtggcttcctcatctccaaggagaggctgtcgagtagaggatgtggacgagcatgccgggacccagaccgactgcgtcaaggaagcattgccgtgatgacaaggtgtcaccagtcatcatcgacgccaagcgcctccatctcccagctcatgctccgtaaggtctcggaatggggaatgacctcacggttttacaggtacatctcacacccatggcacttccccatccttgcgtctgggacggtcattgttggaggactcctccaacatcctgggtgttctccatgtgcaagacgtgccaacgctttatcctgagtagacccgagctccacgtgtcctggagggagaactgagaaaggtcagactactgtgccctgcgctgtcagccggcctgatgtggcgccgtgacttgtgtgagctgtgccataattgaacgaggcagggactgggagagcttgagctgtcatcgaccaatttggcccgtacccagcctctactcctgggctcgcacaaattgcgggacacgggtccgtctacacgggcagaccctcacttccactaaaatcgcgccagcatgtgggtcacacataaacacccaacaggcagccaactagacccaacagcacacccggacaacgatacacacagctctacacagacc

SEQ ID NO: 537542 - DNA, 150 bp, Homo sapiens
ctcgccactgtgatgggggaggcaaagagattcgggaggaagctccttctctggagccgaatctgtcaccgaagcacagtggtctccgtcagctcttcggtcaccctttcttggtgatgacatagagccgaaccccgtcctgtaccaagg

SEQ ID NO: 537543 - DNA, 432 bp, Homo sapiens
gtaagtgaagtgttccagccaggtgtgctaagagagtggcttccgaggggaatgtggatgctggaagaaggaagcaagagtaatagagcgggcaaggctagaggccagcgaggagaaagcgagcaagaggaaaagtagacagaagagagcgatgaatgggcggagcagtaggaaaacagacggcagaacagatagtgtagaggggcaaagtgatcgggagataaagacgagataatggtatatgggcggagaataggtggatagggctacgtgtatgatcatcgcatgtcgtcgaaagagcatagctgaagcgggggagtgaaaggtatgcgcggatagagagaggcaatgtcgcggcagatgcaatactcactcgcactctctctcactctctctctctctctctactctctctctcactctctctctctc

SEQ ID NO: 537544 - DNA, 1008 bp, Homo sapiens
  misc_feature (53)..(53): n is a, c, g, or t
  misc_feature (186)..(186): n is a, c, g, or t
aacaatgaagactatcactaagacacgaaagaaacgaaaccgactcaacagtngcgtaaccaactgccggtcggcccatggtggtgtcccactcagtgtagctggccatctggctcggctgtgtgccgtaacgccgttgagtacggcgcgttttgtttgtacaagcgccctttggtggtcgtgaanaatgtttgctcgctgcttgaaatatcaagttgtcgcgtgttgtagtctgttctctcgtgtactcttcgtcatgagcggtcgtcatgaatccctgaagtgttcgcttccacatgcgaagggcattgttggaacgcacaaatgggggcactggtatcgataagtgccctccgcgcgcacccttgcggtttgcacatctgcgcccaaattctcgtggtcctggacgtggttccaaccagaatagttttggcccgcaagagagtccccccctgtgactggattaataaaacgggggagatccccaaaaggagcgaacccactctggatggctccccgtgccgaagaattctatctgttcagtattgcccgcttgtctggtcaacttgcgcttttatgaagacaggcacatctactacactacctcgctgtcgagagccgcttatatagctgggcgcgtcgttgagcaccgcggataaccccccttgtataagcggatatgtctggagatcacggtggagttagtaccctggtaaactctttcccggggggcgacacccaccactcttctgaagattccccccttgcgggaagaatgcccgtcgcaacttggtaagtgctgcgtatgacacagtagatatcgctttatccgcaccctcgtgtctataaacgccgggcagttccctcgtccccttttaacaagagtagaatgggggctctgtttctgaaataagcagctcctcttctatagcgaaatgatagaatttaagtcgggcaccccatctttcctatttcgaacacaaagaaaaaacccccaccaaataacac

SEQ ID NO: 537545 - DNA, 641 bp, Homo sapiens
  misc_feature (24)..(24): n is a, c, g, or t
  misc_feature (83)..(84): n is a, c, g, or t
  misc_feature (110)..(110): n is a, c, g, or t
  misc_feature (173)..(173): n is a, c, g, or t
  misc_feature (199)..(199): n is a, c, g, or t
  misc_feature (234)..(234): n is a, c, g, or t
  misc_feature (264)..(264): n is a, c, g, or t
  misc_feature (289)..(289): n is a, c, g, or t
  misc_feature (295)..(295): n is a, c, g, or t
  misc_feature (315)..(316): n is a, c, g, or t
  misc_feature (320)..(320): n is a, c, g, or t
  misc_feature (339)..(339): n is a, c, g, or t
  misc_feature (352)..(352): n is a, c, g, or t
  misc_feature (363)..(363): n is a, c, g, or t
  misc_feature (368)..(368): n is a, c, g, or t
  misc_feature (381)..(381): n is a, c, g, or t
  misc_feature (445)..(445): n is a, c, g, or t
taacgccttatgatgaattggttngaagggcattttctttatgaacaaaggctgggatgcatattcctttctttctggtgaanngggtattatccctgaggaaagtggcncagtgaaaaccagtctggttgtgacccactacatgtttggttttaatcactattacctgagtngaacttggctcaccatgttggtactngtgggtctggtaatgaagttgggttgatgccatcnttggactggcgaagcgtaatctggggtatnacttagctctcggcggatctcagtntggacngtgtaacaacaaaaccaaanngggngggacagacttctggggtntggtaaatataanctaggacagtnctggnaggttggtccagngtgctaggggagtatttccttaaggtaaaaacttcacttaacagagagattctttgttagcagntgggagggggtgactcaccgcgtacgacactactttcagtgttgccgcaaggctcccacagaacctatcagcgggccaatctgacaacccttcaaaaacaacccggttccaatatctccctggttactatcaaacccttggccaaacttgcgccccgacaacaactggggcgcccacgacacaaacaccggacaaa

SEQ ID NO: 537546 - DNA, 302 bp, Homo sapiens
ctcctaaataaaagtgtgcagtctctattagctggagtttatacgtgctggttcatcgtgagtaagaagcctgccttgactgtacctgggaagatgccatagttttcgtatactggatgtttggagtagatactggtctgtgattggtggaatggagaacacacgtgttggtgcttctgggtagcactggtttgcattagtttatgtttccatgccagagtttgtgtgggcgggcgcatgtgcaccacagagtgcactcgaggggactttcagtcacaggatttcataattgtcatcgtcac

SEQ ID NO: 537547 - DNA, 1365 bp, Homo sapiens
  misc_feature (185)..(185): n is a, c, g, or t
  misc_feature (509)..(509): n is a, c, g, or t
cgatgataccttgatctgtctcgaggaatagtagtatttcgactacgacaacacaatattacaccctatgtgatgctcctagaaggtatattgactatcgctgctacatcaatagcctacgtgctccctaaccctatcccaagacctgacttccatcatatagtccgagatagtgtggtggcacntcatcgggccgatagcatagctcatattgtcccgcactgacggtaacgactggctgagatgagcgtctctagcacgctctactagcgtaatcatattattacatcacattgctggtgcactataactagcgatccatggaactaagatcataccttaccgaaggtgtatacagacgtaaatcgcttactactagaatgttctcattagttaaccaactaggagcgtgaaccgtatcccatcgaaatgatagcgattcatgtgtagcatcccacaacgagtgaacgccagagtaccttaaattgagttaaggcattcgattcgcncagtcgatactataacatgggtctcttaaaccgctagaaatctctagaacgatatccaaagacctagtgatgatgcatcgctatcgcgctcgagaggtctatctttactcgttacgggtatccacacatttacattacacctgctcaccttcaacatagcgtacactaaagaaagttaaactttagggcgtccccttacactctcccaatccaacagcatgccattttgcgcccacacggctcagacagcgcatgcattcttattcctcacgatacggtattcaaggacatttatatctaaccgcaaaggagaacacttacctcaacacatcaataccttagggtggtcttaggttcttatccgcacattgaaccctaaaaatgccctcccccgttttgatacaatttcccgtcacaacttaatttattacacgtaatgaaaacaaaaccattgttaaacccatgagaacttacaaaatgaggtttttttccaaaactatttccccttttcccttttccgttaaaaaaaccacacaaccaaatttattctccacctcacactggcgcacaccccacaatttggcgttacgcttgtaattccatactcggtgccaacccttggtgacgttagtcaccgcgaacatagattccctaaaagttccgaacgaaacaatggtgcccaattgtgatacccctgtacaaagttgagcgtatgtaaactcaggcaataatgcgcgcgaattaagatatcaattagcataacggcggcactttaaatttaatgatagccatatcgcctatattgtacccaccacaatgagggttcgccacacttagcgaccgaaatgtttgagaa

SEQ ID NO: 537548 - DNA, 623 bp, Homo sapiens
ctggggaagtgatggtgtggccaggcagttatagattaaaggcctgtgagtactgcaaaaaaaaaaaaaaaaaaaaaaaaaaaaactgtgtttgtgggcgcgcgcccgtgggcccccgagaaaaagttttttagaaaccattcgcgttgtggggcgcgcgcggggccccagagagggtatagggtgaaaccgtgtggccacatagcggtgtttccctagggagaagatctctgggggtacaagagagataaggggcgtgtgggagtattatcaccagcagatattaaataaaagcaggccgggggggggaaaacacgagagggcggtcttgtggaaacaatattcaagatattggagagatctagtaggaggggtaaattaaaggggagttctatattaaaaggaaggagtggttcaaaggagagacgccttaagaatatctaaaaaaattataagagcccgcgcgccgctggggggaaaaaaaaaaaaagaaaaagaaaaacaaaaaaagagaaaaaaaagcaaagaagagaagacaaagaaagaaaacaaaaaaagaaagagaaaaggaaaaggaaataaaaagagaaaagagagaatacaagaatgaaaagaagaacaag

SEQ ID NO: 537549 - DNA, 112 bp, Homo sapiens
accttcccgatagtctgaagatgtggaagagctttgcgcttgctcctcagggaactccggtacgcatcgggaaagagttgctgccagagacagctgttattccagaagcaaa

SEQ ID NO: 537550 - DNA, 871 bp, Homo sapiens
  misc_feature (2)..(2): n is a, c, g, or t
  misc_feature (147)..(147): n is a, c, g, or t
  misc_feature (182)..(182): n is a, c, g, or t
  misc_feature (230)..(230): n is a, c, g, or t
  misc_feature (259)..(259): n is a, c, g, or t
  misc_feature (289)..(289): n is a, c, g, or t
  misc_feature (350)..(350): n is a, c, g, or t
  misc_feature (380)..(380): n is a, c, g, or t
  misc_feature (422)..(422): n is a, c, g, or t
  misc_feature (460)..(460): n is a, c, g, or t
  misc_feature (463)..(463): n is a, c, g, or t
  misc_feature (493)..(493): n is a, c, g, or t
  misc_feature (520)..(520): n is a, c, g, or t
  misc_feature (524)..(524): n is a, c, g, or t
  misc_feature (615)..(615): n is a, c, g, or t
  misc_feature (617)..(617): n is a, c, g, or t
  misc_feature (649)..(649): n is a, c, g, or t
  misc_feature (667)..(667): n is a, c, g, or t
  misc_feature (690)..(690): n is a, c, g, or t
  misc_feature (693)..(693): n is a, c, g, or t
  misc_feature (748)..(748): n is a, c, g, or t
  misc_feature (753)..(753): n is a, c, g, or t
  misc_feature (780)..(780): n is a, c, g, or t
  misc_feature (784)..(784): n is a, c, g, or t
  misc_feature (837)..(837): n is a, c, g, or t
tntaactggatagtacaaagtttgcctttgtttgttacttaaaaaacgtactttccgcatactgttgcccgtatgactttcctgtcccatcggaaaccagagtttccccaggcgagcccttcctatctgcggttacatgatttagcnaatttaacaagaagagagtaattcctttgattatnatcaacatgaacttgacaatgtctctataagggggaacactgattttntttttccttttagaaacaaaaaccacccncctattaacccaaaccacggcattgcattnacaacaatcatcgcaaaaacggaacaaacgaagttaccaccccaagggaataacagaagancggggcacaagggagcgacgggggacgcgngggcaaacaaggggggcacagcaaccccaccccacacacccngaccaccgcggcaggagggaccagacacagggccaggngcnagggggggccccagcacggggaaccgaagngacagcaacacaggcaagaaacggcgnggcnaggggaggcgagggacaccagcccacgcgccgggggcagcccagggcccccaaagagcccggacgccacaggccgcggagcggaccacgancnaaggaaaggggcaggccatcctaacagtgggnttttccccggggagaacnggccaacagtcattgcctcaccnccntagtatgttgtttgaccagagagggacagggcggggaggaaaaccggggcgccgngggcngcagttccagccgcaaaaacgggagtntccnccgacgtccgtggcccgccggcccgaaagggagaaacacggagggaatgccancccccgatgtcagaacccgcaccgccgaagattt

SEQ ID NO: 537551 - DNA, 331 bp, Homo sapiens
  misc_feature (43)..(43): n is a, c, g, or t
  misc_feature (70)..(70): n is a, c, g, or t
  misc_feature (88)..(88): n is a, c, g, or t
  misc_feature (234)..(234): n is a, c, g, or t
  misc_feature (243)..(243): n is a, c, g, or t
  misc_feature (289)..(289): n is a, c, g, or t
  misc_feature (306)..(306): n is a, c, g, or t
  misc_feature (323)..(323): n is a, c, g, or t
aatatgtcagctcaacaggaattctatcataaccaggtaaagnaatggaggcacaaaatctgactcaagnaacatttgtttttccttntctgcatactcttggttttataatgtataagattaaatttgagtaaaaccatcagagatagcccacgtattaagagatcagggcattggtagtacaaattagagtctgtatattctttttttcagtataatattgtgtgactttgncctattttntcaatttctctaaaattcagtgttcacatatttaatatacatatantaataatgcgtaacagntatacgtttttgagganttataaat

SEQ ID NO: 537552 - DNA, 331 bp, Homo sapiens
  misc_feature (73)..(73): n is a, c, g, or t
tctgtgactgactcttgcccgcctgtgactgactctgtcccacctgcaccgactctgtctgcctgcgaggctncccgcgcaccagccagtcctcattccctccctactgcttttttttttttgaaacagggttttgctctgtcacccaggctgaaatacaaaagtgcaatcatagctcactgcagccttgacctcctgggctcaaggaattctcccacctcagcctccttgggagctgggactacaggcacaccacgcccagctaattttttgtatttttggaagaggcagggcctcaccatgttgcccaggcgtggctcaagccatttgc

SEQ ID NO: 537553 - DNA, 518 bp, Homo sapiens
  misc_feature (200)..(200): n is a, c, g, or t
ttgtgcctgaacggccaggtctggagtttctggaaacctaaattggcattcgcggcttttgtcggtaaatgttcagtttttagctgcacccggggccagtttttcagctctgagaagagctcgtccacccgcagccagagcgattgtggtggcaacagcgggcgcatcggatcgacgccgcgattctcaaaacgcgccantgttcagcctggaaacgttcggcactggtttccagatcgccagtattcacgagcaaggtattggcagggaaataactgaacagcggcggcagtggttcgctgaagaacaatggctgccagtactcgatcccggcaggtaatgtgcctttactcacttgctggtaaatatgttctggatcgcgcttcacttcgaaggtatcgcgccactggctgcggaacagttcaattgccgctttatcggtcggaaattcgtgcgcgggcagcagattgatccgttctacttcctccagcgtgcgctggctgtcgacgtaaacaccc

SEQ ID NO: 537554 - DNA, 208 bp, Homo sapiens
  misc_feature (179)..(179): n is a, c, g, or t
  misc_feature (197)..(197): n is a, c, g, or t
ggttatatagccgacgccaagaagacgcacggccgtgaagcattcaagcctccagggatcacatcaactctgggcacctctcacagcaaaccagtcatcactctgcaaggtaacctcaccaccgagacacgtcttcaagaacgggggaaggcccgaccttctttccatgacagagaacnatgcctcttgcggtccanaacctccccac

SEQ ID NO: 537555 - DNA, 129 bp, Homo sapiens
cctttaaatcccacattttgggaggccgaggtgggtagatcacgaggtcaggagttcaagatcaacctggacaagcttgccagagtgtctcaggctgttcattctggaataagcaggggtgatctttat

SEQ ID NO: 537556 - DNA, 562 bp, Homo sapiens
aatagcgcgtctagagcggacaacgccatatccgtaatttctctcagagatgctggctctggtgaacacatggctaactagctccattgtgttattattcgaaactttcttgggagggatcttatggatggatacgtccgattaatctctgacagatgaagccgctcgttcaaagtagttgcgcgatcttttgtgctaaccaccagttgatttggccacatttccttagtgttctctctgtgggatgtgtgaacgaccactcgtggcatatccttcaggaaggagtagttaggacagtagtccctgagttctcgtagaattcaaacttttttttcgataactttgatacttgaaagacagatgggctggctttaaaattcttgattcagatggtccttacctttcttgaaaacattgttccatccttgtcttgctttgcccgtagctgttgataaggctgatgccactctaatatttattctattaaagtgacttggtatttttgactggaggccagaggtttgtttcttcctcctcttctccttatctcctctctcctcct

SEQ ID NO: 537557 - DNA, 517 bp, Homo sapiens
cgtagatcataggtgcagtacgctgtctcagagtagacaagagagactagtgaattcagtaggcgatgtagtgatcaggctctcagggtgataatcccagcacttagggagatcaaggtgggagagatcatgatgccaggatgtcgagagcagattaatcaacatagcaagagctcatctctaaaacagtaaataaataaaaagcaaaaacttgtgtgaatttgcaattctatttaacaatatacccaaatgatctcggccttcacaccatcttcttggaaaaacctctgaaccatgagagcctagtggaaggaagcgaatgcgcaggctgaaggcgcaaaagaagaacagatgaggcagaggtccaagtaaacccacaagcttatgcacccatggaggctacaaggagcagaaacatggaatccagaggctggggatgctggtacagttatggggctgcatctactgtctagagctgtttcagtgcatctagaacttcaactccatctggtcgcca

SEQ ID NO: 537558 - DNA, 82 bp, Homo sapiens
  misc_feature (43)..(43): n is a, c, g, or t
  misc_feature (45)..(45): n is a, c, g, or t
gatcccatttaatatttaaaaaaatcagtagcacaaatatatntnaattgtcaacttacaaaataaaatacatttacagtct

SEQ ID NO: 537559 - DNA, 191 bp, Homo sapiens
aagtcctggacttctgcaggcaaagtggaaactgaccccacggagcttacctgttcctacatctatctgcagctgtggactattagagggtgtaatgccctgacccggttttctaaagtgtaatgtatgaaatattggttttatactaaaaggtgttaacagtaggtcaacttccaataaattacctgctt

SEQ ID NO: 537560 - DNA, 152 bp, Homo sapiens
tgtatgctcctctagaccagagggctctatggggtggatgctattgctgcttttccaggccacagggcagtcaggacggagcctcagcacacaccagctggaggccggtgtccctgcgcttggaagtgggttcccgtggccacgggggttga

SEQ ID NO: 537561 - DNA, 292 bp, Homo sapiens
atgtcccctagggggcaactcgccggttagggggggcaggcctcctagggagaggagggtggatggaatgaaggggtgtaagtcatgtaagctaggtagcaggtgcgaaatagtagtagggtcgtggtgctggagtaaaagtagagtaggtagaagtagagtttaaggagggtgatggatggctatgatggtgggtatgatgaggctatggtgtaaggtgactacttcgagaatggcccatttggacaaaaagccggagaggggacatcccgctaagggtacatgggtaccg

SEQ ID NO: 537562 - DNA, 497 bp, Homo sapiens
  misc_feature (193)..(193): n is a, c, g, or t
  misc_feature (200)..(201): n is a, c, g, or t
aggtagaagtgactatgaaactagtagacagggcaggatagtttttcaaaagaaggaaaaaaaaatatactgccactcaaaatgagtcttcaaacaaaaatcctacacataagataaagacaaatgctaacaaaatcagcaactgggagataagtttacctaaagactaaaacactacaacaatctgaaattnagtttannattagtgcatgaggaagcttaaagtgataatgaaaggaagaatacctcctccctcaaatactaaacaaaaacaatcaaacagagaattagtaagttaaacgcagtgctaagaaattgatctgggacacaatacagggagaaaaattcattaaaaatgtaccagagcagttgagaaatgtataggataagttgtgagggttttataatatacaacaggagccccaaggggagagaagagaagaaatgagagagaagcaatactaaaaaacaaaaaataaaaatgaactgtccagaat

SEQ ID NO: 537563 - DNA, 497 bp, Homo sapiens
tctgagcaagcggggaacagaggagggttagtccaattcagtctctctcctcgtgacccagaagggtctctagggaccctatgtctcacaggccaagtctcatctcacatgccacgtctcaggtgaggtgtcagatgcccggtagatgcatgcagaagtagcatcaccccaggggtaccgcaggacctcgcggctgcctcctccttcagcagcaaccacattacaattggggatgttatgggaaaccgcaattccatttggcctggtagagaaaatgggcccccaagaatggtgggtcctatagaactctggagctggagtccattcaaggtcgggctcggtttcttctgggctcctcatctggaggcaggaagtatctccaggcagagggagaggagctattaagtcaacagtcaaagggtgaaaagacaccaagtgggtgactttaccggcctactagggccaggttatcccacaataagtaaaggtatgtaggg

SEQ ID NO: 537564 - DNA, 337 bp, Homo sapiens
gaggtagaagacattgaataaataagaagttatttatattgtactcaacaagtttaattgaatgggattgctggggtaggcactgatggaattgataatggaggtagtgattagggattcaaatggttgcttcctctatttaccacatttttttttttagatttattttggcccttgatctcattctcctttgcatgctttttttcttccttttgaatttagcaatttgtggctaggcacagtggctcactttgggaagctgaggtgggaggatcacttgaggttaggagttcgagaccagcctggctaacacggtgaaaccctttctctaccaaaa

SEQ ID NO: 537565 - DNA, 260 bp, Homo sapiens
ggtggatctagaggatcccggctggggacagcaggactcggtttaagtgtcagaggcttagaggggtcagctctgaactagaagtctctcacatgctatggaaacttctaaaactaggagtttcaatagcattctacccacgttaatgtccttttggttcctagacatggccaaaggtttttttttcttttttctctttggttatggctttcggatctactataaaaggcttttcggctatggaaacttctaaaactagg

SEQ ID NO: 537566 - DNA, 124 bp, Homo sapiens
ctggctggtgaagattgttcgaagtttacagcatttcagcgcacaacgcattaggcgctataagtggggcaggatctctttgcgtacaatgtttctcccaatcaatataccggaaaacgtgcat

SEQ ID NO: 537567 - DNA, 329 bp, Homo sapiens
  misc_feature (11)..(11): n is a, c, g, or t
  misc_feature (241)..(241): n is a, c, g, or t
taagccagaancgaaaggacaaatattgtataattcccacttgtgtgagatatctagtgaagtcaaattcataaagacaacagataaaatggtcaaaagaggtggggggcagagggaaaaggaggattattatttattgggtacagaatttcagcttgacaagatgaaaaggggtctggagatggatgttggtgatggttgcacaacaatgtgaatgtgtttaatgccactgaactgcacncctaaaaatgttctaaaatggtacatttttgttatgtatattttacaataaaaaatgtaaaattaataaaagaaaaaaaagtaaaatc

SEQ ID NO: 537568 - DNA, 409 bp, Homo sapiens
acccacgcgtccggttctagatcgcgagcggcgccctttattatttttattattattatgtttatttactctcctttaaagagaaatttattgaacccggttataccacgcagtaggtttgataccgcggacataacaactcccttaataagataaggcacaagacaaaaaagttaatcttgattagaaacaagatacaccaccatttatggtcttcaaacattatggcacttataactttcgtataagttggacaacagcattcaacgaaacagtcgtggcagacatagtttcaacagacaaataacaccgtgtaagcagacatgacgtgctcctaaatggtttatcaagctattgaatttgacaaactttactaatataagcggtaccgggggacgctggaagagta

SEQ ID NO: 537569 - DNA, 129 bp, Homo sapiens
gaaataagcagttgaaaatcagctgaactaagctttggtgcatctggctgaactgcggggatttcaaatggaaaggaaaatttatgaatgtaatcaggttgagaagtctttcaacaataattcctcagt

SEQ ID NO: 537570 - DNA, 451 bp, Homo sapiens
gatgcctgctcggaatggtatattgctgatctcaaaaaatatggagagcgattatgcagccttgtcataaaattgatatgatgtgccatcttgcagatgtggtagccgactaaaatgactgttaattggacacctccaaaagttcttctgagagttcttataagtaaagtatcgaactgcaatatatgtggtttataaagaaatagctattggggttagcattgcacaaagcccagtttctttctgtgtttgaaaaaattttgatccccttggaatattaagaggtcaacacgtgattgttgtacgtacacattgtgctctggagtgcctatttattgaaatcattgtaagacctgttataaatttaagtctatttaaactaactgtaatatacatccataaaatcatttaagagtcttttatttataaataaaaatcacttcattttcaa

SEQ ID NO: 537571 - DNA, 120 bp, Homo sapiens
taacaacactagcaaacgaaatattagagaaggtaggagtgtagttcattgctcagctacctcagctttaaaatggagagaataagccaggcatgatggctgacgcctgtcatcgtagca

SEQ ID NO: 537572 - DNA, 373 bp, Homo sapiens
aaagtttgaagtaagtacaccacctcttgtaagacaaaatataagaggtcatacctacttagatgtgtgaaaaacggcctattctacaagcgggggctgggaccagcttgagttggctgcaattgttaacctgaatggcaagagggcggtcaagtgaggtccattgtctaaaatagagcagcgaatggacgatcactagagacagcgttaggaatccattctcctgtgttcgttaaacaaacagtggtaggttaatgtgttcagaagtcgctgtcctactactttgcgaagatggaagtccaacaccagagattttcagctcaattgtgttaacatttctaagccttgttgcagaataacgggcattagcaat

SEQ ID NO: 537573 - DNA, 1076 bp, Homo sapiens
tggagacaaagtcaaagaattatcttgaaaaacatggacataaggccctactcaatacatgccgcatggggtacaaaccacgagagtctactacatgattactaccatactattacctaggtgaaactctacacttactgtatggaacaactcccagataagatctggatgctggagacagaggatgctgcttgtattccatgggcttattattcaactgatggatcaacgttaaaggacctcatactagtggtagttatattgagcccctgtatcgtatcgtcgaatgaccttaacttgacagtattcaatcccagaaggaaactggaatatgacctgtctgtcctctcagattcagatgagaatgaatcttggtacttaaatagataataatgaaaatatactctgatacacctcgataaaagtaacattaaatgatgatgaggaattttactagaaaggaataacataggtgcatgctattaagtggaagaagtgtatggagaagcctataaggactcaataatgcacgtggcgagatgcaagtcaaattggtatctagcatgggcacatcgcggccaatcgcaacattagactttacacaactgtcaccatttttccactggtcattatcttccaatatcaagcacaggggcagtttattagtctctggatgtctttgacatgtttccgctggaaacataaccgcaaaaccgtagaaattgtttccaagaatcaccttggaaccttggttactccatctgccatgtgaaccgattcaattcatgctggcaatggaaaccacttaacaccgttcttaccaaaattgaagaaacaaatcttggtgactgaaatacacttggggaaaacgtgggaaaaagaaaaaaagccaagatttcattaacacaggttgttgaaacgtgtaaaatagaaatggtactttggaaatgattttagctttaaagaacgactgggagacatacacgtttgtacacttgtggggggaaacatactaagtgttggcaaggggaagttccaaagaacatataaagggagtaaagaacggaagttggtga

SEQ ID NO: 537574 - DNA, 948 bp, Homo sapiens
tgagcggggtgggcacggcgtgggacgtgtccgcccagaagagggcctgatgaggcggtggcggtgcccccaccgcatgtgcccgcggcgccctctgcaggccacagtgcagcgatcaccagttgcctcatctttcctctcctccctcttggggctttcctcaggccacattttctgtgtgtctgggcagtctactcagcctccgactccgtgccctttcttccacttccaggccgggcgtgtaagtgtctatcgctggtgcaacactgccaataaagtcattgcttctatctcgctcccaagatccaccgcctccccttaagcaccgcgagatctgacgcgcgcggctacccatggcggcggcatttgaatgcctcgcggagccttacccagcagctggccgactgctatgccggctgatgcactgtggcacgtgcaggtcccggacccatgagccaatcatccctgggcctgctgacggactcctgcggaccgctcacggactctcatgaaggccctgtggaccccagcaaccggagcgactagtgctacgttcgcctgcgacgcttgcctggacttcgacatttcacccattgcattgcaactcaccgcggggacctggtcagccttgtcaccgtggagccctagccaaacacagaggactcagggacttccgaagaaaggcgcccctctcgaccctggcgtttgcaagacttcgacacgggccccaatacccatcgtataagcgcttagctgtcattccacaggcgcatccgagcatatccctacttgtcatccaaccgctatttccagcttcatccggccacacctgtggcgcaaacaaccctcttggtggatgttacactccacctcccactccgccgttacttgcgcctctcctctcttagctgccctttgcgagaagcgttcaaccgtaaccccactacg

SEQ ID NO: 537575 - DNA, 227 bp, Homo sapiens
ctttagcggagcaggctgggacgcaaacaacagactggaaactacaccaacaggttatgtatggaaaagcgtcgctggaccaacgacctttcgctacattggaactcattcgggcgaccagtggcgtgaagtctgcgaagatgctccgttactgatgctcctgatgctccgcttactgaactccgttactgatgctccgttactgaccgcttactgatgcccgctta

SEQ ID NO: 537576 - DNA, 197 bp, Homo sapiens
aaggttcgtatcatatggccttatataatggcgtcatactgtctgtgcttggatttagttgggtttaggtttgactgctttcactcagcataattattttgtgattcatctgtgttgtggcatgtatccaatcgttccattccttgtcattgagttaaaccgtaaggggtgaaccatagctcgcatttcgtcatcct

SEQ ID NO: 537577 - DNA, 354 bp, Homo sapiens
ttttactctaatctggctcccgagtgccaaggaggcagtcacggcagcggacatcatggtgacggagcggatccgggagacggatgtggccgagaaaataagccacatctgtagaggaatgaagtcacctgaggagatgcgccagcaggcgcacatccaagtagtgagtacggaccctggtcagccaggcacaaccaaccatgcccccttgctcatatggggtgctcgcaccatcaggcatgggtacgcagtgcagcacaggcatcgtccatgtgcaaactgtgggaaacacttggctgactgtctcggcccactatgggcccaccattatggcagggggcatcctctcagaga

SEQ ID NO: 537578 - DNA, 623 bp, Homo sapiens
cgcttgtcaatgagccattaaggttctggcggggctctcagtccctggcataagccccttgtgatgaagtggggcttgacggtgcttaactccaatgtactgggttcgtgacgctggaggaacgccctttgtcctaaacacgttttggtattactaagggaacatggatgcccccttgagctcctgcggagatcctggtctgctgtagggacggacggccctcggagagccccccaccttactttggccttatcctttttggtttttttctttcttttttttttttttgagacggagtatttgcatcttgttgcctaggctggagagcaatggcgtgatcatgccactgcactatagcctagggcgacagagtgagaccctgtctcaaaagaataaaaagtaggtcgggcacggtggctcacgcctgtaatccaagcactttggcaggcacgaggtgggcggatcacctgatggtcaggaattcaagaccagcctggccaacatggctgaaaccccgtctgtgcataaaaatacaaaaattagctggataccagtgggcgagtgcctagtagtcccagactactccaggaagggtgaggctagagaatcacattaaactctga

SEQ ID NO: 537579 - DNA, 152 bp, Homo sapiens
acgggattccatcttcatgcgcaccactgcggcggacggttgaccactagccaccacatcatcccagagctgagctcctccagcgtgatgacgccgtccccaccagctccctcttcgggtttttcatccttcggtcgcttcactgctgagtg

SEQ ID NO: 537580 - DNA, 242 bp, Homo sapiens
gcgaggacaccgtcaacatcgctaccccgatgaccagtcattgtcagcctgcaggaagcatcatcattctaccggagggacagaccagcaagacatccccagtgagcaaccactctgtgtaatctacgaattcagctggcagaacaataaataacgaagataacttccattcagcaaagcctatgacattgaacataactgtggtcataacctctttcttcacgtatacatgcaacactggt

SEQ ID NO: 537581 - DNA, 100 bp, Homo sapiens
tcagcatccttactcacagtagcatccattcttcacactgcatccccagcactgtggacctatcaggtaggtgacaggagccagcagacacatgacattc

SEQ ID NO: 537582 - DNA, 315 bp, Homo sapiens
gcctagaggatcccagattaagtcctacgtctgactgacacctttagagagtgtcaatcaagacgtaggacttatatccttctgctcatcgagtgatgatacgcccgagcagatgccaacacagcagccattcaagcaatcctatacaaccgagatcggcagatatcgtgttttatccctcgcctatagacatgatttatcctcacactcctaactcatgcagacccacaagcaaatagtcccttctaaagcgctaagtccaagacctacaccccagcgtactacggcctcactcctagacaggcagcagagcaa

SEQ ID NO: 537583 - DNA, 373 bp, Homo sapiens
gaacgcactcacagtcgcgtcagaaccctgtcgggaggtcttcaaactctactcccactggggggttttggatgacctggaggaagcctcggtaagctcgcattgccctgcgatattaacctacggggagaactcgcggtgctagtaagccgttctcctgatgaaatacgctttcctggcttacaggactcagcatgctagtcacagccgaggggtccctgacagttttaccacagcagaaggggggtcagtcacccaccgcagtgacaacataaaaccctcattggcaggagaggacaccctcagggtcatcacccatccgccattctcctcctatccctcaaccccgacatcattgcggggttttcctctt

SEQ ID NO: 537584 - DNA, 359 bp, Homo sapiens
agactcagaggatcccctgcgggtctcatattaggtaaagcctaagactcctgagccactttatatgtaactggctaacctaggctgggggcttgaactaagtaaagaagccaaggcagtcagatactagatagcagagaagtacgtctcatactaaaacattgcaactactgttagagtccaccccatgaagctgtttcagatagtgtatcttggactgaattctataagtatatataggtacagactaaaacaaatgtggctagctaggtgggctgtgctgactcagtcaggacattgacagactccagcttacaccctcgggagacctatggacctaagtgccacatgcattatga

SEQ ID NO: 537585 - DNA, 470 bp, Homo sapiens
atccccgatgagtaaaacttggtcacaacctccacccgcggttcaatgcaattctcctgcctcagcctcccgagtagctgggattacaggcatgcacaacacgcccgttaaattttttgtatttttagtagagacagggtttctccaatgttggtcaggctggtctcgaactcctgaccccaggtgatctgtctgcctcagactcctaaagtgctgggattacaggcgtgagccagcgcacccggaacaggaggttattatatgtagggtgctcaaggcagacttctcggttaaaagcaaaggcagaacaaagaccccaaggaaatgaggaagcccagctagaacagatttctggaggaaaagacttctaaacagaggaaaagcaaaagcaaaacgctctgaggcaaaactctacttggcacattctaaggaaagcgagagggtcagaatgtgccaagatttactcatcg

SEQ ID NO: 537586 - DNA, 123 bp, Homo sapiens
tctagaggatcccatgattaactataatccattgctgaaagatggtcaccaggcaccacatccagacaaggtactgtacacacaagattccacttccctttgcttgaatccttgggcctttgg

SEQ ID NO: 537587 - DNA, 711 bp, Homo sapiens
  misc_feature (645)..(645): n is a, c, g, or t
ttgctactggcagcggaagctctacctggcaccagaaacagagcatcatcctgcctgcagagcctgtgtcggggtgcacctgcagcgcaatgagcttcagccagatgatctcggagaatgcagaatggcatgaatcagaaggacgagtggaatgccctgtgaaggcctgcacagatgcatgtgtgcgtgagtgatgggctggacatggtgtcatggcgtgcttggaggtgcatgcagtgttagcttgatgcatgtggtgcctggatgcctatgcgtgatgtgatgtgctgtgtgcatccgtgtgcattctgtgatgccgtgatgtgtgcatgccatatgttgacatgtgtcacccccatagaagcagctccatctaccttgatgaatggatgtgccctcaatgcgccatgatgtaacgatctcttcctcagcctccatgaaaaatcctgtgtgctgtgcttgaaatgttcatcgatgtaaatgtctcccatgcatgctcggtgtatgaatgctgttgacgtctgcgttctggcagaatgatggtgcttgtgatgcatcggtacaatgttaccatgaaacgaatacatcactcacatgtaccttgctaattgacgtgaggatgtgccactacagaatgataccttntctcagtacatgtgggtcatcctcagtgatgacaacgggtgtagacgtcatcgcttggaaaggacc

SEQ ID NO: 537588 - DNA, 101 bp, Homo sapiens
tcgcgaacgtgttattcagaataggtaaatctataggagatggagaagaaagcagatccatggctgggtgtgctgggtagaggggataacacgttcgcgag

SEQ ID NO: 537589 - DNA, 524 bp, Homo sapiens
tcgtcacagtgtagtacttttgttctaaagagaaagtgatgaacaatccaaaccttctgcatccagatgttggactccaacgtttctactttatcgtctcctggtaccaccatatcctgatgcagtcactggttcacgtgtctgagtatgaacataccgaatagctgcccgagccatccatgaaggggtgagtaagcccgtcattccacgtgccagggtaggagggaggataggacgggtagtaccacgagtctgagcaagggtgtggccgctctattgctgccacacaaatatcctagtattccaccgagttcccaagcctgtccagaaccctggtcctgagtgtgcatgatccttgtagtcctgtaaaagcactgtcgaaacacagaagttgcagcatggccagtattctgtggtcctgtgaactcagacttaaagcctgggggaaggaggtcctgctgagtaggcgcatctctggtaacggtgggaaaagggaggatactcagagtacggagtcgctatgg

SEQ ID NO: 537590 - DNA, 184 bp, Homo sapiens
  misc_feature (80)..(80): n is a, c, g, or t
  misc_feature (142)..(142): n is a, c, g, or t
ccacctccgccttcccctacgcgctcctgagcaacgacaatgccttcctgagctaccacccgcaccccttcgcgcagcancgctcaccgcgcgcttccaggtcaacaacacccgcccgccgcacgtgcagctgttgcgcaancggtgcttcacggccatgggggtgctgggctgctggatgagg

SEQ ID NO: 537591 - DNA, 131 bp, Homo sapiens
  misc_feature (22)..(22): n is a, c, g, or t
gtgactctaccgatcctaaggnacacggcttcgtagacaaaaagtaaaacaagaactttatctttggcttttaaccatctcatacaaccagctacttatagtacagctaagtacatacaccaaaaagttac

SEQ ID NO: 537592 - DNA, 760 bp, Homo sapiens
caggctgtaccgcaccggagttatgggatctccggaagcctggttggcattgacaacaaaatcgagcaagccatggacttggtgaagtgcacctcatgtttgcggtccgggagtaggtggaggtgctgaaggagcagatccgggaactggcggagcggaacgctgcgctggacaggagaatgggctgctgcgcgcctgggctagccctggagccaggctggctcaggtgcctccgtcgggggtcccaacggctttggggccccccttgcgcccaaatgggccctccggtctgaagcctccctttccgctttacaagttgttgccttttggcggcttgcccgggccttgcgtcaacgcggtctttgccacccttcttatccttagttagcaaagggcttttaagttgtcccccagttgtcccccggcggctggagcagttaccaaggggcgtcaggtaacttgggccctgggtcccccccgggtcccgtttagccctagtcttcccttcgattcaatccccccagccgttgcatgccggggaagagcgtaagacggcttttccggatgtaccgctggggcctgaacaaggcgagcggaaggcccccctctttcattgtcatggggtatccccaaatcccgaaaatcacttacgccttactgttggagtgaacacgccactttatctaagttatagaacgaggcttatggcgcgacaacattcgtagcaggcatacaccgtggtaagaaatacccgcaaaac

SEQ ID NO: 537593 - DNA, 384 bp, Homo sapiens
gtagaccagctcggcggcacgtccaccagcagtcgaacgccttcaaggggacccagaattcgccgtagtggttgagcacatacgggtcctggcggatgtcctgcaccgtggatttatgccagggccgggtttcggtcagggtgtaattccgggcttcggcaaaggcgccttcggcatgccaaggaacatatgggtgaaggtcaactgagcgatcacgagcgcaggcaggcgaagggtgtgctcaacgggccgggatcgaggagcaactccgactcctccacgcgtacccgttcgaagctggcgctgcgctgtcggtctggcgctgccaatgttgttccagtcattgtgcagggtgatgccgctgcgtccgctggggatggcggc

SEQ ID NO: 537594 - DNA, 111 bp, Homo sapiens
cgctcacaacatgccaggttggtagatgtgttgctaaaaactgcacatgcacgcaaccgaacacccttacatttctgcaaaagggttaaggaagcggcttactccatgtat

SEQ ID NO: 537595 - DNA, 348 bp, Homo sapiens
gatacaaggagctatggtatagtacacccagagctgataacaacggccatagctattaagagatcctctcaccacagataccaaagtgctgggattgaggtgtgatcatggcacccagactttgctgcctttcttacatgatccaggcccagaacccaaactcaggcactgtataaataaccacttacgtaaactaatgacctagcttgttgccaatagttgattgaacttcccataactccacttcgtgtctgtacctctgtatacagacaccttctgtacccgtcatgagccttaaggtctccatttagcatattgcaaatactatgttccatgtaaggtagctca

SEQ ID NO: 537596 - DNA, 235 bp, Homo sapiens
aaagggtttccaaaatgccagcattccttcgctctgcccttcagatattgttttctgaggattcaacaaagctctgcaatggcatcaaatcaaggggctctgcatatggttccagctgtcaggaggaggcttcaggcacctgcatgctttccggcctcgatcaggaacagtggaggccatggtgtctttgggcggtgatcccagtggggattgggctgatctctatcggacccga

SEQ ID NO: 537597 - DNA, 581 bp, Homo sapiens
  misc_feature (543)..(543): n is a, c, g, or t
aattagaggatcagaagggtgatgggttggatagatacaagactcaactgtatggtgccttcaagagatccatctcacatgcaatgacatccataggttcaaagtcaaggaatggagataaaattaccaaggaaatgaaaagcagaaaaaaagcaaggttgctattctaacttaaggtgaaacagacattaaaccaacaataatcaaaaaagacaaagaaagtcattacctaatagtaaaggtcaaaaagaagacctaactatcctaaatatatatgcatccaacacgagagcacccagacccataattcaagttcttatagacttgtgaagagacttagataatcacacaataatagtgggagacttcaacaaaccactggcaatattagatacatcatcaaggcctaaaatgaacaatgatattcaggacctgaactcaacactttaccaaataagccttacaggtatctacagaactcttcagcccaaaacaatggaatatacgttcttctcatctacacgtggcatgtattctaaaatngaccacacaatttggcataaaacaatccttagctaagt

SEQ ID NO: 537598 - DNA, 294 bp, Homo sapiens
gttctctgatgatgattgctctctgggtttgtcctcgatcgtgtatctgaagcgttacacccttgacaccgcccgtgtcaatccctcgtcgttgttggattacaacaaaacgatccaatatcacctacttttcaaacttccaactggaaaatttcaatctaggatgtgctgctctcctataaaaaccttaactgggtcctgactcacctacttcatgtcctccagatcatcaaatagctgagattaaaactgccaaaggtacacaaaaactacaatcacataagtgatccaact

SEQ ID NO: 537599 - DNA, 200 bp, Homo sapiens
gatcctcggtgtggatgtcacggtgaagggaaaggaaaaaaaagggaggcccaaggcagggcaaatcttgctgcaacttcgatgttgagcatcccggcccacgggacacacacagcccaccagtttccaaaatacatcctttgtccctttgccaggataaaaataaacgctgcttccatgtcctacctcctccaatttgt

SEQ ID NO: 537600 - DNA, 341 bp, Homo sapiens
ccccccgggtggaatcgcagctactttctgtggtaggtggataggctggactagggtaaaaatctgtgacccatatttaataggggtattctctgttgtaaaaagtctcctttcttcccagatgggtgcataaatgtggagtactaagaaagcatatttgagggcatggtggctcacgcctgtaatcccagcacttggggaggccaaggctggcagatcacctgagttcaagagttggaaaccagcctgaccaacatggagaaaccccgtctccattaaaaatacaaaaattagccgggcatggtagctcatgcctgtaattcccaaatccaacggggggg

SEQ ID NO: 537601 - DNA, 744 bp, Homo sapiens
gccacacataaaaataccccccccataaattgtgtttttcgacaggagcaccgttactagcacttcgtaggcactaccacaactaattggagagacccgtctatacatgacgtatatgggcaaaacaagcgcgccctcgtcggtgggaccccctcgcacgagagaagtacatggtaaacagtttcacacgcacgaggggggaacccccaccactaagagcatctcctgtgccccccgtctctcaccctcgcggtgcgagcgaagtatgtcgcccccttacatttcccgtttagagtgctttataaaatacccctctccgcaggtataagcctttttgggccgccaactatcaagcaccacgcctcaacagacacgtccttttggctctcaatataacataataaacgatatagcatccccaaaggaggaactatgcttaaaagcactaatagtgttatttcgtttagatattatacacagaagtaatagaatgtagaaataatagtgccacatcacagcactatacaatagatctcttattgtctcacaagtagtctccccagtctctcttgtgcacgattacccccccctcagatggtccccaacggcgtatgaaatcaatctttttttggtctgtcctgtcggaacaatttgcaattaatcgctgtacacctgctcctggtgactgcttgctaccaacaagttaaacaaaaaaaagaaaggtaatatgctgtcaaacaagac

SEQ ID NO: 537602 - DNA, 255 bp, Homo sapiens
  misc_feature (238)..(238): n is a, c, g, or t
tcataaaagagagaaaagagacacgtgcctatgtaaataagtgagctactttgttgtagtaatagatgagctgctgggaatgtccttgcataatagcatcattatattagtaacaggtgtaccaataaaaagatttacatgataggttaacaggaccaggacagtgagtttcctgaaggagttctttgttcctgatcaaagaaattgatacctgttagcattcactgccaccatattntaaggagaaagaactct

SEQ ID NO: 537603 - DNA, 358 bp, Homo sapiens
  misc_feature (145)..(145): n is a, c, g, or t
  misc_feature (318)..(318): n is a, c, g, or t
ggaaccttgatctgctcgccggtgttgcacctgcccaaccctgatcctagctgtaccttaaaaaaatgtgtctttcggccgggcgcggtggctcacgcctgtggtcccagcactttgggaggccgaggcgggcggatcacggggncaggagatcgagaccatcccggctaaaacggtgaaaccccgtctctactgaaagtgcggaaaattggccgggcgtagtggcgggcgcctgtagtcccagctgcttgggaggctgaggcaggagaatggcgtgagcccgggaggcggagcttgcagtgagccgagatcccgccnctgcactccagcctgggcgacagagcgagactccgtctca

SEQ ID NO: 537604 - DNA, 1520 bp, Homo sapiens
  misc_feature (196)..(196): n is a, c, g, or t
gattgagtccgtgtgtctactgaataaaagtcgtgctgtgcagttttgatggtctccatcagcgtgattattccaggtagtctgtgctaatctgctgcacggttcctcacctgtgtaccgcaccaggggacggtggaggatagcttgggggctgtaccctgtcacgaataggctgccattctgcctcgtctaagantgatgtagtcagatctcacgcagtttggttatcttatacacacaataaccacactctcaaagaagtagggtatttagttaaaaggagtagtgccacgcaagcctccgtggaaaaacagtccaagtgaaaaccaatctttaagaaataccttgttgagacttacgatcctaggcacgtgttctacaaaaggtatcccctccatgttcctatgacatcgagaagcaaggtgagcctctaatgggggtatcaagatctccttctcttgaacatgcttcttacaagtataggtaacacgcaaattgcttcagaatccgacgacattggagacgggtgtacgcatgatattggcgtggaaactcggacagcggaaaggcatcactttccgtaagggggcttgagtaagtaccaaagacttgtaacggtcgaccacaggagtgcctcgcggacaacggtttcttgcgtttagggaggcaccacgttacccgctgtgttcctaaccatggccacatacgcgtgaccggtcgtagtagcgggcgctatttaaataaaagctacgttttcaacgactaataaaggaaggccctccactcataaaatatccccccgaggcaagggaatacgtgagcgcaaaattccaagcacacgattcctaaggagagtttcgaagcccggtccctcgctggaaacgccagtcatgattgctcctcgcatttcgaagccccaagttccggccgttcccatatgaccttgagcgttgaatttggtagaaaccactccaacaacgcatttcaaccacagaaaatgaagcgcaacgaagataccttcggcaaccgtggggggtttttcccctattcgccgttgctaaaacactccgttgaaggagggcacccgttgtccgcgtaaacttatgagagttataccatatagtggcccaacctctgtgcgataaggaccattaagtgggcccggttgtaagaaccttcctagagttgcccgtttcgtttggaaattccacgcgggtttggaaagaccaagttccaccataactttccacgacaacttgattcggacccaccttgtaaattctgggtgagggccaagcgtagtccgaaatggccatgataaaggggtcggcagataagagcgagaagttccttctccaattaattggaaaaagtgttccaccgcgccattaaaggacccaagattcgcaattttacgtacagctgttaatttcgacaaaccactttttagacgctaaaatttaacaagcgtggggggtcttccccttttgtataaaaacgccttgcgttgctccaaagac

SEQ ID NO: 537605 - DNA, 679 bp, Homo sapiens
agcatttttagtaaagtgcctgtgtttattgtggacagagtttattattttgcaacatctaacctttatgaatatctgaggtgacacatgtgtgataatagaactagagctagtgggccaggcgctggtggctcatgcctgtaatcccaacattttgggaggctgaggcaggcagatcacaaggtcacagagatcgatgcaccactcctggatcaatcatggtttgaaaacccctatctctactaaatagatatcaaaaaattagctgggcgtggtggcgcgtgcctgtagatcccatgcattctcaggaggctgagtgcagtgtagaatcacttgaacctgggtaggcggaggttgctagtgaagccaatattgcgccactgcactccagcctgggctaactagtaggcaagactccatctcaaaaaaaaaaaaaccctatgatgcatagtgaacttagcccaatttggtgaaataaccttttctttataaggctgcatatgacataagtactgcactctgggcaccatggtaatttgtttatacaactcgtccctctgaaagccagggattcactggtccaggcactggtcccactgaagcgttttggacagcccgagcgagggtgctagcacaaggaaagttagtacaggggaagcactactgtgtgcccgcatgg

SEQ ID NO: 537606 - DNA, 1090 bp, Homo sapiens
tcccctcttgtgctcagtcgccctgttctggaggtctcttttctctactccagggttctcaatttatttgggggggaaatactttgagcagaatacaaggggaacaagagtctctacccctttctggtccgaagtccatttttatccctctcctgtctgaccaaaactctggtatggaatcaacaccaccgagctcgtgtgggcgaaaaaagaaaaactgtgtctccctttcgccttcgtgctggaacctggagggtgcataggccccgtggtgtacctaggtgcattagaatttcatagcttttttcccctccttttctcgtgatatattggggctcagagagttaccactggtgttctcttagtggtgaacttgtgcgccacgtttacccattttacccaacatgtgtattctgctcatactttccctcttggttctcaaacaacgagaacaaacacacttctacaaaaacagggggtttaatcaaaggctcaccaaaagggttcgcgtcttcgcacaaactgctccggggccctgcgcgctaaacagtgtgggacccaacttagcgccacaccccgtgggcatctcactccctatggggccagtcgtcacacacttggtgcactatttgttcgacccagaccactcccttgacacgcttacaacgacatacccccttatcaaacaataaacagtctgctcctcccataactgtcattccctttttgcacccactctgacccccattacacgtgcggcaccaaattcgcgcacacaacacccgtgttcccgggaactcactaaatttggggaaattttgcactttccctccatatattgaaaaactttgggtccccgtgatgctacttcttcaacaactcctcctttcctgggtctcccactcgtgcaaacgcgaccacacattacctgtcccccactttttcaacccacgttaacaaccgctgtccaacacatctagcgctttggctccacacaactaaaaccctaaatttgtttcccccccactacacatcaagcaaacacacacacatgcaccctcaccactccccacacaacctcactcccccc

SEQ ID NO: 537607 - DNA, 415 bp, Homo sapiens
tcatcccgaggcagatgctgacaacacctgtagaaccagcaagaacaaattactggagagtaggaagacccagccatctctgcccagtgccaggtgggccacagcatcatcctgagcttggactccctccctccatgattgcagactgtttctctccccagtctaatgatggaaggaagcagcagaccatggaccaggcagccaccatctctttcagctctggattagcacctgagaaaaacaggcaagacattctgtgcccacggatgatgaaaacccagcatagacttgcgctcccaaataaaagcaccgtaagccccttgggtttgtttctgtgtgacatgcagagctctctccctggcttctgagagatcttggtcaccttcctctctatccagtttaggtctgtggagat

SEQ ID NO: 537608 - DNA, 190 bp, Homo sapiens
aaagaagatgaagttccaaaagtgttattttggccttttaggagaagggtaagataaatgccgtagtgtgatgtgtacctggagaggaacaaataaaacaggtatttcttccgttggtggccatccactgggttgagaatgggagttcaaaactctatgatggactttgctgtggtgggtattttaaata

SEQ ID NO: 537609 - DNA, 350 bp, Homo sapiens
  misc_feature (13)..(13): n is a, c, g, or t
  misc_feature (74)..(74): n is a, c, g, or t
  misc_feature (129)..(129): n is a, c, g, or t
  misc_feature (170)..(170): n is a, c, g, or t
  misc_feature (185)..(185): n is a, c, g, or t
  misc_feature (207)..(207): n is a, c, g, or t
cctttaccttaanaaacttgcctttcctctttacggactcgcccctgaaatctttcttgtgccgagatcccaanaaccctctcttggggtctggattgggaaccttttgcggtaacaagggtgcaggancatcgtggaaggaatataaagtcagatcaagcctgaattantcgatatgggataantaagcagagatttgtggttcantgttttaacttgagaagctgagaatggctgtcttcatttgcttgtgagttgttgagatatggactcactgtaatcccagcttgggaggctgaggtgggaggattgcttgaggccaggagtttgagactggcttgggcaatata

SEQ ID NO: 537610 - DNA, 306 bp, Homo sapiens
  misc_feature (9)..(9): n is a, c, g, or t
  misc_feature (11)..(11): n is a, c, g, or t
  misc_feature (130)..(130): n is a, c, g, or t
ctcgtgcantntcatacaggagatgttatgattttccctgtactttcttgcttcacaagatttatggctggtttgatctttgtactccacagttgttttagattcatcacttttgtttgtcccacatccnctgatcccctgaggacctgcgcagtcctgctatgtgttggttatcaggaccttccaaatccagttttccgatatttgcagagtgtgaatgaattgttgagcactttgctcaactctgactcaccccagcaggttttacagtttgtgcccaatgggaggtactccttaagggggccc

SEQ ID NO: 537611 - DNA, 205 bp, Homo sapiens
tgataatcggcgactgggcgatccacgcaggaacggcagacctaacgaatcccagcgccagccccccgccacaaagcgccggttcttcagcaccagcttatagtcacgaccgagttctttcagtgcacagtttctcgcctatacgcgtggcgtttcaggcatggctcgttgcagaccgaaaaaggagatcgctgcccaatgcggc

SEQ ID NO: 537612 - DNA, 563 bp, Homo sapiens
ggtctcagccaggcgcaatggctcacgcctgtaatccctttactttcggaaaaaagaggccaaaggattgaggaaaattatgtttattagacgggccgttccctttgcaccacccaaaaggaagcccatttgaataagcttttgattttcatttcatatctattaatctcatggcaggctgttatgcctttcaatgtgacgatataagcctgcaggagtttgtattgcaacaacaaatttttttccctgcgccgcaaatgaggtctccttattgctaggcttgggtcacttttctacttcagctgtggatagcttcataacagctttcagttgcttttaatgtgcctatggcttcgggttttcgagcaaaacaagtgcaccttggtataatgaaaggaacttctttttacaaagggggggaatatttcctgggagggggacggtttcccaagaaaaccgaattgcaccgatattggattctttacaaagtggacagaatgttttgttgattccacaaggtttttgttaaaattggggcaaagaaaatacctggggttttaaac

SEQ ID NO: 537613 - DNA, 159 bp, Homo sapiens
caccctatctccaagggtgtacaatatactgcctacatcaacaaatcttatctcgtaccagggaaataaatctttccatcaaacgcgttttcttatatattgatccagacccacgtgttctggttgtatttcattgggtgtgggtattcggcgtgtgca

SEQ ID NO: 537614 - DNA, 416 bp, Homo sapiens
accagaatgttatccacttctacagtgaccttgttttttctaagtttcttatagaaatacctgtttgtcttgacttgcctttacgctgtttgcaggggccacttgtacgtcacctaaactcttactagataacatcactgccagaagtgcgctgggtcccacccaggcgcacttctgctgttcctgccaccgctgctgctgctgctggacgtccccacggcgtgcggtgtcaggcgtcccctctgcaagcgttacacttctttgggaatgggccaccacttcactacaagacaggctatctatacctgcgggggccccttaagaagtccaatgcatcgcttgtcgatgtgaccctctactataaagcactgtgcggtggctgccaagccttcctgatccgggagctcttcccagca

SEQ ID NO: 537615 - DNA, 326 bp, Homo sapiens
cccaaaaaggtcacccttcctgaggatgggcaccccccaggtttgcagctccggggacatttcccgggcccagcctggcagcctggccctcttggggccccctccccccagcccctgcctcgagggttgatactgcagtgactgccgccagccccccctccccctgaaaagggttgttcctgcctttgggtttgtttcccccaattccggggcccgggggttttttggccccgggggggttttggtttagggggtttgtttgttggggtgttttttgtttttgggttttttttaatgccaatgaagggcccctttgccctttccta

SEQ ID NO: 537616 - DNA, 167 bp, Homo sapiens
cgctaaaatgacccatcaacaggatttgacaaagagccttaaaaaagcgagtcaggaatcaaatcctggctcgcttttaattttgcaatattactcagataacgtgctccccaaccacgggtctaggtggtggtccgcactccggcgcagtacaacaatgggtttca

SEQ ID NO: 537617 - DNA, 160 bp, Homo sapiens
caggcagatacacttgaacccaggaggcggaggttgcagtgagctgagatcacaccactgccctccagcctgggtgacagagctagactccatctcaaaaaaagaaaagaaaagaaatggttgtgagtaggagtcataagaacattctgctggcctttta

SEQ ID NO: 537618 - DNA, 393 bp, Homo sapiens
ccattggggtggtgccaattaaaatggtgggagtgttctatggatgtcaattaaattctgttgcatgatgatattgttaagttctctatcgttggtgatttttctgtctggtttttctatcaattgttgagaaagggatgttgaattcttcacctatcatcaaggatgtgtctgtttcttctttcagttgtatcactttttgctttagatattttgcagctctatcttttcgtgcatacattgcagttgtactatgcgtggttttctttgtatttatcctgcttggggtttgttgtgtttcttgaaaaatgtgacttgatgtcttttgtctgggaaaattctcatgctgtgtgttgccagttttcagtaattaaaaatgtgcttttatgaatg

SEQ ID NO: 537619 - DNA, 431 bp, Homo sapiens
  misc_feature (312)..(312): n is a, c, g, or t
  misc_feature (342)..(342): n is a, c, g, or t
  misc_feature (368)..(368): n is a, c, g, or t
  misc_feature (416)..(416): n is a, c, g, or t
tgcaacccatgcctcatcacttaccctatccctggcaacgacgactcgccccaagctatccagctcttctgcaagctcttccggacaaccatcaacagggccaaggagaagaggaggcagatggaggccctgcatcggctgcagagtcccaaggggtccgagggcagtgggacatctcctgtgcctgataagagccattccccataacagaaagcccttctcccacactagatagccagccctcttctgagcaggaaggtccttgtccaaccctggtctgtgtccccactccctgtcctcagcatcagcaancacagtcctattttccttagatatggccancccaaaagtccaatgatcttgagctnacccttatctgtctcttttctgggaacaaactcaggtaaagtacctangtcacattggcctct

SEQ ID NO: 537620 - DNA, 130 bp, Homo sapiens
cgaacggtacactatgatttcagttcatgcaagtatcctcccctcaaatgccctgttaataaaatgcatgaaaccttgcaatagactaaatcaaagagcacagactgtattttcatgaagcaggaactga

SEQ ID NO: 537621 - DNA, 239 bp, Homo sapiens
gggcatctcatcagagctaataactaactaatattgcataaacaaactagccaacatgcactgtttttgtttgtttatgagacgagtctcactcacctaggctggcgtacagtggcacgatctacggctcctcctccgcctcgcacctcccaggttcaagcaattcttctgcctcatcctccctagtagctgggattacaggtgtgcactactacacccggtaccccggtacatgcaag

SEQ ID NO: 537622 - DNA, 421 bp, Homo sapiens
  misc_feature (5)..(5): n is a, c, g, or t
  misc_feature (10)..(10): n is a, c, g, or t
  misc_feature (42)..(42): n is a, c, g, or t
  misc_feature (46)..(46): n is a, c, g, or t
  misc_feature (133)..(133): n is a, c, g, or t
  misc_feature (264)..(264): n is a, c, g, or t
  misc_feature (275)..(275): n is a, c, g, or t
  misc_feature (304)..(304): n is a, c, g, or t
  misc_feature (348)..(348): n is a, c, g, or t
  misc_feature (368)..(368): n is a, c, g, or t
  misc_feature (376)..(376): n is a, c, g, or t
  misc_feature (412)..(412): n is a, c, g, or t
cgcgngtacntgtgggctggctctgcgggcctggcctgctgnctgncaggagtcatcttcatcgaccggaagcgcacgggggatgcatcagtgtcatgtctgaggtcgccagacctgctcaccaggacgtganggtctggtgtttcctgagggaacgagaaccacaaatggctcatgctgccttcaaacgtggcgccttcatcttgcagtcaggccaggttccattgtcccatagtcatgtctctaccaagacttctactgaanaaggagcgtcnttcactcgggacaatgtcaggtgcgggtntgccccagtgccacggaaagggctgacaccagatgacgtccaantctggctacagagtccggantccatgtnactgttttccgggaaattccactgattgccggggtngtgtgctat

SEQ ID NO: 537623 - DNA, 220 bp, Homo sapiens
caccatctagaagcttacagggtagactaaccggtaacattactgctaggccacctattcatgcacctaagttggaagcgccaccctaacaatagccacgattagccttccctctacacttgatcatcttcacaattctaattctactgactatcctagaaatcgctgtcgccttaatccaagtcctacgattttcacactatctagcttagcgtcggga

SEQ ID NO: 537624 - DNA, 1003 bp, Homo sapiens
gtaaaatccagcccatgacccctaacaggcgccctctcagccctcctaatgacctccgcgactagccatgtgatttcactttccactccatcacgctccgtcatactagcgcctagctaagcaacgacacggtaaccatataccaattgatggcgcgatgtaagcacgagacagcacatccacttacgggcctaacttaattacaccacactgtcacaacataaaggctcttctgatacagtggataatacctatttattaccggcagaagttttattcttcgccaaggattcaatctgcatgtccttttaccaactccagcctagtcaaccctaccactcacgcaattaatgagcgtgctactgcggccctccaaaagtgctataatcccgataaatccacgtagaagtcccaatcgtagggacatccgtattagtcgcatcaggcgtgatcaactcaggctggaggctcactcattagtcttacctagaaaacaatccgaaacccacactaattacaaagcactggttcatatacccattcctatgttgggtctccttatatgagcgcctcctacattagcctcgacgacgtaacttgcgatgatcttaccgcttcagacactttcccgacggcatctgacgtgctcaacatttcaggcaacgatcagcacgcgcttcccacggacgttccagcgtcatccttggctccatgtttccttcacttaatctgcttcatcctgcctaactagtatcatcacttttacatcctaattatcaattcggctttcgaagaccgccgactgataactggcattacgttcgatgctcggactgcctcattcccggatgtcctcctctatcgcacgaggggctctacgaagaactacaaaaagctccataactagcataccaccggggtcaccactaggcacccgcgtggccaaacacacggacccgtcacaaaaggccccaagggacaaaaaacaaagcgcacctacaaa

SEQ ID NO: 537625 - DNA, 604 bp, Homo sapiens
  misc_feature (107)..(107): n is a, c, g, or t
  misc_feature (203)..(203): n is a, c, g, or t
atgccgaaggaacaaagcttcagggcttgggttggtgtctcccactatcaaggaggtgctcggaagtttcccagtttcagtttcgtacagtccttacaagtatttanagttgttgtcaaagatgctgcattaactcaggcaggtctacataggcatcgctagcatcagacatgtctgtaatgaagtaatcaatgacagagatntgggatttgcgtatgctgcaggtatctctgtcacacactggcatcacctcaggtaagccctgctgcttctcttcatcagtctgagacaaatattcttccgaaatgcgtgcagcccactcgatgcagtactgcaggggtcgtcagggattgcacacatcagcacatttaatcagcattcgtttgattagggtccggttctctggagtcctaagcatagtgtttatcgcttcctggtgtttatcagtttccccatgttcttctagtgttgccaagggtttgttgatgctgttgacaaatttgttgacatgctcaaagtgctctgtcatctctgtggctaagataaatatattgcatttatcatctacagtggtcagctgaaaggccaagtccgcatggtggct

SEQ ID NO: 537626 - DNA, 336 bp, Homo sapiens
  misc_feature (325)..(325): n is a, c, g, or t
  misc_feature (327)..(327): n is a, c, g, or t
cctcccttccttcccctagtaggttgtgggttagaaattacttttttttggggccaggcgtggtggcctcacaccctgtaatccccagcactttgggaggccgaggcgggtggatcacttgaggtccggagttcgagaccagcctgaccaacatggcgacaccccgtctctactaaaaatacaaaaaattagctgggtgtggtggcacacacctgtaattccagctactaaggagtctgaggcaggagaatcgcttgaacctgggaggctgaggttgcagtgagctgagattgcgccattttactccagcctgggcgacagaatnantctccatct

SEQ ID NO: 537627 - DNA, 658 bp, Homo sapiens
  misc_feature (305)..(305): n is a, c, g, or t
  misc_feature (362)..(362): n is a, c, g, or t
  misc_feature (424)..(424): n is a, c, g, or t
ggaagaacatccgagaagggagaagctaagcccgacacaacgccctgaggcctggagagacaagctagttgctggcggtagtaggatgagagcgcgtggccggtctctgcgcgaggatgggtgggaactgtggggcagttcttcgtcctcgcgagaagatcagaggactcgccgcgaacgtgggtgcagagccgtgcagaacggacacggacgcgctcctgtcagtggtgctggacgtaggtctcggcatcgtaatccagcgaatctaggaagtagtgcgccggtcaacccaagggtttcggggnccgacatgtgaggtactactgggaaccattcaaaggacttgacgctgcgacctaggnatgcgaatgactgcgtagatggctacatctaccttgattcttggctatctctgagaggacantcaccgccgaagtccatgtaatgtgatcgaatcgctggggtgggtcaccttcttgtggaagcgcattgatgagactgtgatgacatgtagtacacatgtacctggtgagacatggcagagacgggcatctgctgatggccgaggtccaggcgggcatggcatgggatgtctcacgggcaattatggatgtcgtatgtcgtggggacacataacaaacctgggcactacgttcgg

SEQ ID NO: 537628 - DNA, 135 bp, Homo sapiens
  misc_feature (19)..(19): n is a, c, g, or t
  misc_feature (67)..(67): n is a, c, g, or t
  misc_feature (73)..(73): n is a, c, g, or t
ccctagatgttcctggaanttggccccctttatgaaaaccacttcccacagccagtggaactgccanaggaanatctggcgtcgcatggctcccaggaaagtgctgtgcctatccccactgataccatctgattc

SEQ ID NO: 537629 - DNA, 475 bp, Homo sapiens
  misc_feature (20)..(20): n is a, c, g, or t
ccacgcggcagcctggccanaaccggggaggctgggaacctggaggaggttatccaggacctgcgggcccttagggcgctggtcaaggaacagggcgcccgctttttccccctggaggaccaattgggccgcatggaaaacggggatgggtagggccccacccccacgccccctttttttcctccgccgcccccttccccctcagtttttgccagggggtggccccgggctagtgggctgcccaaagcctttggggcagggcagggggcggttcccccccccccccgtcccgggcccgggccgaagccagggcccagctttcccccctgttcctgggggggatgtttcccccccggcgggcccccccccctttggggggccctccccccgcccccggccccgccctttgcccccccccccgggggggggggggggggggctttattttttccttcccaaaaaaattttcttttta

SEQ ID NO: 537630 - DNA, 368 bp, Homo sapiens
aattactgatcacatccaaagggaaggtatgcagtctggcggtgtgtgctgtggcttggttgtggccacgtacggatgctggggctggatgagcgtgagaagtcgctgcacgctgatccgccagctggcagggccactgtttagtgagacaccaccctgcagttctaccatgagcgggtggtgatcatgaactcgatcctggagcgcatgtgtgccgacgtgctgaagcagacaggcacgcagatcaagtttccctccaccggggtggacaaactgccctactggacaactgctgacccccaagcggtccatcaacagaggtgctggcggacactttttgccaaggtgctggacgaagggctggctgg

SEQ ID NO: 537631 - DNA, 161 bp, Homo sapiens
  misc_feature (46)..(46): n is a, c, g, or t
  misc_feature (73)..(73): n is a, c, g, or t
  misc_feature (136)..(136): n is a, c, g, or t
ttttagtcattgccggccgcagttttgcaatagctcttccccaccnctcattttagtaaaaacaacaaaacanaaaacctgagaagtttgaattgtagttaaatgcccaaactggcatttaacactgtttataaanaatatatatatatatatatatatat

SEQ ID NO: 537632 - DNA, 268 bp, Homo sapiens
gcccactgcaattttttttaaaagggagaggttaagaattaggtggtatttggttttctgttcgtgtgttagtttacctaaggataatggcctccagctccatcccatgtccctccaaaggacatgatctcgttctttttaatggctgcattggatcaggaaaaataactaatgggcttaatacctggctgatgaaataatctgtacagcaaacccccgtgacccaaatttacctgtgtaacaaacctgcacatgtactcctgaactt

SEQ ID NO: 537633 - DNA, 467 bp, Homo sapiens
tctagaggatctgcaaacacgcaatctaaagaaaagaaaacttgaggctgggctgcagttggctcacgcctatatcccagaggctgaggcaggcggatcacctgaggtcgggggttcgggatcagcctgaccaacatggagaaaccctactggaaatacaaagttagccaggcatggtggtgcatgcctgtaatcccagctgctcaggagcctggcaacaagagcaaaactccagctcaaaaaaaaaaatgaaagaaaggaaagctggagctggtggcttaggccaatcacccttcccttggcaggacctactggacagacccttttgagatgtccctgtggtgctgtggagatgtgtgtagtggtctaagctcttggtggagcttgtgagtgtgtggtgtagtcatagctgaatgctgagattgcgggtgtatgagggcgtctaagctctttggtgagattgcggt

SEQ ID NO: 537634 - DNA, 1008 bp, Homo sapiens
atctggtggttgtctcttccaaaagggggttctgtgtccctttgatatcacgtccgaggctttgcctttgtaagtcgcaagatgtggtctttgttttgtcggggtgtgctgacccaggtgagctatgccctcaatttgggcgtgtcctaaacaacgctcagtggtgggaacgctgtttctgcacagcggctccgcgccctctttggtgtctagttgggatcccgcccgtctgggctatgtattctggcatcgaaagatcggagtgggggtcccaaggctctaaacgagtgttgggtgactcaatgggccctgttttacgtgcgcccttcgatggcgtgtctattccaccaggtgttgggagcattctctcctcctcgattgtgtgactagtcttgcttcgctaccccccccccattaggggggcctctcttggctaccaagaaatccgttgtgataggcatgccccccctctcttttgaggggttgaatattgctaacgggtggctccaccactggcactctcctccaccctcgcccccacactgtctgccgctcaaggtcggtggtgcgtcgccccccgatgctcgctctctacgaccctcagcgttcgcagctggctatgctgacgagtcatgcggaatgccgcctgcttttcggcgcgccccccgcgcgcgaatcccattctgaagtggacgtcggtgcgcctcaccccggcctcctgccctagcaccaccccgcggtgtgaggcggatgcacaacaggggaatcactgtccgcccgccaatgggtgtccactatcggggcgtctgtatgctgggcgccagacccacgcgcggcgcgccacaatcagcgcgacggcaaagaagacgtgcgtgggagaccacacactcggcggggcacgcaagagagaggggaggagggcgaaggcgagggggtgaccaaaacaggcgccccaggccccctacttgggttaaaaaaaaacaggtcgcttcttgccccaaaaaaaca

SEQ ID NO: 537635 - DNA, 234 bp, Homo sapiens
ctaagtgcttggtggctgcgttcatcccctcacggtcagctcaggagagagagtacaggacttgggaatccagaaagttaggtccagaacctgcctgtgcttgtgtgcttgagtgaaattgatgctctcctctctgggcctcagtttcctcatctgtaaaggtgatgggaggatgctagagtgaggatggaggaattctgccctgtgtgtacctgagctctgaattctgtactc

SEQ ID NO: 537636 - DNA, 217 bp, Homo sapiens
acccactactggtctggacaatttaatagtataccaactgatgaaacaaccaagtgcagttggtgtacggctggagggaaaaaaaaaaagactttttacaggtttaactttgtaaaaaaatgtatcttttggaaaccatagtctccttcacaaattgcacttgagatggctgaatgcattgattgagcaaggcattattatttgtggccagtagtgg

SEQ ID NO: 537637 - DNA, 154 bp, Homo sapiens
ggttgagcacctgcgtttgggccagggcatgatcctggagacccggggtcaagtccgcatcgggctcccatgctatggacgcctgcttctcccactgtctatttcttttcctcatatctgtgtctctcattaataaataaataaattcttaaaa

SEQ ID NO: 537638 - DNA, 213 bp, Homo sapiens
taatgaaacgcaccacgactttacgacgttctgcctcttggttgtaccactactttacaactgtactttacctttacggtgtacctacttgaacgtgtaccccctaacaactggtctctgactggtacacttttagttaccctgtacttttactcaccagtacagtaccttaactggagttaaacttacacacacttggttacttattttacg

SEQ ID NO: 537639 - DNA, 844 bp, Homo sapiens
ttccgtaaaggaaagccactggctctggtaaaagaactcagaaacagaaaggatgtgaaggtgttaatgtcaccaaggaaaacagaaaccaccttctgccagatatcgtgacgtgcgtgcagacaagcgagcaggaagtgaagaccacgtgcattcctgccttccgtgatgggacgtgcccagtttcaagaggagccttgattggagccccttgcctgttcgaggctgttatgcctaatggggggtaatgcgaacccttgttgggggcttttcctagaagaaaaacttcaaccagctgtttccccattaacacagtggtttaaacacaggatcaaaatttagccttaattgctgggaattgtctggtaacaaagattaaacttattccaatttgtgcgttaatctatgctttaaaaagatttcctttgttcacatttccctctttgcaggttcatgccacattgacatttggggtaaactggttgcgcatgcagacaactggtctcccagcacgtatcagcatggaaattccaccccccgtagaagttcattaacactgttgttcccagggcaaacgcccggggacgggaaaacgacagttcaaggttgggccataattcaaggttttgcattgtccactggaaaactataacatttccctcctccaaggtttgccaggctttcatcagcctcacatggccactttaacagctgatacacacgttaactatagactgtgtaacaaacaaattattttttcgcaaaaggaaaaccccttttagggtacattctgcccccaaacttttggttgctacactggctatattaaacgccacaaacatga

SEQ ID NO: 537640 - DNA, 348 bp, Homo sapiens
ggccggtccaatcactgtagtttccatccagattttttcctaaggactccaatgtggaataaaagtttgtcactttcaagggcaaacacttggcaacaattacaagtaacgccgagtcaggattccaggacctggactgcacgcagcaataggtgtggaggtctatttagttttctccatacgatttgcgccagggtctcagccaatctccgattggttacgtaacgcttaaagtctaagatggagtttaacaccctccttggtgagttcctgaaatccggatccggccacagctgcggagaggagtcagacaggccacggcggttcctcgccggcaagtgctttcgc

SEQ ID NO: 537641 - DNA, 294 bp, Homo sapiens
tggtaagtcatgcacgtcggcgatcatggccggctcagcatggtcagggaacccagtgctacttcttccatgagccaagctctaccagctacgcctccagagtgggagcgggtcatgtcaggtccaactcggccccatcttcctctccggggtctccgtgcagcaggagttggagatcatcaaatgagcggctcgagtgggtcactcaggcatctcataaagctcctcgggaatggggtccccctcggcggctgaccaagacgcaggtagcagcatgagagacaggaagagcgc

SEQ ID NO: 537642 - DNA, 445 bp, Homo sapiens
aaaggggctttcggaaaccaaaagggggggttaaaccgtgggcccaagggggcaaactttaggggaggcccccccccccccttttgggggaagggcccccaaaaaccgtgaaaaaaaacccccccccgggttttttaaaggcccgaaaaaggactttttccccgggaaaccatccccttcagtgtgcagggggggccccaaagaattttaaccggggggggggggcccttccccaaaaacctgggccccaaggtgtttttttaatggattgggacgtgaacccttcgccccccttttgaattggaaaaaagaaaggttgggggttggattttttgttttgttgggttgttgggttttaaaaaaccccccagggggggacttcattttttaaagtggggggtgagggccccttcaaggtttttcaaaaattggttttgggtttccc

SEQ ID NO: 537643 - DNA, 1061 bp, Homo sapiens
  misc_feature (27)..(27): n is a, c, g, or t
  misc_feature (110)..(110): n is a, c, g, or t
  misc_feature (113)..(113): n is a, c, g, or t
  misc_feature (126)..(126): n is a, c, g, or t
  misc_feature (185)..(185): n is a, c, g, or t
  misc_feature (270)..(270): n is a, c, g, or t
  misc_feature (306)..(306): n is a, c, g, or t
  misc_feature (701)..(701): n is a, c, g, or t
  misc_feature (732)..(732): n is a, c, g, or t
  misc_feature (753)..(753): n is a, c, g, or t
  misc_feature (762)..(762): n is a, c, g, or t
  misc_feature (789)..(789): n is a, c, g, or t
  misc_feature (879)..(879): n is a, c, g, or t
  misc_feature (900)..(900): n is a, c, g, or t
  misc_feature (912)..(912): n is a, c, g, or t
  misc_feature (918)..(918): n is a, c, g, or t
  misc_feature (951)..(951): n is a, c, g, or t
  misc_feature (972)..(972): n is a, c, g, or t
  misc_feature (993)..(993): n is a, c, g, or t
  misc_feature (1060)..(1060): n is a, c, g, or t
gggaagggttgagggggggggagggcngggagcttgtcttgtagctagttaggtaaaacctgtagtgtccctgtgggaactgctacgcgttgtcttccagctaggctctngtnctcgtctgcctcncacaagatctgtgggctctagtgtgctagctgcttcccctactctcagctacagctgcngaggggccctagagcccccacagaaaggactgttccagcctcgggagccagagatggctccctccggacgggccttatccaactncgccctggagtgtggctggtaggaagggacagaganagaagggacagaggaaaggggctgttccagcgcaagaaggcagttccactgggaagtcagttaggtccggcggcagcgcttcctctggcagggccgaggctcgcgactgcgggggtgggcggaggtcgctgcctggggatcggacactggagccttgcggcggctgcgactcatgcgcaggacccagcgcagcttgtggtgtggcacctgcttgaggcgcgcggcggcagcggcagagcctccagcgtgtgttccgagtgtggcgcgcggctggcgcaggcggtggcagcgcaggtactggagggaagtggcgctggcacaggagcgggtgagcttcatgctgctccgggccgccgtggagcacaccatcgggtagaatctcttgttctgcagcntggtggctgccacaactatacacttcctgtncttgaaaaaggtgagttttcngtgccaggngtacaggtgcacgccaattatggagcnctggccgaaccgcgacgagaagctggtcttgttgcccttgttgtggaggaggcccgttttggagaggccccagctgttctcatccctgcncagcaggctgcagaacgtgtnggggtatttgtncaggtncacatccgacgtcccgatgcccaccatcatgtnggtgccgtagacgggagaggncatcttgatctcccagaagtnctggccctcccccagccccttggtgccccggatgggcgccgtgccgcaccggttctccatgttgganc

SEQ ID NO: 537644 - DNA, 183 bp, Homo sapiens
agatagggtatccaggacccaaaggtgacaggcgccctgttgcgccaccaggtcatcctgtgagtcacctggccctcgaggacacaagggagaaaaaggagacaaaggtgaccaagtctatgctgttcggagaaggacgaagaagtattgctgtcaagcgcgtgagctagccagtggcaggac

SEQ ID NO: 537645 - DNA, 210 bp, Homo sapiens
  misc_feature (26)..(26): n is a, c, g, or t
  misc_feature (69)..(69): n is a, c, g, or t
  misc_feature (109)..(109): n is a, c, g, or t
  misc_feature (111)..(111): n is a, c, g, or t
  misc_feature (124)..(124): n is a, c, g, or t
  misc_feature (134)..(134): n is a, c, g, or t
  misc_feature (140)..(140): n is a, c, g, or t
  misc_feature (145)..(145): n is a, c, g, or t
  misc_feature (195)..(195): n is a, c, g, or t
  misc_feature (209)..(210): n is a, c, g, or t
gttggcggcggggtctgtggcaaggngtgcggtccagtctcttagggcgggtcgtctgttcctaaattntaggtgttgatgtttggatgtcacggttaggaaggtgggnanttcttaatgccantggagggggntgtganggaantactacctacactgggacaagtgggaccagggagccactgactggacgtnacgtgctgtggtcnn

SEQ ID NO: 537646 - DNA, 198 bp, Homo sapiens
cccacgggcaaaagaccatgtggaagtttcaagtaagatagaagaaaagcctccaagaaaaaaaacacctgcttgagtaagaaatgataagtcaactgaatgctgctgtgaatacgagaaaaatgagatatagaataaccggaagattaagcagtgtggggtaagggcgatgatggctcatgcctgtaatccccagca

SEQ ID NO: 537647 - DNA, 207 bp, Homo sapiens
ttggctaggtatgtcagagcagtgaagacttgcccctcctttcgcagctgagtttagtccactttacacgactatgtatatcttacccaatatgtgtagtatcgatccaggcacgaccctacttgacctttcaagatggaaagctagaggttttctacgagacgtctaggaagttcaagaaggtctacaattcctcaaagaacacag

SEQ ID NO: 537648 - DNA, 455 bp, Homo sapiens
tacgtccagttccggcgggcatgcaatgagacccagttggcggccagcaggggaatatcatgcggatggtggagggcttgacgatgtgctggtggttgtcatcttccaaaaggatacaccataggattcatgggacacgaccgccgtactcgtgtggcagcggttcgtcttggccttatattagtggtaggcccggccagccgtgaacgagtggattcgtgaattcggccacctcgaggcaccacagcaatgcacagctctgtctggctgaagagataaccttcatggagccggagggcaggttctacacggtgttctgcattgcgttctcagggattgttgggagcatagagcggtggcataggtccctggatgtccgtggccatcttgccaagtgtcgccaggattcgcctccaggcagtagaggatggtacccatcggcatggtgcccacag

SEQ ID NO: 537649 - DNA, 118 bp, Homo sapiens
tactgcccctagatagttcacaagagaagtcgttcattcaagttggtgtaatcagctaggggaagtagtagaatagtctagcaaaaaccagaagcggcaaaaggcaggtacctgctca

SEQ ID NO: 537650 - DNA, 450 bp, Homo sapiens
  misc_feature (78)..(78): n is a, c, g, or t
  misc_feature (116)..(116): n is a, c, g, or t
  misc_feature (119)..(119): n is a, c, g, or t
  misc_feature (443)..(443): n is a, c, g, or t
tctgtcccgctgtatgggggaagtctctctcactttgggatcctgctgaagctaggtcatgaggtcggaaatccccancacatttgcctagactttgggcacaggagttcttagtncancaaatcagagagaggatgggcttttgatcagatacccctcccaaaaaaaaaaaaaaaaaaaaagttaaggcaaaattcaaacaaattcggggctggagtaaaggggggggggtagggggaagggtactatagaccctcttttggcccaccttaagagagccttctaagtgtctgagcctcagcgggggagtaagattaatgggtctctaaaatgaggtcaggggatagatgcttggggggattgggagtagaacctttcatagtgaatttccactcgggccaatctgagttggaggtgggtgtccggaacattcctccagcttnggggggc

SEQ ID NO: 537651 - DNA, 739 bp, Homo sapiens
tctctaaaatatctccttggtctgaaaattgatggatatgtcttttaacttaatcatttcttagttctaagactctcagcccaaatttcatattcaaggtattaagtcatatgtgattggtacttcacatactattagagaagccaatttagtgaattttacagagcacagaacatcacatacttaaatataatatggccatattacatgatgacatttaattattcagtttcttgataaccaaactatattagaatttaattaaaatatattattgagaagctaaagtttgaatatatctgtggcaatgattttcatatgttaatatttcttagtctgtgctggcaggtgactgagtacttgctgtcatatcatgcttatgtgacttgttatatgtgctttgcatgatggagttgacacatggccttttacaaactaaaccttcaagattcagaatgctaggcagctcattaacatatggcctcaatccaggtgaccaagcagtgagtctggagtcctggtcaatttagcaatttgtgatctgtcatcttaatataacttcctctcatttaactttctttaagagaaatagactacctcacccatagtaatctggttttgacgaggtaacaaaatactcatttctattgtatgaacttaaaatatagtgtacatttatttttgtaagtcttacttatatgcctaaattttctataataaactgatttaagtctaaaaa

SEQ ID NO: 537652 - DNA, 412 bp, Homo sapiens
  misc_feature (29)..(30): n is a, c, g, or t
  misc_feature (32)..(32): n is a, c, g, or t
  misc_feature (50)..(50): n is a, c, g, or t
  misc_feature (79)..(80): n is a, c, g, or t
  misc_feature (93)..(93): n is a, c, g, or t
  misc_feature (145)..(145): n is a, c, g, or t
ttcagcacatgtagtcaagtaggatctgnnantatgcacagtaaatccangtcttggttggtttttctattaaaaagcnntcaagaaagatanggtgaaaaagaaaggaatttagaggtagggaaaagatgattgtcagacattngaagaactatagtaaaatgataaacactaaaggtgctgaataaaatagagtccttgactactaaatccagtatctggggtcatcactacctccgttcctatggagtttttttctttggactatgagtttcatttccctggtaataatgtctattttgaaattatatgcctgacattatacataaatgtggtagagactctaggtcggtgctggtcactatggtagctactaactggggtatggcttccagtggacactaatggtgct

SEQ ID NO: 537653 - DNA, 1005 bp, Homo sapiens
tgcattagggtggctgtcgttttcctttacattgctctcggttctgtctctgccgttttggcctgggtccagagttcgtgaggtacccattgtccaattttcctcgtgcctgctttctttgatgtttgtgtgccggctctttccctagtgttgctatgtgttctagtagccttccatgggttgcacctgcattcctcataggcgtacctcctgccctgtgtttggtcagcatccacctgtaggtcccttctccctgcttctgctccctagtgacacagtgctggagggatcctactgtggccctaagaagcagattggcccgcagatgctgttgtataggcctcatgtcgtggtcctgcactctcgctacatatgagcagcctgtggcatctgcttgcgttggactgctcctcatggtgtcttcacgggtactcagccctgagttgaaagggagctatcacggaacagctatgggagccccagggtcttccctacctcaggcaggaagggcaggaaggagagcttgtctgcatggggtcgggctagggctgatctagtaagggccagtcctgctctggccaggcagttctgtgccccatgcctgtccagcctgggcagccaggctgccaaggccagagtggcctggccaggagctcattcaggcctccctctctcttctgctccactccttggcctgtctcatccaccagcgggtcccagaccatccccagggctctctgctgtacataatttgagactagttatttattccttgtgaaagatgatatacctattctcttcgtctaacgcgtcgtctgtactttactgtcgctgaggacgctgtctggcttgcagtgcgcgtgcacgtggagagctggtgcccggagattggacggcctgatgctccctcccctgtcctggtccagggaagctggccgagggtcctggctcctgaggggcatctgcccctcccccaacccccacccacacatacttccaggtctt

SEQ ID NO: 537654 - DNA, 513 bp, Homo sapiens
ttaaactttttatttggtcaacagccaaatatcatgttttttctgcctctttgcactcataacgtgagacgctggactccaaacacacaggtataataacgtaattgctaacgcggggaaaaaagacacgtttagcttccggagcggagctatgcccatctaccagggatggggaggccactactggaaataactcttggactccattctccatagtccacatgtaatgaactttacaggctgagggagttagcctttaatgcttctctttaaacaaagagtacgctattaaaaaaaggtaggggggcagggacattcttgggatactggatatgcacagaaatttgagagactcattatgtagataccactctgataaggagcaactctagctgcctgggagggggatgggaatggcaccttcttcgttagagcgcctaaggagttcacagactcaatttgacctactggaacgacgtgcactcttactctggggcatagctctactcatgc

SEQ ID NO: 537655 - DNA, 169 bp, Homo sapiens
cagactggttatgccacaagcacgtatctctatattgctcagtgaaatatttagtaaaccaaagattttgaccactggtctttataattatggcacaaaagcattgagacacctgctattttctgaacgagtaatcagttcattattatactcaagacacggtatgttt

SEQ ID NO: 537656 - DNA, 321 bp, Homo sapiens
  misc_feature (10)..(10): n is a, c, g, or t
  misc_feature (68)..(68): n is a, c, g, or t
  misc_feature (184)..(184): n is a, c, g, or t
  misc_feature (244)..(244): n is a, c, g, or t
  misc_feature (255)..(255): n is a, c, g, or t
  misc_feature (259)..(259): n is a, c, g, or t
gaattcgggnacgagcggcacgaggcaagacagacctcttctgtacaaaaaagcagcagcagccaggngcagtggctcacacctgtaatcccagcacgttgggaggctaagatgggtgaatcatctgagtaaggtgttcaagaccagcctggccaacatagtgaaaccccatctctactaaaantagaaaaaattagctggatgtggtggtgggtgcctgtattcccagctacttaggaggctnaggcaggagantcgnttgaacccaggaggcagagattgcagtgagctgaaatcacaccattgcactccagcctgggc

SEQ ID NO: 537657 - DNA, 220 bp, Homo sapiens
gacaatagacattatatactaaaatgtgaccagcaagtactatctcaccacatgaaacatggcagtgaaattttttaatctgcgcgttcaaatggaagactcagaagagattcttttatggattcagggcaagtgctaatgaggaagcatggtgattgaagcacaaaacactgaattcaggctaaataattctgccacatattttcttattatttttttg

SEQ ID NO: 537658 - DNA, 161 bp, Homo sapiens
  misc_feature (129)..(129): n is a, c, g, or t
gagcggtctagtatcacaccaaaagctcgacgtggaattattctccgagggggttgcagcaaagcatgtgtgtttgtgaagtttcaagcttattctcagcacatgggttcaaatgctgtgaaccaaccnttgaaccttgacgaactgagaccgctctaccg

SEQ ID NO: 537659 - DNA, 137 bp, Homo sapiens
agtgcgtaggggggtacctctgctggcccgccaggctgtttttgaactcctgacttcagtgatccgcctgccttggcctccaaaagtgctgtgattatagacctgagccaccacgcctgtgcaggctaatgggattt

SEQ ID NO: 537660 - DNA, 835 bp, Homo sapiens
tccttccaaacgctatgggcttatggttattcctatactggtcacacaagtcaaccataatgtaccacaaaaactattctaccacagtacgtaatggtgctagatagtaaactgaactgtatggctctgacttggctacttgaccactgtgttggactggattaccacacccctttaaactatcatactcttacggacggccttggcgttattcaaacactatcggttcaactatctaagcaaagaaccccactggtaggtggatacaaccgggtggtcttcaccggggtagtcgtttgaagacacacgctttacacgcacactatttaatatacccctatctatgggttccgtccccactcggtacctaccaactaggaactgttcactacttacgttataaacagccctcacaaacgaatgacttccaaaccacagacatgaaggccacgaatacacaaatgtggacacgaaaaaaacatttataaatcctatatcacgacacaacctggttacgacgtagtcatctcgcaaggaattccctcaaccactggcaaatatggtgttactgacggtcccttccttccccagcaacagtgaacaaaagttgttgtcatagcaccttaccgcctacaagattcatacacaagtgcggagaataatccaccggactaccccagtattaaccaacaaatcaaggtgaaatatgcattggtagaacccccttgatccaggttaaccgggccccctggaggaataaatagaagaagcattctaatatacttgtttactagacttctagtgagccgatcaggagtcatgactacaggtgggg

SEQ ID NO: 537661 - DNA, 122 bp, Homo sapiens
  misc_feature (34)..(34): n is a, c, g, or t
tcaggtcggtaccttgcatatggcatgccaaganttgtgtaaggcagcgctgagttgaagagacgaggaagatgaaccacgtgacgaaatagagtgcccctacttggccttgccatatgcaa

SEQ ID NO: 537662 - DNA, 343 bp, Homo sapiens
  misc_feature (30)..(30): n is a, c, g, or t
  misc_feature (101)..(101): n is a, c, g, or t
  misc_feature (216)..(216): n is a, c, g, or t
  misc_feature (311)..(311): n is a, c, g, or t
  misc_feature (327)..(327): n is a, c, g, or t
cccttccttagaagacttgactggtcttanattgctgcatcaagaaacccaagcttgcttgagatctgggacatgagcgacgatgagaccatttgagatgncccgctgtggggctgacttctccctggccgcctgctgaggagctctccattgccagagcaggactgctgaccccaggcctggtgattctgggccctcctccataccccgaggtcntggatcccccctctgcttcccaggagtggccagtgttcgctgttgcttggggattcaagataccaccagttcagagcttaaataataaccttgcntttgccttgctattgncctgggaaaaaaaaaa

SEQ ID NO: 537663 - DNA, 948 bp, Homo sapiens
tttatggcattggctggtcttgcagtgcgggctgttgaccctctgccgcgctcggggctccgtgtgcctgccgctcctcctgctctggcctgagtctgccctgtggctcggctgcgcgcttgtggtgcgacggctctgtgcgtggctgctggactgcgcagcatggcgtgtggagtgacgaggggctccgggtcttccagagctgtgaagatcaatgatcgtgtgaagccaaaaaccttccctcttaccctggtggccgagcaagatgagtgggattgctactgcactgtgtgaacctggaccagtgaggaggttttcagtgaccaaaattgtggaaaagtcactctgcccgttttacgttgagaagacttttactgtgaacgttcctcgtgagctatcgtcacctgtccttctacattttcgatagatgacgtattccggagggattccatcataggtgaagtgtggccatccatgaagtgagtgacttgcagaagtaccacaagcaggtacacctggtccagctgcagcacgtggacgctgactcgtgaagtgcagtggcaaagtgcacctggagctgcggctgagcgaggtcatcacatgacactggggtcgtactgccacaaagctcgccaacgcatcgtcgagtgccagggcctccccatcgtgaattgggcaatgtgacccctacgccagctgtgactgcttgcaggagcccttcagatcagaagctaagaagacgaaagtgacgatgtaagaccaaaaatccccatttcgagtaaagttgataatattatgacaggtgacccggtgccctgttagcttataggcacatgaagtccacttagaatttgagggaggaagaagtgtacagagctacgagatcagagttaacactgaagtgcagtaactgaagttgggagatgaatactggaagaataaggtaac

SEQ ID NO: 537664 - DNA, 254 bp, Homo sapiens
caggtttatgcaccattcgatcactggcctgtctgttgtgcaattgggcagctggactgtagggtcttcactcatggtcagctttctctggttcatgtaggcgtgggccacacccacattgaggtgatccaccaaagcttctgtcaggcaggtcgctgcagtgatagcctctcgcctcctcttttcctgcagctccttgcgttcattctgcttggcctggtgttcttttaggatggcgggacagcatggtcacg

SEQ ID NO: 537665 - DNA, 81 bp, Homo sapiens
  misc_feature (16)..(16): n is a, c, g, or t
  misc_feature (44)..(44): n is a, c, g, or t
tttacaaagtgacttnaaaaaactttattgcagcttcttagagnaaaactgagtgtgcagtgctaggaccatgttgggatc

SEQ ID NO: 537666 - DNA, 344 bp, Homo sapiens
cagcttatttattcttatttttttagaggcaggttcttgctctatcgcccaggctggagggaatggtgcagtcatagatcactgcagcctggaactcctgggctcaagtgattttccacttcacccttccaagtagctaggactacagtcacatgccaccacaccccactaatttttaacaaaaatttttttgtagaggtgaagtcttaactaggttacccaggctggtcttgaactcctggcctcaagcaattctcccaccttggcctatcaaagcgctgggatcacaggcaccaaccgcgcccccggcctcagtttaatttaaatccagtgtaccacactca

SEQ ID NO: 537667 - DNA, 342 bp, Homo sapiens
agtcgttaactgattaggacttcaccaacgtcaccagctgctccattctcctgctacactgagtgacatataccagaaacccacttatttaattatttagaacatctgaacaagtagtcagttaattttaaaaataagtgcaagcatagaatcatgaaaaagttttagacacataaactgttttaactttttacaaataagtctacattcattcaccagggatcttttccttatttatagcacgaatctgttgacccagagctgtgtgtcatctttcttaaataaaccacatcaataatatacattctgtgatcttcatgtctcagtttcttccaagtggac

SEQ ID NO: 537668 - DNA, 119 bp, Homo sapiens
tagcccatgcggtgacgatctcacctgcgtaatcagagaatccttcaccttatgctgaaaagtgagctcagatccagcaccatgtacctcctgaccacatcctgtcgggctagtcgtga

SEQ ID NO: 537669 - DNA, 358 bp, Homo sapiens
tcttgagggtaaaactgcttcagggagagagggaagcatcgccatcgcagctcactgagaccaaagcctcccgggttcaagcaattcttgtgcctcagcctgctgagtagctgggaatacaggtgcatgccaccatgcccggctaatctttgtatttttaatagaaacgggatttcaccatgttggccagactggtcttgaactcctgacctcaggtgatccacctgcctcggcctctcaaagtgctgggattacaggcgtgagccaccgcgcctggctaatgtttttaataattatgaaaatgctttcacgcccagtagcccttgttgcctcaccttctgtgagggaaacagagcat

SEQ ID NO: 537670 - DNA, 486 bp, Homo sapiens
  misc_feature (137)..(137): n is a, c, g, or t
  misc_feature (180)..(180): n is a, c, g, or t
  misc_feature (188)..(188): n is a, c, g, or t
  misc_feature (410)..(410): n is a, c, g, or t
  misc_feature (427)..(427): n is a, c, g, or t
  misc_feature (435)..(435): n is a, c, g, or t
agaaggaatctcagaagcattaagaaaatgtggactacagttacctacttctttttccattgagggtatagatgagtaaaaatgataattgtcaacgttctgtcagtttggcttcgtggacttggaaccagtggtangtctcaaccagacttgtcagttttcaactattacagacactgntaactcanggaatgcgactaatagctccgtcccaaatcttgctcaattgtcctgtttgcatacctgtccaatatcaacagggtgctaccttgagcaagcagaagtttcaggttgactgacgcctgtattagctagcaactgaagcactgggctctctgattgtgaccgggaatatcagcgaacaatgtgactcgaaactgtagccccgaagaaacctccattgtcatcantacaaacgggaatgtcntgcgccanaaagctgcatgcagtcatcaaagtacaaagcatctgatttgggaatgtggg

SEQ ID NO: 537671 - DNA, 408 bp, Homo sapiens
tgacatgatcctctgagcccaaacctgatgctcataatagtctcatcttcatttagcatgttactgaaccgatatacatatcttcccttattatatctggtctcttggactggtagacgttctaagtgctgaggatgtaagagactgtgcaagtatatcaagcccttctaatcatcatcgcaggctcttatcagcgccagtgcatatatccaacacacagcaattcctactgggtcctatgtcatttgctgagcgtaaggatccccattccatttattgcgtatctactcacagaagtctccagttaatcagttatatactgtgtaaagtatattactcggccgtagataacgacacgcagatttcgtgagtgtggtgctgttccacaccgttatttgtacatgacac

SEQ ID NO: 537672 - DNA, 172 bp, Homo sapiens
gtcttatggcaaggcccaagcctcatttggcaccagcaaaccctgcatgcacatccacccaagcaggcagtcatggcagcaattctcaccacagcagacctccactcaatgcactgggcaagcaccacttgtgcctttgcccatcatgccacagggtacctgcagactcgca

SEQ ID NO: 537673 - DNA, 352 bp, Homo sapiens
  misc_feature (111)..(111): n is a, c, g, or t
cttctatccatccttaaggccagcattgtgagcattttaaatattatttgtatatttttaaagttactagtaatatggcatcatttagtgattcttttgggaatttttttntgagttgcatgtttttatccatttggagtttaaattacatatgtgtggttttttttttaaatggagcttttcttactatatgttccattcaaaataaaaaattaaaatcttgccataagaataaatttgattttggccaggcacggtggctcacgcctgttctcccagcactttgggaggccgtggcagacggaaagattgagaccattctggctaacacgatgaaaccccgtccctacta

SEQ ID NO: 537674 - DNA, 169 bp, Homo sapiens
  misc_feature (74)..(74): n is a, c, g, or t
gacgatgacagacaccttccctaaactatattttgacttgtgtgatttagttggagaccattgggatgacccanaacccgatattggagatggttgccgctctccggggggaagaaaaaggacaagactgtatgacttctatgtttgccccggtcatactgtaccaata

SEQ ID NO: 537675 - DNA, 746 bp, Homo sapiens
  misc_feature (678)..(678): n is a, c, g, or t
agcgaaaggtcatcatttttgtgaataatgtaaaacatgttcaataagggatacttaaaaatgaagcaatttatttgtatctggggacaattgtgaagatgggagaaaattgaaaattttggtaggaacagaccatgagtggctgtaagctttaactttttttttttttttttttttggagattggagttcagccttcgctcgtgttcgcccaggcggagttgcaggggcatgactctcagctcacgtgcaacctcgtgccttccggggtccagaggtgatttcttctccctcaacctcctgagttagctgagattacgggcacccaccaccagcgcccagctgattctttataatttttaggtaaagacgggggttccaccatgtttgggccaggctgggctctcgaacctccgtgaccctcagggtgactccggtcataccgttgtcctcccaaagttgctgggagttgcaagcttgagccacgtgcccccggccaaggctttgacacttttaagggctctggggaaccatagaggtctgagattatttctcctacttgagaataaacaaggtttttggcattatcatcagagcagtttaacaggggtatgatactttcaaggccaagtattatccggtctagatttaaagcaatagtgtcttccttaaagccttncctcaaatgctgcccaccttagacctttcctgacaatctatataaccctccaccctttattccctatt

SEQ ID NO: 537676 - DNA, 772 bp, Homo sapiens
gtccacgcgttccgggggacctctatgtactaagctttataggctgcgaggtttgcagacagtctatcctgggtaggaacatctctgacatcaaagaggaggttgaacctagaagactgtacttgattgccttggattaatacattgtggagatgaaagggtcataaacgcttcgcgcatagagccagcctggcgccccagcgggatcccagagaaggatctgcatagtgttataaggacaccctacttcctgctagcaacgggacacgccttgcggggaccatgtgcagaaacaggaggcctgagtaacccagcatgctggcaagcatgcgcggtcctggtcgaggtggcagggagcgcccaggtggcaggagcatggaggctacatggtccaggcccatgcatgcagggcctggcaggctctatatagagaacagagggagctggttgtggtgctgagggagctctgactgaggataccgcacagccccagaagcagtaggtgcaggtgcaacgggtcaaagagaccctggtggttgccaggcatgaccgtgggcctgcgagtcggggggctagcgcctcttgaggaagcggcttgagaataggtggccctatgttccatacagccacgtgatgagaccttttgcattggaaggatgtagggcccaaggaggcaagtcctcactgcacattggtgccttttggcgggacccattgggggggttggagattacaaccccttttagattccctcggtttcttctacctggat

SEQ ID NO: 537677 - DNA, 120 bp, Homo sapiens
gtaggcgatggtatactgtacaacctgttcctgctccggactccactatagcagatgcgagcaggagtatgagagagggaggtaagagtcagaagcttatgttgtttatgcggggaaacg

SEQ ID NO: 537678 - DNA, 560 bp, Homo sapiens
actatctacgctggatatctaccttatcatctgtttacaactagtagcggtatgaaaaggttataatttaatttaccacaaaaatatctattgggttattacaagtttaatacattagtgttaaaaatgtccagaaagcactttccaggtgcttcgcagttgaatatatttaagaatcatttcccgagactgtgggctttctgaaaccagagaccatgctcagatgagctttgaaccagagtgagtgtggaaattcctccaagtgctctcttcttcttgagactggacaatgtccagccttgcctttttggactggggctagggctgggaggacaaggtccccatcatgtttcagaagcagaggtaactgatcacattcagtcactgtgacttttctggttacggaagttatgataggccctgagtgaagacgattgccagccctagccaggtcataggtgtgtataaagaggacactcacctccaagatcaaccctgcccaactctgaggtagtgcagatactctgtctcatattccaccactgtattgaggattgtag

SEQ ID NO: 537679 - DNA, 320 bp, Homo sapiens
gaacgaaggtaggacaatgaggaggaccagtagctgaagaagagaagctttcagctcggtgtggtgggctcaggcctgtaaatcccagcactttgggagtctgaggaggatggatcacctgaggtcaggagttcgagaccagcttggccaacatggcaaaaccccgtctctactaaaaatacaaaaattagccaggtgtggtggtgcacactgtagtcccagctactcaggaggctgaggcaggagaatcgctcgaacctggtaggcagaggttgcagtgagccgagatcgcactcctgcactccagccgggggtcgacg

SEQ ID NO: 537680 - DNA, 1254 bp, Homo sapiens
  misc_feature (274)..(274): n is a, c, g, or t
tggggctctctgaccagcaccaggggcggtgggcaaaaacaacccccttacaaaaggcggcaaaaaggggacccaaaaaaaaagtgtgggtgtgactccattttctctataaaaaaaattgtggtatgtgatgtgtgtgaaagcccctgtgcatatgtgttctcaatatatataaaaaatatttgtggaaaagacccctcgtctcaccagggagaccccacagggaactccacaaatgtgtgcatctctgtgagtgtggtctctctcacagggngtctcgcggtgtgtgtgtgagaaggtgtgaggtctctgtgtgccgtagatctgtgtgcgaaaatgtgagtagtagaagtgtgtgcattttagaaataatatctcgagagccgtggtatttcctgtgagaagaagtggtctcgagggggataaacacacgtgcctgctgaacctcacacttctctcgagtggcgcgagtggagtctctttcaccgcgtgtgacacaaaacaatgtgtgtgtgtctccagtgtgtgtctcacaaaaaaactatgtgtgacagacacacacatgtagatcgtagagagagcgctctcacagcgtgtgagagagtgtctcacagagacactatccccgcagactgtgtgtctctacccctgtgcgctctctgcgctctgctgtgtgtctccctgtgatgagatgcggggagtcatatttcaccattatactacaccacagcgctcaacacacaacatcttcgagaatctcagcgggacagagaaaaccctctctctttatatgtctctccagggcaaccccaacccggggggtctcccccgacacaaaaaatctccccgaggaaacacacaagatagtagactgtggagacactctcagagttgaacccccgcagaaaaaggcggcgtgtcacaacaccacaaacttgtgaccccccttgtgaaacaaacgaccgcggcgcggcggctcccaaacataaaacatctggtgggaatctcccccgagaataacccaagcccttattgtggggccacatcacaacagcacctcttcctgccacacaccaggggggtcttgtgcccccaacagcttctcatattttttatatctcccccgtactttccccccaagggacgaagtgagatccctacccgggcctgtacgccaccaagcgccgttacacaccccctcgtgcgcctcgtcaaacataaacacgcccccaacaggccgtcctcgaaaccact

SEQ ID NO: 537681 - DNA, 1144 bp, Homo sapiens
aatcctcttcttcttttttgtggtgaggaggagagcggtagctagtgactggcggggcgagcagtgggacgaagagaggcgcgagtcaggagcacaccctactgtgttgtgaccagcctgcgtgagggcgaccaaggatcgtttggttggtccacgacgtcctagtaggtacaccggtctgttgtggcgtgcactcgatccgacagaagtgtaggtcacgagcgggacagtgttttctgcgaccaaaagttgttgtccgagggtcttcccgcctccgatatgtaccgggtggcgcgttctatatgtgtcgtgtgggagacctgtgcccgcaacccacgggttttgatgtccgcggtgtgccgcgggtcctctcgtatgcgcctggatttgggccgccacattctggtgggggtccgtcggcgtgtttgcccccgcgatgcgtgcgttgttagtcgctccctgatgggggtccgccgctcacgccgcagcaatctagtggtgcgtatctgtgcgggcgggtcgctgttctatatacttggagccagtggtctgcgtaagtcacaatgagcccccgtggttgtttgtccccccccagggtgattctgtgagaggaacacaatcgggggcctctcgtattgatatctatgcgcggcgttgacaacaggggagaactcctcctgccaaagagccgggcggccccacgcccacgagagtacacacacagacttctgtagaaacaatgcctctgtcttgctttctatacatgtctctcccacgccccccgcccccacaccgccctcgtttctggcacactactacgcggcggtgcgtgctggcagaaagtcctctcggagccacatcacctgatggctccatagtgtcgaaaagagagagggttcaccgcaacatgtctttgggcgtggagagtttgcaacaactgtcaatacacccctggtggagacatcactcaccgcccacagatcccaccggttcgccttttttctccatttttcattataaattagtattccctccctatcttttaataagggctatcttttctactaacactcccctatatatcctcccagcatccccacgtgcaaaataaaaggttcccctaaatacccacaaatacacaaaa

SEQ ID NO: 537682 - DNA, 156 bp, Homo sapiens
gcgtggtctaggaataggggggaagtatgtggagtgaagatagccgcgtagtggtgtactcgtaggtcagtaccatgggtggccaattgattgatggtaagggagggatcgtgacctcgtctgttatgtaaaggatgcgtagggatgggagccact

SEQ ID NO: 537683 - DNA, 417 bp, Homo sapiens
ctacttcattgtttcttcttctgtctgaacatttatttatttttctttccaacttttaggttcaaggggtaaatgtgcaggtttgttacatgggcaaattgtgtgttgtgggggtttggtttatagataattttgtcacctaggttatcagcgtagtacccaacctgtaggtttacattcctcacactttcccaccgtccaccctcaagtaggccccagtatctattgttcccttttttgtgtccatgcgtacacgatgtttaccactcacttataagtgagaacatgtggtatttggttttctgtccctgcatcaatttacttaggataatggctccaactccatccatgttattgcaaaagacataatctcatttttatggctatgtagtattgcatggtgtattatgtaccatg

SEQ ID NO: 537684 - DNA, 236 bp, Homo sapiens
tggtgtggtgatctagaggatcccggttaggtgataatagaagcttgctaaaggggctgtcatttggtgggcagctgaggtgagcccgagcttggtttatcccaagctgagggcaggtagtctgggaggactgaactcagccaaggcagccagagttgcggcatcagggccaggactgagctcttgtgcagcgggtactcgagctctgaattgcgatgagtcatgagtcatagtca

SEQ ID NO: 537685 - DNA, 113 bp, Homo sapiens
tcgctggtaggtctggatctgctggccaatgtgctcccggtaggagccgctcaggagtcttctgtgtcactgccaccagctggatcagttcagacttctccagggagcactaa

SEQ ID NO: 537686 - DNA, 109 bp, Homo sapiens
cctcacaagaccctgatcaatagatggagacatacagaaatagtcagaccacatctacaaaatgccagtatcaggcggggcagaagcaggaagcggcagaagcaggaag

SEQ ID NO: 537687 - DNA, 1109 bp, Homo sapiens
gagcaagaagtggggacctcagaaggaaagccaatcagcagcctggatgccttccccactcaggaaggtacgctgtctccagatgaacctggacagacgacccagatcgccgctggtccgtctatgcgatgtacaaatcaatgaatagtacactgaagtccatcagtgaatgaagaaagatggtaacaaagagttcaagatggcagcaaaaaacgaagtcttcagttggttggcattaatggagggtatgaatacactcttcacagtgatgagttccagtctcacagtgaaagctcttcttccgagtcagatgacgagtgtgatgtcattgagtatcctcttgaagaagaggagagaggaggaggatgaagacactcgtggaatggcagaagggcgccatgcagttaatactgaaggtttgaagtctgccaggggtggaagatgaaatgcaggttcaagaatgtgaacgctgagacggtggcaatcagagagaggtatgagttaagtgacagagatgtagatctgcatgcaacttactgaactaatactataagtgaccccaaagcttagagcagcaaagatcatgaggtactggtctgaaacatcctccagcacgagtggtatccgcgtgtccagtcagaagtcagcatccagccatggtggaggaactacataagctggcttatgaaggccaatatcccaaatgtcctacggctagtcatcagcttcgcagaaggagaggaaaaaaggcttccatacagcgggtccatcgaactcgagatggtcagctggcggtacacggccagagttaaacgggataccagacacagaagacaaaccccagcacaatgagggaccaccaggtgcgttccacccaccaggacagagcagcggcacacaccccgcccagtgaccagttaccaacacaagttacagcacagcggaacaacaatagcgaaaagcagtaaccgataagtctgaccagcgtgaatacaaagcagaacgaacagatgtgcgcacgcgaagctgagatcgccgagacagacaaaggcaaccacacagcgctacatgcccgtgcttgctgcatgctgtgccgcgcagtacgcacg

SEQ ID NO: 537688 - DNA, 225 bp, Homo sapiens
  misc_feature (3)..(3): n is a, c, g, or t
acngttacagtcgtcatttccaaatcacgtagtaatctttatagttccgtaaggacaaaaattcaagatactgttttatatttaaaaaaataatttgcacccgatagtcccagctactcaggaggctgaggcgggaggatcacttgagcccacgagtttgagacaagcctgggcaacatggcaaaactccgcctctacaaaaaatacaaaaattagccggatgtg

SEQ ID NO: 537689 - DNA, 372 bp, Homo sapiens
  misc_feature (31)..(31): n is a, c, g, or t
  misc_feature (273)..(273): n is a, c, g, or t
gacgtttaattgactcacagttcctcatgtntagaaaggcctcaggaaacttacaattatggctgaaggcatctcttgacagagcagcaggagagagaatgagtgtcagcaggggaaatgccagacactcataaaatcatcagatctcatgagaattcactcactatcatgaggatagcatgagagaaaccacccccacgattaaattaccttccacctggtccctcccatgatatgcggagattatggaattataattcaagatgagatctngggtggggacacaaaaccaaaccatatcattttgcccctggcccctcccaaatctcatgtccttacatttcaaaacacaatcatgcccttccaacagtg

SEQ ID NO: 537690 - DNA, 165 bp, Homo sapiens
ataaaatctgctgttcatcacctccttttatgctgctgggcgcgtccacagcaagactccaagagtcagctgcaaagtccttctcatccatctcaaagtcactcactcagctcactgtacgattacctctcgcttcgtcaatggcgggattccacacgtgagctg

SEQ ID NO: 537691 - DNA, 471 bp, Homo sapiens
  misc_feature (26)..(26): n is a, c, g, or t
  misc_feature (311)..(311): n is a, c, g, or t
  misc_feature (403)..(403): n is a, c, g, or t
tttgccaagaagcacaacaagaaagncctgaagaagatgcaggccaacaatgcaaaggcagtgagtgcgcgcgcagaggccattcaaggccctggtgaacctcaggccatcaagcccaagatgccaaaaggccccaaactcaagcggctggctttcatcgctcaccccaagcttgggaagcggattcgaagctacatggccaagggtcagagctctgccaaccgaagcctaaggtccaaaccaaggcaggggccaaagctccagctaaggcccaggcttcagctccagctcaggctcccaaaggtgctcangcccccaaaggtgcccaggcccctgtgaaggccccatagaaaaggctcctgccagtgtgaagacagacggactgctgtgacacacctccccncacactatttgcagatgaccagtgtcctatgctgttcttacaaataaactcaggcaagatctgttaaa

SEQ ID NO: 537692 - DNA, 563 bp, Homo sapiens
gacgttcccatggtagaaaagaagagcaagaaacccaaaaaaaaaaaaaaaaaaaaaaaaaaaaaaaaaaaaaaaaaaaaaaaaaaaaaaaaaaaaaaaggggggggggggttttttttttttccggggggggcctttttgggccccccttttttttggaggggggccccttgggggggttttttattagaaagcagcagacgggggccgggcagtgtttaaacagcgtcgtgggggggggaaaaaagctggtgcatcgtgggagacatcttgtgggagggagagaccctaatcattggtgggggggggggagacatattgtggggaaacaacttaaccttatagaagtagtattatagactgccctggaggggatataataattatacttttctacggggtgttatgggggggtgtaacacaaacaagcgggaatgatgttgcgtgggcatgagtgaaaaaagatgggtgtgcggactaggatgataattatgtctatttcagtgaaatattattatttatacacgggggagtttatttgagttaaaaatgaaggggaataa

SEQ ID NO: 537693 - DNA, 605 bp, Homo sapiens
cggacgcgtgggtcgacccacgcgtccggttctagatcgcgagctgccgacctttattttattatttttggtttatgggttttttttaggagccattttgtccccaaggttgaattagctactaaaaatcccaattaatgaactcctcacagggaaagagcaatctatcacccgtatagcaagaactaatgtggagctatacagataacgcatgaacaaccatgtcttcctccgctataagcctgcgtcaaattaaaacactgaacatgacaattaacaggccaatatctaaaatcaaaacaaacaaagtcattatataccctcactagttaagaccaaaaagaaagcatgctcaatacaacggacacaacgggttaaaacaacacagttaagcaacggacacttcgggcaaaaattcttttaacccccgacctgtttacccaacataatcaatcaacattcttagcattcacccaagtatataaaggaaccgtcattgaccaaggtgacacaaattgtataaaacaggacggtggaaaccctaaacccggtgcacaggtaacccataatcacttgatacattaaataagggacctgattaatgg

SEQ ID NO: 537694 - DNA, 159 bp, Homo sapiens
tggtccctcgcgacgtgttatccctccttccaggaggcgcttcgcagtgaggtgcgggctcacggcctcgagtctctccgggagcacgggctgcggtgcgctggcagcttacggggcggccagtccttgccccacaagcgctgtggacgccctgtgaaa

SEQ ID NO: 537695 - DNA, 165 bp, Homo sapiens
ttttttgaagagacggggtttagggccaaattttgcccaggcgtgctcctttaagacttgggactcaggagatccgcccaccatggcctcccaaagtgctaggattacaggcgtgaaccaccatgcttggcccatctattatgtttttattgctctgtaacaaat

SEQ ID NO: 537696 - DNA, 447 bp, Homo sapiens
aggctggagtgcagtggcatgatcttggctcactgcaagctccacctcccaggttcacaccattctcctgcctaagcctcctaagtagctgggactacaggcatccaccaccacgcccagctaatttttttttgtatttttagtaaaaatggggtttcaccatggtagccaagatggtcttgatcccctgaccttgtgatccacccacctcggcctcccaaagtgctgggattacaggcgtgagccacagcgcctggccaactttttttgttttgttttgtttttaagttccaggatacatgtgcagaacatgcagtttgttacataggtatacatgtgccatggtggtttgctgcacctattgaccagtcccctaagttccctctcctcacctccccaccctctaaaaggccctggtgtgtgttgttccccttctgtcgtcttctc

SEQ ID NO: 537697 - DNA, 236 bp, Homo sapiens
cggccggggagatatagggtcgaatccgcactcgtaaggaggtggatttttctatttagccgtagagttgcgatacgtcaaaaggtaatagttattagtagtaaggctaggcgtccgtgcggtggccgctacggatgctgaccgctcgagggtcgcgattctagttagcatgccagagtcccgtcccgttactcggaattaatccagacaatatcgctccacgcaagtaagaacgg

SEQ ID NO: 537698 - DNA, 771 bp, Homo sapiens
tcttaggagggccccgtggggctagggaagtttggttgcaggggcgccaatgtctcgcgtggagtgacgcacgcatgttctgtttattctggaggccgaaaggtgtgggggttccagaagcaagaaagtgtctgtctctcccctccgtgccacccttttttcgaaggcaccaccaagtatagacagtgggcactacatcgaatctgtttttggacacttgtagagaaccagtacacttttagattcgcagtatcttctgtgtaatattttgatttgtttttcctgttagctttgaaaagttgtataatacttaactgactgtagccaagttttatatgtggtagcataccggtgaatttatcctatgaccaaactgttctgaattttcttttggtgtttaaagaagaccaaacttgttgcttagaagccctgaattattcttattttgacttcaactgtcgaaacttccttgttttaaaaaatgatcatttgggttcaactcacggagaatgcatgtcacggaaacttgtattataagtttacttagttgtgatgtactcagtcaactgctgttacccctttttcacaagaaattgtaattgacttttgaagttttctagattgtcacactgctttgtgacctaactgccaagaaagcacactcctgtgttgtatttgttctagtcatttttattcaggctatatattgtagcttaatttttatttgcaattaatttatttaaactaagtaatacttttccaaaatacata

SEQ ID NO: 537699 - DNA, 236 bp, Homo sapiens
agcactctgagcgcctgtttgccaacgcagtgactggcagagaccgagacaagacgattccagccccagcctttttcactatctaccccaattagctccccatgaatcaatgtacaaatcagcacccacatcccctattcttgacaaatgatttttctagagaactatgttcttccctgacttatagaggaaggtgaatgtgttcccgtcctcccgcagatcagaaaggagactct

SEQ ID NO: 537700 - DNA, 899 bp, Homo sapiens
  misc_feature (121)..(121): n is a, c, g, or t
  misc_feature (147)..(147): n is a, c, g, or t
  misc_feature (164)..(164): n is a, c, g, or t
  misc_feature (173)..(173): n is a, c, g, or t
  misc_feature (175)..(175): n is a, c, g, or t
  misc_feature (204)..(204): n is a, c, g, or t
  misc_feature (210)..(210): n is a, c, g, or t
  misc_feature (273)..(273): n is a, c, g, or t
  misc_feature (299)..(299): n is a, c, g, or t
  misc_feature (317)..(317): n is a, c, g, or t
  misc_feature (335)..(336): n is a, c, g, or t
  misc_feature (368)..(368): n is a, c, g, or t
  misc_feature (373)..(373): n is a, c, g, or t
  misc_feature (382)..(382): n is a, c, g, or t
  misc_feature (394)..(394): n is a, c, g, or t
  misc_feature (398)..(398): n is a, c, g, or t
  misc_feature (413)..(414): n is a, c, g, or t
  misc_feature (421)..(421): n is a, c, g, or t
  misc_feature (453)..(454): n is a, c, g, or t
  misc_feature (488)..(488): n is a, c, g, or t
ggggaggtccctgaggccgctgaggtcgtccggtgtctgttgaacggtctgtgggcgtcttgctgccttgggtagggggttaaaatcgttcttgagaggaacgtctctgtgcgaagagatnatgagttagctctgagaagtgagctngtagtggacaaaacaangaggaaaananagaagagaactgtctgaggaacagaaacnaagaanttacagatgcttttgaactatttgatacagacaaagatgaagcaatagattatcatgaattanaggtggcaatgagagccttggggttngatgtaaaaaaagctgantgtactgaagattcttanngattatgacagagaagccacagggaaaatcancttgngaagatttnaatgacgtggtngacnggactggatatgggnnagagatnccccatgaagaaatatctcaaggcatttaacnntatttgatgatgatgattcaggtaaaataagctngaggaatttgccgagtgttggtagagaatttgggtgaaaacatgagtgatgaagaacttcgaggtatgatagaagaatttgacaaagatgggtgctggggaattactcccagaggaggttcaattggctaatgaattgatttgcttgacattttagctgaattccggggttaacagctaggaaatgttggagttaccagtgttagaattcaaatttagggctggggcattgtgaaaaaaaccaactaaggttttattctttagggcaaaaaaggttttatatttggttacacatggaggggctggtggaagggggatgcacaaatgtgaggggataaaaaagttttaagagaaaagggtattgtgggggggaaaaaaaaaatgggagacaccggaaattttttgagaaaag

SEQ ID NO: 537701 - DNA, 245 bp, Homo sapiens
  misc_feature (18)..(18): n is a, c, g, or t
  misc_feature (21)..(21): n is a, c, g, or t
  misc_feature (37)..(37): n is a, c, g, or t
  misc_feature (76)..(76): n is a, c, g, or t
  misc_feature (82)..(82): n is a, c, g, or t
  misc_feature (84)..(84): n is a, c, g, or t
  misc_feature (120)..(120): n is a, c, g, or t
  misc_feature (131)..(132): n is a, c, g, or t
  misc_feature (137)..(137): n is a, c, g, or t
  misc_feature (139)..(139): n is a, c, g, or t
  misc_feature (155)..(155): n is a, c, g, or t
  misc_feature (171)..(171): n is a, c, g, or t
  misc_feature (173)..(173): n is a, c, g, or t
  misc_feature (175)..(175): n is a, c, g, or t
  misc_feature (179)..(179): n is a, c, g, or t
  misc_feature (204)..(204): n is a, c, g, or t
  misc_feature (213)..(213): n is a, c, g, or t
  misc_feature (228)..(228): n is a, c, g, or t
  misc_feature (245)..(245): n is a, c, g, or t
cgtggagaaaatcaaacnganagggctgtgtgaaacntggttgtaatatgcgactgcgaacactgaactctacgcnactccngnaatgatgttttcaggtgtcatggactgttgccaccntgtattcatcnngagtncntaaagtttaaagtgcncgtgattgtataagcntncntccnttgagttttaaattatgtataaacntaagttgcntttagaaatcaagcntaaatcacttcaactgn

SEQ ID NO: 537702 - DNA, 973 bp, Homo sapiens
ggagtatactcaggcttctctcccatcccgaggctgtgtggagccaggtcgcccacagctcctccctgatggccgactcttagccaacagcaagcccgatccaggccggcctgtccctccctctactggggcccagtccacggccacccaccagtctcaagacatcacatcagcaacagaacagaacagcagcagcagcagcagcagcagcagcagcagcagacagcagcagcagcaggcagcagcagcagcagcatcacggaaactctgggccccctcctcctggagcatttccccaaccacttggagggcggtagctcccaccacgcacacccttacgccatgtctccctccctggggtcgctgaggccctaaccaccaggggcagaacagctgccaccacctcacagcaggtgtactacagcaccaagcgaggccccaatggtcctccagtctcttcctcttccaattcttcctcttccacttctcaagggtcctacccatgttcacacccctccccttccccagggccctcatggggcgccctacctttaccaccggtgactacggtcacactcttcggatacctttccagggtcatggcaccgtggcttcctcgccagcaggtacaaaacggctccccagctgagccccacgtacggaaagagagccccgtcccgggggctacaagaaagcacaccacgcgaaaaaaagccgggtcggtcctctccgaagggagcccagcgggtacgaagaactcgcacctgcagccagactcagcggcgccacggagctggcctgcaactggagcctagcccatgtgcacacctgggccgcggcggcctgagtacactcacgaggcggacacacaaaggaggagcaagacgactccagtaaaagacagcacacgacacagcacgaacccaacaccaccaaccacaaagacaaaagacgacaacgcgcaagcacacga

SEQ ID NO: 537703 - DNA, 127 bp, Homo sapiens
cccttttcccttaagagattagatcgtctgaaattattattaaacgaaacgttccgtatcatagcacagcgaggtgaataaaaacagctttcgagtgggttttccccctatttggagtctgctgtta

SEQ ID NO: 537704 - DNA, 418 bp, Homo sapiens
taagcccatggttgaagatgatgtagtccagatgaacatctgcatcttgtgtctactcgcttggggtttgatggccatcacgttgcctgtcaatgagtggccatggtgccccttggtggcttgcctgcggtgaagtcgctgtgcaccttgaatatggcccttactaggagcagcctgttcaggcaggttcttgcgaggcagatccctctgtctgtctgcagctcctcattccagtctcgggtctgtccaggaatgtgctcctcatagcccagcctcgatgtgtgtaggctgtcctctgcacgcatgcaatcaatggcatgctccgccttggggggttgtccagctgtacacctggaatggggtgccgatcctctcgaacggatggcgctggacccttttcttctgcagcacagtgaag

SEQ ID NO: 537705 - DNA, 168 bp, Homo sapiens
aagggacattcgtgctaggtgctgcagtacgtatgtggagtccaatggcgtcttcaccacccatgtcagaaggctaggaggctcatttgccaggtgggcagcccacaaagggtcctcatctactgccccctactgctagacgccccccatgttcgtccatagagtgtg

SEQ ID NO: 537706 - DNA, 826 bp, Homo sapiens
agcggggtgggctggctcgctctctcctggggagacagaggtcggcagtgcagcgcacagagggacctacgggcagctgtgccttgcccctgagtcaggaatccccggaggcccggaggcctgctagcaggagcggtcatgaagaagctgatgggggtgctgagtctgattgctgcagtcctgaggcgagatggagcatgacataacgttggtgcatgtgcaggacccatgaggacaaagactatctcagcacctaccagagctgacccgtctacagcctcgtgggccagattgcatcttgtggatggaggtccattagtgccatcgcacctgtagggtccgtcacaagctgactaccacgtgcataatacaacactgaagtcttacaggagtcattccatggtggcacgcataacacattcgggcacaatgggacgtagttccccacggagtcacagagatcgtgatagtgccaggaggcatggtgagtccgacacgcgtgaactgtatgatagccagagcagggcaatgtaaccaggaccatcaattgcggtgatagtgacgccctggtaacggacgtcaagcgaaagctactactgaaagtctatccacgaacccttttcgcactgggagggaggcgaaattggctccagaccgaacacgcactccggactgggcacattccatgggctgggggcaaaggaccaggcagcatggtgaaatttcccgtgtacatcaattccaagtgtggcatcgaattccaaactgggtgtgcccgtgaggaggtgtgacgcctgcatacgctgggccgaagaaccgacgacac

SEQ ID NO: 537707 - DNA, 241 bp, Homo sapiens
caacgctttatacttctcaacgcttgatcttcataccgggcaatgcgatgagaagtattaagcgttgaggaagtataaagcgttgagatgtataaagcgttgaggaagtataaagcgttaaggaagtataaagcgttaagaaagtataaagcgtgaagaaattataacgctttaagaattataaagcgttaagacgtatcacgcgttaagaagtataaagcgttaaggaagtctacagcgt

SEQ ID NO: 537708 - DNA, 395 bp, Homo sapiens
  misc_feature (260)..(260): n is a, c, g, or t
acttagggactggcagacggacggacggacggcgaggaccctacccgagcccccgagccatggccgagagaaagcaatccgggaaggcggcagaggacgaagaggtccctgctttttttaaaaacctgggctccggcagccccaagccccggcagaaattctgtggcatgttctgcccggtggaagggtcctcggagaacaagaccatcgacttcgactcgctgtcggtgggccggggctcggggcaggtggtggctcancagcgggacgtcgcccacttgggcccggacccgcagccgccgtactcgcggcagggccggcgcgccggcggagagccatctgttgaatcgggccggaaggtggagatccggagggcctcgggcaaagaagccctg

SEQ ID NO: 537709 - DNA, 234 bp, Homo sapiens
  misc_feature (32)..(32): n is a, c, g, or t
  misc_feature (158)..(158): n is a, c, g, or t
  misc_feature (202)..(202): n is a, c, g, or t
  misc_feature (211)..(211): n is a, c, g, or t
atgctgtgcctgtgtcaagtctggtgatgagnaccaggacttccagctggagggcagttaacatcactgaacctgaggcgagaacagaaagcaggacaagcgcttcgccttcatcccgcttcagaccagcggcccccacccacccaatttttgagtcntgcccgccctgccccccggtttggtttccctcttgcaacaagcngaatggaangcttgaacccagccccgttcaag

SEQ ID NO: 537710 - DNA, 220 bp, Homo sapiens
  misc_feature (216)..(216): n is a, c, g, or t
  misc_feature (218)..(218): n is a, c, g, or t
taagggcactataggcggtttgttgtctgttaccaagtcctggcatcatggcgtctcggatggcattatcgctattccatttcatacggaaattctcagggtacacatcatgcatcattaaaccgcatactaagggcctggctaagacgctacaggattcacaagcaatgataacacatattgggggggcctctgtggtttcttggtcccttcggngnct

SEQ ID NO: 537711 - DNA, 209 bp, Homo sapiens
agtctcgctcagtagcctgcaatctctgcccccggggattataatcgcttctcctgcctcagcctcccgagtagctgggactacaggcgcccaccaccacgccgggataagatttatgtatttttagtcaagacagggttacactagtgtcagcccaggctggtctacgatctcctgcaccattgtgatcccacctgcctatggcctcc

SEQ ID NO: 537712 - DNA, 946 bp, Homo sapiens
  misc_feature (103)..(103): n is a, c, g, or t
  misc_feature (127)..(128): n is a, c, g, or t
  misc_feature (145)..(145): n is a, c, g, or t
  misc_feature (177)..(177): n is a, c, g, or t
  misc_feature (191)..(192): n is a, c, g, or t
  misc_feature (201)..(201): n is a, c, g, or t
  misc_feature (211)..(211): n is a, c, g, or t
  misc_feature (243)..(243): n is a, c, g, or t
  misc_feature (262)..(262): n is a, c, g, or t
  misc_feature (264)..(264): n is a, c, g, or t
  misc_feature (555)..(555): n is a, c, g, or t
  misc_feature (557)..(557): n is a, c, g, or t
  misc_feature (564)..(564): n is a, c, g, or t
  misc_feature (567)..(567): n is a, c, g, or t
  misc_feature (593)..(596): n is a, c, g, or t
  misc_feature (600)..(600): n is a, c, g, or t
  misc_feature (610)..(610): n is a, c, g, or t
  misc_feature (618)..(618): n is a, c, g, or t
  misc_feature (624)..(624): n is a, c, g, or t
gagacaaggttttccaagcaagatgaagcccaacatcatctttgtactttccctgctcctcatcttggagaagcaagcagctgtgatgggacaaaaaggtggntcaaaaggccgattaccaagtganntttcccaatttccacanggacaaaagggccagcactatctggacaaaanggcaagcaacaaanngaatccaanggcagttatnctattcaatacacatatcatgtagatgccaangatcatgaccagtcccgananagtcagcaacccgatttggattggccttattagagacgacaaatatacaaagagatctctgaggtgagaagtcaaccaagtgcctccataataaacaagaacggcagagcaccatgcatcacatcacaaggtcattttcacagggtagttatacaccatacaaggaggcaacagctcatcgtgggacacaaacatccttctcaagatcccggcgaatagcccatctggaccgggcatatccagtcaatattcaaacaccagaagaacggctgtgggttcatggactaagtnangaccaanttnccgtctctggtgcacacaaaggtcgnnnnacanggcggatccnaaagcagntatgtnctccaagacttgtgcactaagctagttagcatacaccaacaaaacaactgttgcgccttacagacaatttctcgattcacaacattaccgggcgacttacccacaatattgttggtattaacagctgtagaagagggaaacattttccaaaggtgcaaggcttaaaagaatttaaaattgttgtcttgtggcaccaatgaaaaaaattcacaaagtgtagtccagaaacaattttattttacacaatgtggtgggtactagtatattacgagaatataaagtgaatcaagatgttcaagaaagaaacaaagagttcgaaagg

SEQ ID NO: 537713 - DNA, 709 bp, Homo sapiens
cgcggtggctcacgcctgtaatcccagctctcagggaggctaagaggcgggaggatagcttgagcccaggagttcgagacctgcctgggcaatatagcgagaccccgttctccagaaaaaggaaaacaaaacaaaaaaaaaaaaaaaaaaaaaaaaaaaaaccccacagcacacaaaaacaaacaaaaaaaaaaaaacacactgttgtgggggcgcgcccccgccccccaggaagaatctttacacccacaagctgggggggggcggcggggcccaaagagaagaaagagaaaagagggcgacacagcgggttcccacgaaagaaaaccagcggggtgacaaaaaaggagggggggagcacaccacaccaaaaataagaaagagccgcgcgggggagaacacaacagaaagaggaaggaagagacacaaacacaacaaaagaagagagaaacacagagaggagacacaacaaagaaaggaggagatctaaacacacagaggagggagagaacacagagcgagaagcagcagaacatatacaaaagaatagcacccccccggcggtcgggggggggggcgcaaacgaatagagacgaagaaggaataagataagcaacaaatgagaaagaaacgagcacacaacagaaaagaaaaagacacaaaaacagagacagaacacaaacagtcgaacacagagagaagatcacaa

SEQ ID NO: 537714 - DNA, 297 bp, Homo sapiens
tagatagcctggaaccatgccagatgatcttctgaccacattggatgacacttgtgatctctttgcccccctagtccaggagactacttagcagcccccgcagacggtgaacgccgattggtcatctcccagaaacgttaacaaaacccgaccaggttgcccccttcaacttcttacaacctcttcccctttccccaggggtcctgtgctccactccagatcattcctttaatatagagctgggcagtgaagtggatatcactgaaggatataggaagccagactacactgctaacg

SEQ ID NO: 537715 - DNA, 165 bp, Homo sapiens
gttttctacacgtcattgaataacaatggaaaatgagaagatacagccaggtgtggtggctcatgcctgttatcccagcactttgagaggccaaggaaggagggtcgcttgaccccaggagtttgagaccagcctgggaaacttatagtgaggctgtatgtcaaa

SEQ ID NO: 537716 - DNA, 1016 bp, Homo sapiens
ggagcaagacctctgagcccgccaagcgggcggcggacggacctcgtgtggcgatggcactgagggactacgcgctagcagaaggaaaaggttaagaagttcttacaagagttctaccagggatgatagaactcgggaagaagcagttcaagtatgggaaccagttggttcggctggctcatcgttgaacaggtggctctgtatgtggacctggacggacgtagccgaggatgaccccgagattggtggacatctaagatttctgtgagaatgcctaggtggctacgcgaagcttgttctgcttgatgccgtacaagagctgctgcctcagctacgaaggagcagggcacatgtggtcatgataacggatgtcctggggccgttgttccttggagcatcggcatagtgatgggagcacgcggcagtcgggcaccctgggatggtccgaagcccccagtaaccatgttaccccttgcgtgaatctcatcgcggcagatttgagctgtgatttgcaagggcctatgggagcaagaatgcctcgttgtgatccggggaatgtgcgtggcatgacttcttgtgtgggcacaggttggtgagcttgtgcgttggctatcggtcactctgtgtctctgaagttcataatcccaaagatggtgttggccacttacatttgtgaacagtgtgggggcagagacctaccagccgatccagtctcccactttcatgcctctgatcatgtgcccaagccaggagtgccaaaccaaccgctcaggaaggcgggtggtatctggcagacacggggctccggagttcatcaaattccggaaatggagattgcagagaattgtgcagggggcgcgggggaaaaatacctcgggattcacggggtgtgaaagggagaacaggttgcccctgggacagtggtaggatttggcaccggccggtcccgggcagggtcaagccggggccgttgaccccgaggaatgggaagcggggggagtcagggccaggggacg

SEQ ID NO: 537717 - DNA, 92 bp, Homo sapiens
gaagtcctggaggacctgggacccaggccagctcccatcgctgggggacggtgaacggacatgtgttaatgttacgatgtttttataagaca

SEQ ID NO: 537718 - DNA, 532 bp, Homo sapiens
gtatacccattcttctgctcagcctcctgagtagctgggactacaggtgcctgctaccacgtctggctaatttgtgtgtgtgtgtgtgtgtgtggttttttttttttaagtagagatggggttcaccgtgttagccaggatggtctcgatctcctgacctcgtgatccaccctcttgggtctcccaaagtgcggggatcacaggcgtgagccaccgtgcccggccaggtgggattttataagtagtggggccactaaaatttctgagtggtacagtttcatgtctttagtgggcagaccaaagctgatccactcataaaattttatttagggctctcctttgacgtgagacaggtggtatatttatgggccccgtaataggggctacattattggacctcatatttcagtttgtgtcgcaaggtttggggcataagagctaatgtataggaagccctgtgctaacatatgctgagtatgagtaagtagtgggttaccaacggtttttcatgaaatatctgcattacaccaca

SEQ ID NO: 537719 - DNA, 408 bp, Homo sapiens
agattgcatattatactgctgccacgcaatgagttggtgtttacagtgttcccaaggagtggcttatcttcagagcatgcaaccaaatgcgctaattcacagggatctgaagagcaccaaagtcagtaataataatgttactaactgtcagcctcttactctttctctctcactctcaacactcagaacccagtctctaattctcagttaatcgtaatgctgaggctggaccaatcgattggatcgaggaggtggggtggactgagagcgagcatcgatcgactgacatgtccatccatggtggcgacgtgatgagagtccgtctcaaaaaacaaaaagaaaaaagaaagtaaaaaattaaaagcaggactgatggagcatatgtatatgtagaaaaatacccagtca

SEQ ID NO: 537720 - DNA, 271 bp, Homo sapiens
ccccccccccaaaagggttttttcccctggggggaagccccttggggggttttttttttccgggggtttttttcccccccccccccccgtttaaacccggggtcccggggattttttgggggggtttttttttctttaaaaagggcccgttccccgggggggggtttttattttttggggttcccggggccccaaaaaaggggcccccggccccctttgcccccccttgggtttttttttttggccccttaagccccctttttttggggga

SEQ ID NO: 537721 - DNA, 697 bp, Homo sapiens
cacctccaaatatctcatcaacaaccgactaatcaccacccaacaagtgactaagtcaaactaacctcaaaaacaaaataataaccatacacaacactaaaggacgaacctgatctcttgatcactagtatccttaatcatttttgattggccacgaactaacctcctcgagactcctgcctcactcatttacgaccaaccacagcaactatctataaacctagccatggccatccccttatgagcgggcgcagggattataggcttgcgctctaagattcaaagaatgccctagccgcagcttcgttagccacaaggcacacctgacaccccttatcgcccatactagttattatcgaagaccatcaggcctacgtcattcaaccgaatagccctggccgtagcgcctaaccgctaacattacgtgcaggccacctactcatgcacctaattggaagcgccaccctagcaatatcaaccattaagccttgcctctacacgttatcatctgtcacgagttctaattctactgactatcctagaaatcgctgtcgccttagtccaagcctaggttttcacacgttgctagtaagcctctacctagcgacgagaacagcatgaagaatcgaatacaaaaaaaacttaaaagccatggtgtgtggctgggcatgagccctgggaaaagttcataaagacc

SEQ ID NO: 537722 - DNA, 403 bp, Homo sapiens
tctcttatctcaccaaaaaggagataaatttgtttacagataaacgtaacaaccagtcaaagaagcaggggataagtaagctcctccaaagttgcttgcagtgctggaaatagatctcatttttaggttttctcttcgttccagataccaaataaatgagacagagaataaaatttttgttaaaatatgtgctcatctcctaagtagctcttcagagtctgaccgtaagtaaaaacacacagaattgtgttgactgggggaggtgaatcacaaaaaagttacgaggagtttaagagttaaatattatttgatcgtggctgtcaaatttagtgaacaacatagattggatttggagatggtagtagctatgtttctcataccagaattctcttaaaaaaaaaaa

SEQ ID NO: 537723 - DNA, 476 bp, Homo sapiens
  misc_feature (31)..(31): n is a, c, g, or t
  misc_feature (41)..(42): n is a, c, g, or t
  misc_feature (75)..(75): n is a, c, g, or t
  misc_feature (91)..(92): n is a, c, g, or t
  misc_feature (107)..(108): n is a, c, g, or t
  misc_feature (121)..(121): n is a, c, g, or t
  misc_feature (123)..(124): n is a, c, g, or t
gtctcctgaaatgggaagcccagcaataccnacgcatgtcnncctccactttctcaaagcacactggaaaggccnattaggaattgccccnnagcagagcagatctnngctttttttccangnnagcaaaaattgaagcactaggtactaacactactgcttgttacccttggcccccaaaagggaaaaacctctttacaatctgacctggggcttttgggttttgggctttgggcaagctggcctttttttcctttttacacattttctattacatggggggcccttccttttccctttggcggcgaaaaatagacacttttcccccgtttccgaccacccccgtgttttgtgtggtccgcccaaaaaactggaaagccggggaaagaaaggcgccccgtttttgtgggtttttggggagggaggggcgggcgcccttttggggcgtttgggacaaacaagcgcttttgtgcccg

SEQ ID NO: 537724 - DNA, 823 bp, Homo sapiens
ggtgtgcgtggggtgtgggcttcgctcagctgcacaacctggacgaggcggtgggcagcggcggcgaggaggacggggagcccgggggaggcggctgcgtgcggcggcggcgacggcagcgagcccggcgagagcagctcgatgcacatctgccactgctgcaacacctcctcgtgctactggggctgccgctccgcctgcctgcgctccctcctgggtgcatggaagcctgctgccgcagcgcctggcgccagacgggggggaccagcctgctgcagcctcccgcgagccccgtgcgccggacgcaacccccgaggccctcgtggcggctgtgtggagcctgccgccgccgcaaggtggagcggccgtggctcgactgcctgtggatcgtgctggcgctgtggtgttcttccgggggacgtgggccaccgacctgtgtgcatggacctcgacatacataccgcaaggggggactacgtatacttcgagcctgaccctcattcttcggtgctggttgccgtccgctgctggttgcagagcctgagcttccgctggcttcgtggcaaggactacacggagcggccgggcttgggcgccgttgcagcgggctcaccatgccggggcccccaatgattgggggccggtaacgtcacgggcagcggcccgggtggccacgcagtagggtctcccccaacgccggggcagcagcgctgtgtcgcctctcccggtggatctagagagtcgggtatccacctgatgagatgcggaaggtcgtggagcttaaggaaagacatgagggctcagctaaatgaagatgttataa

SEQ ID NO: 537725 - DNA, 920 bp, Homo sapiens
agataccataggcctgggcagaggtaactgaaacagccttttgtaacggagtgaaccatggggaacctactcttaatgtcgagttataccagtgtaaccacctgacaagggtaccccatagagagggtctattcccatggggtcccttctgggcccgttgtattccccgccccgcccttattttgccgaggtccacagcataaatgccccggtgacaaacagcagagtgtcgcaccaggtacaaatgccacctttggtaaaccagcttgtacccgcccccgttgcactgtgggggactccacccaggaacggggtggggggaacaacccacaaacttgaccggcgtcaacgtgtagaaagtggaggacgcccaccctgtgtacaagcgcggtcccccggggggattttaatgtaaacttagaccctcccaaacgacccacacacggtgttttaaaaggtttaccaagaagacgccgcgtgttttgcctagaaacaatatgataaggagggagatagatatcgcaaagaccatttgagcgccaagctctaggaatagccccgcgtgaatgtttttgtgtcctcgcgagacacctgttgtctctttgagagacagctgggtgaagatccctacatcacgacctttccgcggacaaacttctagttggttcaagccacccgtccggaactcctccgtcttacatttgtgggcaacccccctccagactggcgtggtagaattcgagggtgtgtctgtacgcggagaaccccggtggaaataagttcgttttattgatacaagtacaaaagttttgggggcgccgagatcacgtgttgttaactctctcgataatccggtcatcggtccccaaaaacaaaaaaaccttggcaaacacaaccaaaaaaaaacgccccacaaaaca

SEQ ID NO: 537726 - DNA, 1004 bp, Homo sapiens
tttgtttttttaaaaatccctcaaaaacggtttataatacaagtgagtttggagtcacgaggggcttatcggtaggattcctggtagcgagcgcgggcaccagggcctccaaacttttgggactcgcagcgacgagggtcagctaccagcagggtccggtcatacgggatgaggatgtcttggatctccttctgggaagcctcatccacatatttctgggtaataggccaccagggcttgggagatggcactggacggatagcataaatctggggccaggtgaccaccaccctttacacggacacggatgtctacaccagcaaatcgctccttgccgagaaagcagaacgggctccagcagctggtcctggaagcgtgcgcggtcaatcgatctccaggggccgcccgttcacctggatgagaccatggccgcgttggcagtcgggccaaagctgtcgctggcttctggggtccgaagacctgcacagactgcagcgggcccttggcacggcatgtggctccgaagcgttggactagacaaccgtcaccgtgcctgtttcccattccagatggaggggtgtcaaggctcacagctcaacaaacgggttgagttaaccattttccagggtcaaccagaacagtaggcccctatagggcacaatccgagggaagtccaagtaccacttcggggctccacatattgtgcgggaccaaagcacagtggagtctcacaagaggggttccccggtacctggggcgctgacacgtggccacacaggggccaggcctcaaaggcccaagggaaattcacccagggctgggggccccggagccacagggggcccaaaagagtgtgcgacacacagacacagggagctcacacttggggaaactgcgaccaggtgcacgcggacaaacaccgggggccacagcagtacaacgagaacgggaccccggggggacccacacaggcactagggggccagaacacaccctgtgccaca

SEQ ID NO: 537727 - DNA, 730 bp, Homo sapiens
gagtctaggtgcagctgccggatccttcagcgtctgcatctcgggtcgccccggtaccgtcgcccggtctccgcgtctcccgggtttcggggcacttggtccacagtctggtcctgcttcaccttcccctgacctgagtagtcgccatggcacaggttctcagaggcactgtgactgacttccctggatttgatgagcgggctgatgcagaaactcttcggaaggctatgaaaggcttgggcacagatgaggagagcatcctgactctgttgacatcccgaagtaatgctcagcgccaggaaatctctgcagcttttaagactctgtttggcagggatcttctggatgacctgaaatcagaactaactggaaaatttgaaaaattaattgtggctctgatgaaaccctctcggctttatgatgcttatgaactgaaacatgccttgaagggagctggaacaaatgaaaaagtactgacagaaattattgcttcaaggacacctgaagaactgagagccatcaaccgagtttatgaagaagaatatggctcaagcctggaagatgacgtggtgggggacacttcagggtattaccagcgcatgttggtggttttccttcaggctagcatagaccctgatgatgggattgatgaagctcaagttgaacaatatgatcaggctttatttcaggctggagtaattaaatggggaacagatgaagaaaaatcccg

SEQ ID NO: 537728 - DNA, 135 bp, Homo sapiens
ggggtcgagggggcaactcacagaaggggactgacagtgggcaacactcacatgccactggatgctgttctgaaaacatctgattgggtttcatgacgtttgggtgtggtggtggactgctacattatgcgccac

SEQ ID NO: 537729 - DNA, 345 bp, Homo sapiens
  misc_feature (193)..(193): n is a, c, g, or t
ctggctctgaatttagggaggcagagcttgaagtgagcagagatggtgccactgcactccatcctgggcgacaaagcgagactccatcacaaaaaaaaaaaagatttcctgggcagtaagcgggtggcccagtgcctataatcccatgcacttcgggaaggctgagtgtgggcggaggagtttgaaaccaccncggggacaagcatggcgcaaaacccatatctctacaaagaaatagaaaaaaaataagctgagtgtggtggcgtacctcacagtcccagctaccgggaaggctgaaatgggagggacatctgagcccaaggggccaagactgcagtgagctga

SEQ ID NO: 537730 - DNA, 82 bp, Homo sapiens
gggggaagggtttggggcacaggttttggtttcccttcccccttttttttagggcttaaaaaaaaaatttttttttccctta

SEQ ID NO: 537731 - DNA, 1070 bp, Homo sapiens
taggtggctctcctattggggcttgttgatcatgctgtgtgtatagtgtgcttacctaatttcgccgaatatagtttctggctacacgttctcctcataataggaggcccctgaacggtgaattagttggctatataggtgctcctctgatcgcactgactgctcgacacgtggctggcatgttggtccggggcgacactcgcttgggtgcaacacttgattcttctccccgaattgtgtttccccaaacggcccatctcgatggctcttcggagtttcctctttgatctaacatttatttccctcggcggtgggaaagtgtctcggaaccccgttgtgatagggtactcccacgtgtgcctcatagtttacattggtggttgtccaatccgggcacatcttgtagcccctctattccagggctaaggctggaccttcaaaggatgtcaagggcgttcacggcacttcccagtggaaactaataccgttgcatctgagggatccctttctaaagtacatgcattgcttggaccttattttgtggtgtgtcttgaccttgactgtccaacggaagcacggtcccctgttacattcgtggggtgcccactgtaatctctcaatttcttcggcttgaatttttgccatgttgttatcgggtcattgcttgccggtatcttcatctgtatgtggttctgtaatccatttcgatgcctttatccagcaaaacgccaagatccaggccagttggtaccctgctgtggttggagaggtccattcactgaggcctccccgagcgcatctgaatgtcccctgctgtcagactcagaggtgaagtgcatcgagaatgacgccaagctgccagggcattgggtccactgggccagcgcctggcgatactggttaggggccaggatcattctgccccttgtccacgcaccaacctaccagccctcttcgcgttctaacatagggcacctgcatggggataagggatgtatagggacgagttcacagccctgccatatgaccctggtggcgacccctcctctgtccactgcctccactgctct

SEQ ID NO: 537732 - DNA, 225 bp, Homo sapiens
actagttatggatgcatatgctacgcaggatgcagcttcagaacgcgtatgctagccacacccctacgggaaacagcattgattaacctttagcaatatacgaaagtttacttagctatactaaccgcagggttggtgtcaatgtcgtgccgagtcaacagcgctctcgcgattaacccaagtcaatagaagccggcgtaaagagtgttttagatcaccccctcc

SEQ ID NO: 537733 - DNA, 300 bp, Homo sapiens
  misc_feature (127)..(127): n is a, c, g, or t
  misc_feature (225)..(225): n is a, c, g, or t
agcaatcacataaggaaggcacctcgagtctagtaacactgtgactcttgcggtctcttagaggtacttggtggtcttggataagatctggaagaattctttggatttccagacataggctcttgtnctcttcccttactttctcccaaacaaatggcatctctctctctctctctctgtgctgagctgcctagaactgtgggtgggatcacacaagcacccttntggccattgcccttgggactgtgctaggtcagacctgaagtcagcacagcattgggtctcacccaacacctgtgg

SEQ ID NO: 537734 - DNA, 241 bp, Homo sapiens
  misc_feature (143)..(143): n is a, c, g, or t
gcggcatagtcgcagatgaatggactctcggctctcgctatcattggtaagggaccacgcagtcctcacgcatcagaatctatacactcgacataagctgtgatacgagagacgtagtcgcctcgctacgccgtgaattgatnacctgtagagtgtgtatacaggttagcccacccgatgctttgatcaagttctcggatctcccagcatgtaattgaacccacgtgcctatgtcatgttc

SEQ ID NO: 537735 - DNA, 102 bp, Homo sapiens
gtgctttgggggttgtgagcagcgatcactaccttgtaattctcgtagcgtgccgaggccttcatggtgtgctctccgcgtttgccgcgtaccaaagcacag

SEQ ID NO: 537736 - DNA, 892 bp, Homo sapiens
tttcaaccagagagaaacatgattcatatatttaagagattactgtagtgactaggggtagggtaatgggatcaaggccgagaggtgagagatcagtatagatgtatcagaggtgtcagaagacagtagttgggttggggcagaggtaacccagattggaggtatgtttgaagtaaaaaaaatatgggggtaactttgctgctggtatcatgtagaaggagagggagtaggatggtgatcccactgactaaaatggaagaacgctgagaagttcagagagcagaacagttttgtgactgttgatgtgtagccatatgatagacacacagtgcaagtgctctgagaatatcttcctcatttaattttcacccaaagggtctgagaggggggtatatcctcataatatagatgagggtagatgctaaggccaatttttgctggggaagatatggattattattcttcaagtgacattaaaatatacttggcccaaggtaccagtttacttggaaagtggcagagttggatgaaacttagcctttcaactctaaactatgggtgtttttccaagttcatgtttgaacaagaaatacaggcaaattttcctgtaggagtagggcgcaatggcactgtcgggtatactaattagacttcttcctatgtggacccaacttgcgcggctcaatgtggctcaaggaaaatcagcgccccgtttaacttttctaccctcagggccacacaactctcaagtttaacactcaccagtctttggccccctcggaattgttgggcccaaaagtaaaaatctccctcgcattgggaacaccttctcgggggaagccagagtcaaccctggaacggttgaatctacccatctcgggtgcacagtcac

SEQ ID NO: 537737 - DNA, 307 bp, Homo sapiens
atggtaagtctctacttcatggctggaggagtcatacaggataacaaagaaaaaacaacatagaaaaaaatacgcaaagtggttccctttatcgaggaagaccacagggtgctgtagggcagcacatgtgctgggcaccaggcagttagtgcaccaggaagaagaagcacaccaccgcaaatggccatgctgggtgagaagcttcagcagggaaatgaacgttcccgcaggtagtgaaaggtgcttatctcgattgtccttcgagagttgcctgcatgactggtttccagagcgcatcatcacacat

SEQ ID NO: 537738 - DNA, 1349 bp, Homo sapiens
  misc_feature (1349)..(1349): n is a, c, g, or t
agcgggggcggacgccttcgcgtcaatgttctcaccgagtgctctgcgtaggtttcccaccgtctgcgaaatggaccacatggaggggttcaaaggttcaggatcccagtacgggcaaggtgatccctctttgagtctctctccgttgggcttgttgtcggactttgctggacctcggaagccacagtgagactcccattgacggagggagtgactcgtacgatgaaggatgtgatgatgacggtacacaagacacgaccgacacggggggctcgatggcggcccgtggggacaagccacagaaggtgagttgtcgcatatggtacctccacatgtgacaccccctgatggaacgtcacggagtatatcagggcgcttacagacatgttcacgggcacgacagggacgggacgaggagtagccgattgttccgacgcatgtgaatagctatccgggaccttttcgcaattgagcaccttaagctgaaccgaagggaatggatccaaagtatgcgaatgcatgtctacgactggatcacttggggggtgacctggaggaacccctgttggccccgttttctctcaattagctcgttccccgtgaataagcgtattcactatgggggtgcccttcggaaaagtttcgaaggtaaggaaactacccattggggttagaaagtacatgatcttaacccggagggcaacgtggtgtaaccaatggagctacgtttgcttgtgagtaaactttccagattggcgttgtaaattggttaacttcccagggactttagctctcttggcgccacggacacccctggggtacatgcctatagtggacgcgcggatggaggttcttgctgggagacagaaagggtagacctttacccgataacgaacagcgtgtgtacaaatttcccaacggtcatcacaaaacctctatggattgatcacaaaggtaaggtttggcttgggcattccgcccctaagggaacgcggtcgccccatttgtgcaactaaacgagcggtttcgcgaaatgcggaattgctggacgtggggaccattactctgggcgaagagccgcggccctaattgccctttaataggaagatccctaatgcaacaggaggggtaccacaacgtgggacttcatttcacggatcgttgtgcggcacaagcggttttgtcaccccaaggacgaagggcggtccttttcaaggcacccttgggtatctcttaacggaacgcgtccgctccatatgagcccccaacaaaaggttcacctctcaattttttctcaaccatgaacaggcgagattcgtccatatgggtgagaacacagcgaaggaatn

SEQ ID NO: 537739 - DNA, 121 bp, Homo sapiens
gaggaccccctcatctcctcctttctctctctctaatatatacatgcgggtatgtagagtgtgtatatatttattttttgtgtgtttatatggtgtgtgtgtgtgtgtagtccaaaggcag

SEQ ID NO: 537740 - DNA, 694 bp, Homo sapiens
cacccgcgttgtggtacgtgggctgtgggcaaggacagcgcggtcagcgcagggtacaaggtaccgatagctacaatgcggtggggcttgccctggacagcagcttttcccagcgcttttccctgggggtgcgtaacaacttgtcccgggatcattcaacaaacgtacaaggcgcgcgcaacagtgtgtctgtgagcgtcggcctgcctgcgaatgtacagatgtccttgagtgccactgcgcagacaccgggctatcgtgacgtcatcgatacagtgacgcctcatgtaaacgatgtggatggttcgcgattcaagaaccagtacaccgtaggattcagttgggcggaccctcagttgggtggcttctcaatcggttataaccggggggccgatttcaagagccggattacccagaatatctacggcacgtggaacaagagcttcagatatgccagcgtcggtgtgaccgtggactctcagattggccagtccaacagtgccgatgaccggaacgatgacggactgggtattcgactgcaggtcagtgttcccctgggccgtgatcggagcctcagcgcattcgctcgacgtcaggaagagcgctccagtatcggcactgcctatgatgagcgtgtcgacgagacgctgaactaccagatacgcagcgacagagacttcggagggcatcgtga

SEQ ID NO: 537741 - DNA, 123 bp, Homo sapiens
actgcatctgtgcctcagtgataatttaaggatgaagaatgaccctttagactggaatggtgatcacatccacaccaatttcagggatatgtaccagcatctgagaagcatgggcgtactttg

SEQ ID NO: 537742 - DNA, 465 bp, Homo sapiens
gcgtgtttatagcttatccagtagttgggatgggagcaagttcacaaggaataggacttaattttgggaaaaactagaaacctgacaaagcattgctttgggagtgtctgtgacggtgtgtgcagaaggagttagtgtgagcatctgagtggaccaggtggggaagatccgccctcagtggtgggcaggcaccagctaatagcctggggccctggagatatacaaatacagaaggtgaactgtctctctcagagctgggacacactttttttctgccttggacatcagaaatttgattccatgaaagtgcattatcacattgactttgtaagccttgtgcctgtacattaaaaatgttgaaacttcctcagtaaaagaagtgtgctatttgtgcacctgcgcttgttgaaagataaaatttctcaagatcttggttctttggttgactacttgtgcagtggtgaa

SEQ ID NO: 537743 - DNA, 865 bp, Homo sapiens
  misc_feature (477)..(477): n is a, c, g, or t
gtgcggggtggtggttcgggggaggggtcttgcggggccgggttgtgtccccccggcggcatttctgtgggcgattgggggatggctgtgcgcgttgcgcaggagggttggcccccgtgggagtccccggtgggagtgtcggggtgggtgcgcacgaggggctcgttgtttgccccgagctggtgcccggagtgttgtggtgggcgcgctgtggagtgtgttgtcgcccgggctggcagacgcaggcctgcggtcgccgtgagtttgctgtcgcccgcgggttatggtgtgtggctcgcgcggggggtagcgggtgtaagggccgccgggttgtcgtcggccgccgcgcgcgggtttttttcttcttggaggggagaccgccctgtggggggggccgcggcgtatgggttgggccgagtggcgcggggaatggttttgtcgtgggcgcgctggattggcgcggcgtccggtggtgtnttgccgggggcgcaccagagaggtggttgcccgtagagagttggagcgcgagttagggttttgtgtctgcgcacccccccgaggttggagctgtgtgggcataccctttgtgcccgcaccagggcggtgctgtgtcagagagggtgtgtgatgaggcgataggtgggtcacaactgcttttgtgtgacgaggagggatgacagagagagggagtcacgccctgctcgtggccgtgtcacgcggcctgctttccgcatagtatgagtcaccggggtggtgcgtgggtaaaaccaaatgcagcagcatcagttgcagaatgatttgcgctgcatggtgatgcgttgtatccccccgctgtggggagaaaaaaaagggcgaaccacaagac

SEQ ID NO: 537744 - DNA, 221 bp, Homo sapiens
tatctctacattaccattattctatagaagttaactacatctcttttattttctcctattttgatagtattagccacacatagggtttctagtttctcaacacctattcttttctttattttagtttcttttctcatttatttatttttttttatttttatcttttttgagacggagtctcgctctgtcgcccagcctagagtgcagtggctcgatcttga

SEQ ID NO: 537745 - DNA, 899 bp, Homo sapiens
ccaaatctcatggtatccttgagcctaatttcccttgactgcctcccagtagactattaaagaaattggtaaagctcctaatctcaaagacaaacggggtgagggatgacaggaacaggatgggggcgtgggactgaaagtggactccctcgacgggcacttactggcatgtccctttttcatctttattagggtctagttggtacactgcttcagatgtatacgagtaaggccgttctacaagactatgtctacagatgtcgagagtgcccggcaagctggcgttccttcgcgttcctgccccacaagcgtcgcgtggacctgaatttcgctacctaaatagttaaccatatgccgtagtctctgaaactaaaaacttggacctcatcctcagttattagctcctttcaactctgttgaccctcattgtactggtcttcctctcaagaaggtacccgcagaaatttgtattgtgtgcgccctggcccgtcgtaaatgcccaagtccggggctgcacatactcactggactgttccagttttgacagctgccagtcttcctgcccctttcacactgcagctgaagttcattacctgaaggacgcctcatcatttcattccttggtccaaaccttctgcttgctctaaggataaaaaagctcaacttcttaaacagtgtacaagtgtggcacttccaactttttatctgtcctctcaccttcagtttagcgtcattccaaaaaccacaccttggaaagcttgtactccgcaccccagatgatctccaggcggtcagatctctttctgacttggccggcctggcccggtacttctcctttttgtggcccagtcccagcaattgtactccccaagggaaccgaaaagggtgaacccaaggtg

SEQ ID NO: 537746 - DNA, 308 bp, Homo sapiens
tcattcttctgaatcctgactatgtgcgggaccttggctatgtggttgagggctacatggcactatatgaaacgaagatggtgttcctgataacatgaaaggaaaagacaaaatcgtgttcggcaacatccatcagattaacagagctggcacagagactttaaactaggtagagttagagaagtgccttgaagatccataacaactatgatccctttctgttaaacacgatagaaggttgcgcatctacattgcttattgtccataatagaccatcgtctgagcaccttgtctcagaataccttgat

SEQ ID NO: 537747 - DNA, 464 bp, Homo sapiens
agttacttcgggaggctgaggcaggagaatcgcttgaacccaggaggcagaggttgcagtgagccaagatcgcgccattgcactccagcctgggcgacaagagtggaaactctgtctcaaaaaaaaaaaaaaaaaattcagtgaaatacacctttatatatgagatccaagtttcactttttgtgatataatgagccagttttctcagtaatgtctactaaaaaaaaagccattaacctttctctaatatttgcatgattctaataaaagtatgtcaacttcttaaaatgttttattgaaatgtggcattcctttgaattttatgacattaaaataatccacgacatggtacagctcttcactttttcagctttttaaatgtccattaataagtttgaatacgttaaaattatatgtttaacctcaacaaaataaatggcaatatgttcaacttgaaaaaaaaa

SEQ ID NO: 537748 - DNA, 223 bp, Homo sapiens
tccagtagagctggtggtgacccatctatgctcttcaggagtgcagtgagacaaaaggaaagagctccagttacatattaataccttgtaataaacggggactcactatgttaaactgggagggagcccacgtataacccaaactggggagtcttgacataaccctagaaatgtttttctgtagtacctgctgatggactctctatagacaatgaatcttgtc

SEQ ID NO: 537749 - DNA, 170 bp, Homo sapiens
gctggagtggcatataactcctaagactcttggatctccaaagtgatgtctttttgtgtgctaatgagttgccagatggctggcagctcctaggtagcttcaggatgggggctggtcaccagcaaatgattagacgcgttgggacttattagccctagcgcccatcactt

SEQ ID NO: 537750 - DNA, 315 bp, Homo sapiens
ggacgcgtggggaaaggatcatttaatgactgttttacttataagtcattaagtaatccaccatttcttatggatgatgcttaagcctggtgaggtttgtactctaaggagcccagatcataatgcagtgcatttccttagcccttagagtttcttgcaaacatttaaaaaaagacatatttaagaaagaaagataaagaaaaaacataaagcagtacctgtttacagtaattaaatatgttttttctttatctttctttctacttcaaccaaaatcagatctttgaggttttgctgacattgttggtggttttg

SEQ ID NO: 537751 - DNA, 987 bp, Homo sapiens
  misc_feature (35)..(35): n is a, c, g, or t
  misc_feature (38)..(38): n is a, c, g, or t
  misc_feature (40)..(40): n is a, c, g, or t
  misc_feature (48)..(49): n is a, c, g, or t
  misc_feature (74)..(75): n is a, c, g, or t
agcgagaacacgcccccgacataaggacctacaangcntntggtcaannaaccccgcagggatgtgaattaaannacgacgcatacatacgtcctagtacgagctggtggatcgacgagcgaatcgcggtctgctcacaggctggagaccgcgctcgtccaccggcggcgcatagcagcctcgtcactctcacgacctcggatgcccaagcccgccgctccagcgccgcgcagccaccgccgccgccgccgcctctccttagtcgccgccatgacgaccgcgtccacctcgcaggtgcgccagaactaccaccaggactcagaggccgccatcaaccgccagatcaacctggagctctacgcctcctacgtttacctgtccatgtcttactactttgaccgcgatgatgtggctttgaagaactttgccaaatactttcttcaccaatctcatgaggagagggaacatgctgagaaactgatgaagctgcagaaccaacgaggtggccgaatcttccttcaggatatcaagaaaccagactgtgatgactgggagagcgggctgaatgcaatggagtgtgcattacatttggaaaaaaatgtgaatcagtcactactggaactgcacaaactggccactgacaaaaatgacccccatttgtgtgacttcattgagacacattacctgaatgagcaggtgaaagccatcaaagaattgggtgaccacgtgaccaacttgcgcaagatgggagcgcccgaatctggcttggcggaatatctctttgacaagcacaccctgggagacagtgataatgaaagctaagcctcgggctaatttccccatagccgtggggtgacttccctggtcaccaaggcagtgcatgcatgttggggtttcctttaccttttctataagttgtaccaaaacatccacttaagttctttgatttgtaccattccttcaaataaagaaatttggtacccaaaa

SEQ ID NO: 537752 - DNA, 434 bp, Homo sapiens
ctcctagatggaaggaatgctttgcttttctgtttgccctttgtttttgtttttgaagcctgggcgacaagagtggaaactctgtctcaaaaaaaaaaaaaaaaaattcagtgaaatacacctttatatatgagatccaagtttcactttttgtgatataatgagccagttttctcagtaatgtctactaaaaaaaaagccattaacctttctctaatatttgcatgattctaataaaagtatgtcaacttcttaaaatgttttattgaaatgtggcattcctttgaattttatgacattaaaataatccacgacatggtacagctcttcactttttcagctttttaaatgtccattaataagtttgaatacgttaaaattatatgtttaacctcaacaaaataaatggcaatatgttcaacttgaaaaaaaaa

SEQ ID NO: 537753 - DNA, 329 bp, Homo sapiens
acccccgtctccactaaatacaaaaaattagccaggcgtggtggcaggcgccagcaatcccagctacttgggaagctgaggcaagagaatggcttgaacctgggaggcggaggttgcagttttccaagatagcgcgatggcactccatccggggtgagagagtgagactctatctcaaaaaaaaaaaaaaaaaaaaaaaggttaaaatactcaggggggggctccaaaactgggggtgatggggggatgagggaagggggtgtgccagagctgcttaaggtccaaggaaagcaggaagcacgttcagttggatgaggagagtgggagga

SEQ ID NO: 537754 - DNA, 1206 bp, Homo sapiens
  misc_feature (74)..(74): n is a, c, g, or t
  misc_feature (77)..(79): n is a, c, g, or t
  misc_feature (83)..(83): n is a, c, g, or t
  misc_feature (99)..(101): n is a, c, g, or t
gggaacatgttatcacactcatgaatctgctaacctcaacgtgggcattttccttcacgatatccataatccanacnnntctnacttggaaaacccctnnnatgcaatggagtgtgcattacatttggaaaaaaatgtgaatcagtcactactggaactgcacaaactggccactgacaaaaatgacccccatttgtgtgacttcatgagacgttcttcgccgagagtcgtcggggtttcctgcttcaacagtgcttggacggaacccggcgctcgttccccaccccggccggccgcccatagccagccctccgtcacctcttcaccgcaccctcggactgccccaaggcccccgcgcacggacctgatccaggcgccgggacaaccacctgacggcggtcgccgccgtctccttctcattctgcacgcgcatgacagtaccgccgttctaccctctgcgaggctgcggacgcagaagacatagcctaggcaagtgatcgtcaggacgtgtccgccgactcagactccgcgcagtatctacaagctgggaggcatctaacggcacctccgtacgatttcccgtggtccagtggtcgtatacctaacgttatgcacccgtcgactgatgtggctttgaagaactttgccaaatactttcttcaccaatctcatgaggagagggaacatgctgagaaactgatgaagctgcagaaccaacgaggtggccgaatcttccttcaggatatcaagaaaccagactgtgatgactgggagagcgggctgaatgcaatggagtgtgcattacatttggaaaaaaatgtgaatcagtcactactggaactgcacaaactggccactgacaaaaatgacccccatttgtgtgacttcattgagacacattacctgaatgagcaggtgaaagccatcaaagaattgggtgaccacgtgaccaacttgcgcaagatgggagcgcccgaatctggcttggcggaatatctctttgacaagcacaccctgggagacagtgataatgaaagctaagcctcgggctaatttccccatagccgtggggtgacttccctggtcaccaaggcagtgcatgcatgttggggtttcctttaccttttctataagttgtaccaaaacatccacttaagttctttgatttgtaccattccttcaaataaagaaatttggtacccaaaa

SEQ ID NO: 537755 - DNA, 467 bp, Homo sapiens
  misc_feature (119)..(119): n is a, c, g, or t
gggtatggaggttcactggtaatcccagcactttgggaggcccaggcaaaaggatcgctgcagcccaggagttcgagactagcctgggcaacatagcgagacctcgtctctacaaaaanaaaaaaaaaaaaaaaaaaaattcagtgaaatacacctttatatatgagatccaagtttcactttttgtgatataatgagccagttttctcagtaatgtctactaaaaaaaaagccattaacctttctctaatatttgcatgattctaataaaagtatgtcaacttcttaaaatgttttattgaaatgtggcattcctttgaattttatgacattaaaataatccacgacatggtacagctcttcactttttcagctttttaaatgtccattaataagtttgaatacgttaaaattatatgtttaacctcaacaaaataaatggcaatatgttcaacttgaaaaaaaaa

SEQ ID NO: 537756 - DNA, 1465 bp, Homo sapiens
  misc_feature (74)..(74): n is a, c, g, or t
  misc_feature (77)..(79): n is a, c, g, or t
  misc_feature (83)..(83): n is a, c, g, or t
  misc_feature (99)..(101): n is a, c, g, or t
gggaacatgttatcacactcatgaatctgctaacctcaacgtgggcattttccttcacgatatccataatccanacnnntctnacttggaaaacccctnnnatgcaatggagtgtgcattacatttggaaaaaaatgtgaatcagtcactactggaactgcacaaactggccactgacaaaaatgacccccatttgtgtgacttcatgagacgttcttcgccgagagtcgtcggggtttcctgcttcaacagtgcttggacggaacccggcgctcgttccccaccccggccggccgcccatagccagccctccgtcacctcttcaccgcaccctcggactgccccaaggcccccgccgccgctccagcgccgcgcagccaccgccgccgccgccgcctctccttagtcgccgccatgacgaccgcgtccacctcgcaggtgcgccagaactaccaccaggactcagaggccgccatcaaccgccagatcaacctggagctctacgcctcctacgtttacctgtccatgtcttactactttgaccgcgatgatgtggctttgaagaactttgccaaatactttcttcaccaatctcatgaggagagggaacatgctgagaaactgatgaagctgcagaaccaacgaggtggccgaatcttccttcaggatatcaagaaaccagactgtgatgactgggagagcgggctgaatgcaatggagtgtgcattacatttggaaaaaaatgtgaatcagtcactactggaactgcacaaactggccactgacaaaaatgacccccatttgtgtgacttcattgagacacattacctgaatgagcaggtgaaagccatcaaagaattgggtgaccacgtgaccaacttgcgcaagatgggagcgcccgaatctggcttggcggaatatctctttgacaagcacaccctgggagacagtgataatgaaagctaagcctcgggctaatttccccatagccgtggggtgacttccctggtcaccaaggcagtgcatgcatgttggggtttcctttaccttttctataagttgtaccaaaacatccacttaagttctttgatttgtaccattccttcaaataaagaaatttggtacccaaaaaaaaaaaaaaaaaaacaaaaaaaaaaaaaaaaaaaaaaaaaaaaaaaagaacagatagaacatgcatgaacggggggggggggcggacaaaaaaataatcaagacgggggaggacgaaagtaaagaggacgacccgacgaagtagaaacaaaaggggagcacaaaagaagagcgaaaaataaaacgcacagagccgcggacgcacaaaacacacaagcgagagaagaaaaaaaaacagaaagagggacacatacgcggagaagacgacaccaccaacggggggacggaaaacagaagaaaaaaaaaggcaaaaaacaaaacaacgcaccggcaa

SEQ ID NO: 537757 - DNA, 1562 bp, Homo sapiens
  misc_feature (74)..(74): n is a, c, g, or t
  misc_feature (77)..(79): n is a, c, g, or t
  misc_feature (83)..(83): n is a, c, g, or t
  misc_feature (99)..(101): n is a, c, g, or t
gggaacatgttatcacactcatgaatctgctaacctcaacgtgggcattttccttcacgatatccataatccanacnnntctnacttggaaaacccctnnnatgcaatggagtgtgcattacatttggaaaaaaatgtgaatcagtcactactggaactgcacaaactggccactgacaaaaatgacccccatttgtgtgacttcatgagacgttcttcgccgagagtcgtcggggtttcctgcttcaacagtgcttggacggaacccggcgctcgttccccaccccggccggccgcccatagccagccctccgtcacctcttcaccgcaccctcggactgccccaaggcccccgccgccgctccagcgccgcgcagccaccgccgccgccgccgcctctccttagtcgccgccatgacgaccgcgtccacctcgcaggtgcgccagaactaccaccaggactcagaggccgccatcaaccgccagatcaacctggagctctacgcctcctacgtttacctgtccatgtcttactactttgaccgcgatgatgtggctttgaagaactttgccaaatactttcttcaccaatctcatgaggagagggaacatgctgagaaactgatgaagctgcagaaccaacgaggtggccgaatcttccttcaggatatcaagaaaccagactgtgatgactgggagagcgggctgaatgcaatggagtgtgcattacatttggaaaaaaatgtgaatcagtcactactggaactgcacaaactggccactgacaaaaatgacccccatttgtgtgacttcattgagacacattacctgaatgagcaggtgaaagccatcaaagaattgggtgaccacgtgaccaacttgcgcaagatgggagcgcccgaatctggcttggcggaatatctctttgacaagcacaccctgggagacagtgataatgaaagctaagcctcgggctaatttccccatagccgtggggtgacttccctggtcaccaaggcagtgcatgcatgttggggtttcctttaccttttctataagttgtaccaaaacatccacttaagttctttgatttgtaccattccttcaaataaagaaatttggtacccaaaaaaaaaaaaaaaaaaacaaaaaaaaaaaaaaaaaaaaaaaaaaaaaaaaaaaaaaaaaaaaaaaaaaaaaaaaaaaaaaaaaaaaaaaaaaaaaaaaaaaaaaaaaaaaaaaaaaaaaaaaaaaaaaagggggggggggcgaaaagaaacccgggggggggaatgggggcccattgttgttagaaagggggcggccctatggagggggcttttataaaatgtagatgaggaggaggcggcggtataacaaacgattgtgtaggggagaaaagtgaccgagcggatgtcgtaggaacaaaccccacttgtggtggtcagacaactttggcgcataaccgaacgaagtttacagcgcgggggaaatagtagatcaggtaatgtgggcgaacacacttatatcgcgcaaaaagtggttgtgagagatagaatttg

SEQ ID NO: 537758 - DNA, 208 bp, Homo sapiens
gagaacaccttcttcatggaccccccactggagcggcaggtggagaccattcgcaaactggtggactcatacgtgggcctcatcaacaagtccatccgcgatctcatgccaaagaccatcatgcacctcatgatcaacaatacgaaggccttcatccaccacgagctgctggtctacctatactcctcggcagaccagagcagcctca

SEQ ID NO: 537759 - DNA, 1613 bp, Homo sapiens
  misc_feature (74)..(74): n is a, c, g, or t
  misc_feature (77)..(79): n is a, c, g, or t
  misc_feature (83)..(83): n is a, c, g, or t
  misc_feature (99)..(101): n is a, c, g, or t
  misc_feature (1187)..(1187): n is a, c, g, or t
gggaacatgttatcacactcatgaatctgctaacctcaacgtgggcattttccttcacgatatccataatccanacnnntctnacttggaaaacccctnnnatgcaatggagtgtgcattacatttggaaaaaaatgtgaatcagtcactactggaactgcacaaactggccactgacaaaaatgacccccatttgtgtgacttcatgagacgttcttcgccgagagtcgtcggggtttcctgcttcaacagtgcttggacggaacccggcgctcgttccccaccccggccggccgcccatagccagccctccgtcacctcttcaccgcaccctcggactgccccaaggcccccgccgccgctccagcgccgcgcagccaccgccgccgccgccgcctctccttagtcgccgccatgacgaccgcgtccacctcgcaggtgcgccagaactaccaccaggactcagaggccgccatcaaccgccagatcaacctggagctctacgcctcctacgtttacctgtccatgtcttactactttgaccgcgatgatgtggctttgaagaactttgccaaatactttcttcaccaatctcatgaggagagggaacatgctgagaaactgatgaagctgcagaaccaacgaggtggccgaatcttccttcaggatatcaagaaaccagactgtgatgactgggagagcgggctgaatgcaatggagtgtgcattacatttggaaaaaaatgtgaatcagtcactactggaactgcacaaactggccactgacaaaaatgacccccatttgtgtgacttcattgagacacattacctgaatgagcaggtgaaagccatcaaagaattgggtgaccacgtgaccaacttgcgcaagatgggagcgcccgaatctggcttggcggaatatctctttgacaagcacaccctgggagacagtgataatgaaagctaagcctcgggctaatttccccatagccgtggggtgacttccctggtcaccaaggcagtgcatgcatgttggggtttcctttaccttttctataagttgtaccaaaacatccacttaagttctttgatttgtaccattccttcaaataaagaaatttggtacccaaaaaaaaaaaaaaaaaaacaaaaaaaaaaaaaaaaaaaaaaaaaaaaaaaaaaaaaaanaaaaaaaaaaaaaagagaggggggggcgggtttaataagtgtttctctctcggggggggcgcgaagattttgtgctgcaccgcgttttttttagagaagggggctactattatagggggggtagtatttatagaagggagggaggggacgcgggtgttatataaacaacggctttggtggtggggagaaaacatgatgctgtagtggtgtgaagacatttttgaggggggaaagcaccccacttatttttgggggggggggaagcaaatatgtgtgggagaaacaacttcctacccagagagtatattaacggtccgcgagggggaagtaatataaaaaactttgggagggtgtttaggagtggttgagacaaggtgataattatcgttgggtgaaaaaattttgtgcggaggagaatttattgaa

SEQ ID NO: 537760 - DNA, 1075 bp, Homo sapiens
  misc_feature (479)..(479): n is a, c, g, or t
tctccccttttttgatatcgtgtattcttatgggcctttctttttgtatctgggtggttggttgtatggttcgcggctcttttccataccgcttcttcgtttttgcgggagttctttccccggcccttgccttgctttggcaccatgaggcgggtcccaagacgggggccctcggtctccggtttctcacccgcgttcccggatttattttcgaacgccagaacttgatggactttcccgggcattgggcttcaaatcagaatggtctttcaagattttcttcggggcaccttgctggtgacggccgatggccccccccatgggaagcacctggcttcacgcttcaggggattatcccgggaccatccaggccccatttagccccggctatgcccctgtattggattgccccccggctcacattgcaagcaagatttgctgagctgaaggaaaagattgatccccgttctggtaaaaangctggaagatggccctcaaatttcttggaagttctcggtggatagctcgccccttggttgataataggtttcctcggcacagacccatagtgtggttgagagactttctccagactataccccctcttgggtccctttgctcgttcgtggatatgagaccagaccagtttccggtgggtgtctatccaaagccagtggccccagaaggccttctggagctggccaggtctcacccagatcttgccccagaaagctctcagaaggccttaatgaatattatcccttaataacctgcccacccccactctttaataccagtggtggaagaaacggttctccagaactgtttgtttccaattggcccatttaagattttagattagttaaaagactggtttaatagataaaccaatgcatcgttaaaccttcagaaggaaaggagaatgttttgtggacccctttggttttcttttttgcgtgtggccagttttaagttattagttttttaaatccagtacttttttaatggagaaccaacttgagcccaaaaatttgtcaccagaattttgagaccccctttaaaaagtttaatgaga

SEQ ID NO: 537761 - DNA, 260 bp, Homo sapiens
  misc_feature (9)..(9): n is a, c, g, or t
  misc_feature (32)..(32): n is a, c, g, or t
  misc_feature (55)..(55): n is a, c, g, or t
  misc_feature (185)..(185): n is a, c, g, or t
  misc_feature (193)..(193): n is a, c, g, or t
  misc_feature (250)..(251): n is a, c, g, or t
atggtatcnggggacccggtcaccacactgtnaacatctacgaggaggtatagcnctccccatgccatcctgcgtctggacctggctggccgggacctgactgactacctcatgaagattctcaccgagcgcggctacagcttcaccaccacggccgagcgggaaatcgtgcgtgacatcttaanggatgaangctgtgtctacgtcgtccctggatctttcgatgcatttgatgatggccacgggctgnnttccaagct

SEQ ID NO: 537762 - DNA, 564 bp, Homo sapiens
  misc_feature (58)..(58): n is a, c, g, or t
aaaaaaaaggtttcaattaacattttatatatggataatgctttgtaaagtgtaaganaaaggttgcagttggtcattgttttccgaatcttccttcaggatatcaagaaaccagactgtgatgactgggagagcgggctgaatgcaatggagtgtgcattacatttggaaaaaaatgtgaatcagtcactactggaactgcacaaactggccactgacaaaaatgacccccatttgtgtgacttcattgagacacattacctgaatgagcaggtgaaagccatcaaagaattgggtgaccacgtgaccaacttgcgcaagatgggagcgcccgaatctggcttggcggaatatctctttgacaagcacaccctgggagacagtgataatgaaagctaagcctcgggctaatttccccatagccgtggggtgacttccctggtcaccaaggcagtgcatgcatgttggggtttcctttaccttttctataagttgtaccaaaacatccacttaagttctttgatttgtaccattccttcaaataaagaaatttggtacccaaaa

SEQ ID NO: 537763 - DNA, 130 bp, Homo sapiens
gatactggggagtactttgagtcagggacccgaacactgatcgctgggtggcactgggcatcgtgtcctggggcatctgggtgcagcaggggctcagtcctcctcctccatactcttatcttgatccagt

SEQ ID NO: 537764 - DNA, 1192 bp, Homo sapiens
  misc_feature (74)..(74): n is a, c, g, or t
  misc_feature (77)..(79): n is a, c, g, or t
  misc_feature (83)..(83): n is a, c, g, or t
  misc_feature (99)..(101): n is a, c, g, or t
  misc_feature (1181)..(1181): n is a, c, g, or t
gggaacatgttatcacactcatgaatctgctaacctcaacgtgggcattttccttcacgatatccataatccanacnnntctnacttggaaaacccctnnnatgcaatggagtgtgcattacatttggaaaaaaatgtgaatcagtcactactggaactgcacaaactggccactgacaaaaatgacccccatttgtgtgacttcatgagacgttcttcgccgagagtcgtcggggtttcctgcttcaacagtgcttggacggaacccggcgctcgttccccaccccggccggccgcccatagccagccctccgtcacctcttcaccgcaccctcggactgccccaaggcccccgccgccgctccagcgccgcgcagccaccgccgccgccgccgcctctccttagtcgccgccatgacgaccgcgtccacctcgcaggtgcgccagaactaccaccaggactcagaggccgccatcaaccgccagatcaacctggagctctacgcctcctacgtttacctgtccatgtcttactactttgaccgcgatgatgtggctttgaagaactttgccaaatactttcttcaccaatctcatgaggagagggaacatgctgagaaactgatgaagctgcagaaccaacgaggtggccgaatcttccttcaggatatcaagaaaccagactgtgatgactgggagagcgggctgaatgcaatggagtgtgcattacatttggaaaaaaatgtgaatcagtcactactggaactgcacaaactggccactgacaaaaatgacccccatttgtgtgacttcattgagacacattacctgaatgagcaggtgaaagccatcaaagaattgggtgaccacgtgaccaacttgcgcaagatgggagcgcccgaatctggcttggcggaatatctctttgacaagcacaccctgggagacagtgataatgaaagctaagcctcgggctaatttccccatagccgtggggtgacttccctggtcaccaaggcagtgcatgcatgttggggtttcctttaccttttctataagttgtaccaaaacatccacttaagttctttgatttgtaccattccttcaaataaagaaatttggtacccaaaaaaaaaaaaaaaaaaaaacaaacaaaacaaacaaaaaaaacacaaacaaanaaaacaaacaa

SEQ ID NO: 537765 - DNA, 472 bp, Homo sapiens
gtttcttacatttatttttctgaggagttatagcttttgaattggtagttgacgttttttcactacatttgagaatacagcaaccatttttttcctcatcttttccagccatttcttcttggtccctggttccatgtgtggtgcgtgatattgtaccacaggtcactgagactcgcttccttgttttctttcagtcccattttcccttgtacttcagatggaattgtttctactgatctcttttcaagttcactcattcttctacaatgttcaatctctctctctctttttttttttttttggaaacagagtgtttgctcttgtagcccaggttgaagtgcagtgcattgatctcggttcattgcaacctctgtctccggggttcaggcaatccggcctcgggatcccaagtagctgggataacgggcttctgccaccacacccggttaatttttggttttttaagtaaaga

SEQ ID NO: 537766 - DNA, 144 bp, Homo sapiens
cggcgtatctcctcttctctagcgatgaagagctacagatctgcccgatggccaggtcatcatcatatggcaatgacgcggttccaggtgtccggaggcgctgttccagccttaccttcctgggatatggaatcttgacggcat

SEQ ID NO: 537767 - DNA, 1327 bp, Homo sapiens
  misc_feature (74)..(74): n is a, c, g, or t
  misc_feature (77)..(79): n is a, c, g, or t
  misc_feature (83)..(83): n is a, c, g, or t
  misc_feature (99)..(101): n is a, c, g, or t
gggaacatgttatcacactcatgaatctgctaacctcaacgtgggcattttccttcacgatatccataatccanacnnntctnacttggaaaacccctnnnatgcaatggagtgtgcattacatttggaaaaaaatgtgaatcagtcactactggaactgcacaaactggccactgacaaaaatgacccccatttgtgtgacttcatgagacgttcttcgccgagagtcgtcggggtttcctgcttcaacagtgcttggacggaacccggcgctcgttccccaccccggccggccgcccatagccagccctccgtcacctcttcaccgcaccctcggactgccccaaggcccccgccgccgctccagcgccgcgcagccaccgccgccgccgccgcctctccttagtcgccgccatgacgaccgcgtccacctcgcaggtgcgccagaactaccaccaggactcagaggccgccatcaaccgccagatcaacctggagctctacgcctcctacgtttacctgtccatgtcttactactttgaccgcgatgatgtggctttgaagaactttgccaaatactttcttcaccaatctcatgaggagagggaacatgctgagaaactgatgaagctgcagaaccaacgaggtggccgaatcttccttcaggatatcaagaaaccagactgtgatgactgggagagcgggctgaatgcaatggagtgtgcattacatttggaaaaaaatgtgaatcagtcactactggaactgcacaaactggccactgacaaaaatgacccccatttgtgtgacttcattgagacacattacctgaatgagcaggtgaaagccatcaaagaattgggtgaccacgtgaccaacttgcgcaagatgggagcgcccgaatctggcttggcggaatatctctttgacaagcacaccctgggagacagtgataatgaaagctaagcctcgggctaatttccccatagccgtggggtgacttccctggtcaccaaggcagtgcatgcatgttggggtttcctttaccttttctataagttgtaccaaaacatccacttaagttctttgatttgtaccattccttcaaataaagaaatttggtacccaaaaaaaaaccattatataatcaataacataataaaaaaaaacatgtcggccgctttggcccagtcgactttagaattgaacatactaattcatgcggcctgaattcgaggctaacttgggccaatttcgcccctatagtggagtctgattcacaattacattgggtcgctctgtttacaaaacgtcctacaactggtga

SEQ ID NO: 537768 - DNA, 756 bp, Homo sapiens
gcccgggctgagctgcgcaggggggttgggccaaatggggcgagggcacaaaataaccattaccccttctcaccgaggaagagcgggagacagggtatggcacagtcacaagggtgggtgaaaagatacatcagggccttgggtaagggcttcttggtggggtgcctgtggaggtgatttctgggatcgggtcgcctgtgtggcacgagtagaaggagcatcgagtgcagccttcttgtgaatcctggggggagccagtcatctgatgtggtgctttgaccccatgaagtgaggaattcttgaagtacaccgttgtgaccttgtgtatcatgggtggtctcttaaaaaccagaacagaagatcattaaagagagtgatgctctggaaggagatatggtcagaacataggacacaaaaaccggtatgtcaaagtcccccgtgtcacatcgtgggtcgaaggtgatcatcaggggacacagtttgacagtattccttgggcggttccctaggacttctgatgccattgcaaattatctgtgccccaagaggcgtggaagaaatggaatctgttctcctccagagcgttacagtacgagaggagagaatgatgtgaattacctgagtgtggctgggggccgtatgcaaggagggaaaagaggtcaagggaactctgcattgcggtgaaatattcggttaaagtgggttcacaacttacggtacgtaatgccggtgggataaccgggtggcccatgaggg

SEQ ID NO: 537769 - DNA, 2036 bp, Homo sapiens
  misc_feature (74)..(74): n is a, c, g, or t
  misc_feature (77)..(79): n is a, c, g, or t
  misc_feature (83)..(83): n is a, c, g, or t
  misc_feature (99)..(101): n is a, c, g, or t
gggaacatgttatcacactcatgaatctgctaacctcaacgtgggcattttccttcacgatatccataatccanacnnntctnacttggaaaacccctnnnatgcaatggagtgtgcattacatttggaaaaaaatgtgaatcagtcactactggaactgcacaaactggccactgacaaaaatgacccccatttgtgtgacttcatgagacgttcttcgccgagagtcgtcggggtttcctgcttcaacagtgcttggacggaacccggcgctcgttccccaccccggccggccgcccatagccagccctccgtcacctcttcaccgcaccctcggactgccccaaggcccccgccgccgctccagcgccgcgcagccaccgccgccgccgccgcctctccttagtcgccgccatgacgaccgcgtccacctcgcaggtgcgccagaactaccaccaggactcagaggccgccatcaaccgccagatcaacctggagctctacgcctcctacgtttacctgtccatgtcttactactttgaccgcgatgatgtggctttgaagaactttgccaaatactttcttcaccaatctcatgaggagagggaacatgctgagaaactgatgaagctgcagaaccaacgaggtggccgaatcttccttcaggatatcaagaaaccagactgtgatgactgggagagcgggctgaatgcaatggagtgtgcattacatttggaaaaaaatgtgaatcagtcactactggaactgcacaaactggccactgacaaaaatgacccccatttgtgtgacttcattgagacacattacctgaatgagcaggtgaaagccatcaaagaattgggtgaccacgtgaccaacttgcgcaagatgggagcgcccgaatctggcttggcggaatatctctttgacaagcacaccctgggagacagtgataatgaaagctaagcctcgggctaatttccccatagccgtggggtgacttccctggtcaccaaggcagtgcatgcatgttggggtttcctttaccttttctataagttgtaccaaaacatccacttaagttctttgatttgtaccattccttcaaataaagaaatttggtacccaaaaaaaaaaaaaaaaaaaaaaaaaaaaaaaaaaaaaaaaaaaaaaaaaaaaaaaaaaaaaaaaaaaaaaaaaaaaaaaaaaaaaaaaaaaaagaggggggggcacacaagagactactgccgggggagccacaaacgtacaacctcaaccacctttgtttaagcaaagaggggcgcgctcccaaatgggggggctaataaatcaaaagacagcaacgcggggcgggccgataaaaacaccaacgcggcggggaggaaacaagcggcacagcggagcattttggagggggaagcacccccacgcgggggggggggagaaaaaaaataggggcgccgacccccccctcccgcaacaagcgagctaaattacaagaccgaccggacggggagcaaaaaacaatacaaccactactgcagacaaggagcgataagaggagggggggacacaacccaccacgacggaacaatataccgacgcggccgaggcaaaaacaaatcgtccgccacacccgaacgagacgaactaactcactaccacaacgaacaacatacttcatatcagcgacggcggcgggtttgctgacagcaaaatataataacaccacctcgagccggccaagcgtcgcagaccactcgtaagagaacgccgggtacgacacaaagacagcggcaagacatacggacagcacgcagcaactacgacgcaacgagtcggatagccagcgcaccgaactggcagcggcacacaccactgagaaatagacggtcggcgaacagccacacacaagcgaggacggggagacaagacagccagaagacaccacggaggtcggcaacccgagcaacgaaaccaacactaacctcacaaaacacaaaccaaaaacggcgacagccgaaagacaacaaaca

SEQ ID NO: 537770 - DNA, 1514 bp, Homo sapiens
  misc_feature (74)..(74): n is a, c, g, or t
  misc_feature (77)..(79): n is a, c, g, or t
  misc_feature (83)..(83): n is a, c, g, or t
  misc_feature (99)..(101): n is a, c, g, or t
gggaacatgttatcacactcatgaatctgctaacctcaacgtgggcattttccttcacgatatccataatccanacnnntctnacttggaaaacccctnnnatgcaatggagtgtgcattacatttggaaaaaaatgtgaatcagtcactactggaactgcacaaactggccactgacaaaaatgacccccatttgtgtgacttcatgagacgttcttcgccgagagtcgtcggggtttcctgcttcaacagtgcttggacggaacccggcgctcgttccccaccccggccggccgcccatagccagccctccgtcacctcttcaccgcaccctcggactgccccaaggcccccgccgccgctccagcgccgcgcagccaccgccgccgccgccgcctctccttagtcgccgccatgacgaccgcgtccacctcgcaggtgcgccagaactaccaccaggactcagaggccgccatcaaccgccagatcaacctggagctctacgcctcctacgtttacctgtccatgtcttactactttgaccgcgatgatgtggctttgaagaactttgccaaatactttcttcaccaatctcatgaggagagggaacatgctgagaaactgatgaagctgcagaaccaacgaggtggccgaatcttccttcaggatatcaagaaaccagactgtgatgactgggagagcgggctgaatgcaatggagtgtgcattacatttggaaaaaaatgtgaatcagtcactactggaactgcacaaactggccactgacaaaaatgacccccatttgtgtgacttcattgagacacattacctgaatgagcaggtgaaagccatcaaagaattgggtgaccacgtgaccaacttgcgcaagatgggagcgcccgaatctggcttggcggaatatctctttgacaagcacaccctgggagacagtgataatgaaagctaagcctcgggctaatttccccatagccgtggggtgacttccctggtcaccaaggcagtgcatgcatgttggggtttcctttaccttttctataagttgtaccaaaacatccacttaagttctttgatttgtaccattccttcaaataaagaaatttggtacccaaaaaaaaaaaaaaaaaaaaaaaaaaaaaaaaaaaaaaaaaaaaaaaaaaaaaaaaaaaaaaaaaaaaaaaaaaaaaaaaaaagggggggggggcgaaaagaaacccgggggggggaatgggggcccattgttgttagaaagggggcggccctatggagggggcttttataaaatgtagatgaggaggaggcggcggtataacaaacgattgtgtaggggagaaaagtgaccgagcggatgtcgtaggaacaaaccccacttgtggtggtcagacaactttggcgcataaccgaacgaagtttacagcgcgggggaaatagtagatcaggtaatgtgggcgaacacacttatatcgcgcaaaaagtggttgtgagagatagaatttg

SEQ ID NO: 537771 - DNA, 125 bp, Homo sapiens
gtcacgttccagcaggctccagtgaaatcaaaccagtaaaagcaaaagcccagtgaggggaaacgaggggcgtgccggtgaagcctgtgctgcaggggtgagacgctgggtccatgtgtggtgac

SEQ ID NO: 537772 - DNA, 235 bp, Homo sapiens
ggggggttccccccgattccccaaatgggggggggttggggtttgccctgggattcccccttccccttcccctttggggtggggtgggggtggtggttttcccgggcccccctaaaggcggtttttttagccaaaaatttccggaaaggggtttttgggatcttttttttaaagggggggacttatttttggcccaccctgggggctttttcctttaagttttggttttccccca

SEQ ID NO: 537773 - DNA, 102 bp, Homo sapiens
acgacacacgactggcgtcaggttaccggcaggacgcatgaacctgtgtctcgggtaacgtgacgggactggggtgatgctggcagaccagaggaatccaat

SEQ ID NO: 537774 - DNA, 201 bp, Homo sapiens
  misc_feature (174)..(174): n is a, c, g, or t
agctgggagttaaggagaactcggcatacatctgcagccgcgccagagggttccttcggcgtctctgagcagcaggcagtggaagcctgggagaagctgacccgggaagaggggacaccctgaccttgtactacagccactggcgcaagctgggtgaccgggagatccagctgnagatcagtggcaaagagcagcaggagg

SEQ ID NO: 537775 - DNA, 109 bp, Homo sapiens
atctgtttggcgagtcgggtaggagaatgcacagacgtatggcagtgaaggtgagcgtggggacaccgggaaaggcctgggacactgcagccaatgagccgcggctcag

SEQ ID NO: 537776 - DNA, 103 bp, Homo sapiens
gaccaggctgagggcagtgaatcgtgagaagacagactccgtcgagacttgtgaggaggatggcagcaacaaagaaaacaggacagcagcttgtctttgtttt

SEQ ID NO: 537777 - DNA, 133 bp, Homo sapiens
cacaacctatgggtagagtgtctctaaatttgggatgtagccagtcccaaacggacttgtaaaagtgtcagctgggacagtgtttcacaaacggggatgggagaaagaccacagttctgaaagatgctgctcg

SEQ ID NO: 537778 - DNA, 313 bp, Homo sapiens
  misc_feature (216)..(216): n is a, c, g, or t
aattctggactgagagcccttcagcggtgcttgctcagtgtagtagcttttgctattacatgcccagtgccagctggcctagactgaagctccagagtcaaaaaacagggctaatgaacagtcgagaaaaaaacaatgcagacagtcttttaggggtgtgcagtattaaatcactttgaaagtgtgacgacttaaagaaaatcctcttgcctcatncaaagaatattagaaatacattaatttggtggaataattataatagtagctaccatcttttttttttttttggagacaggtttagttttgtcaccca

SEQ ID NO: 537779 - DNA, 131 bp, Homo sapiens
ccctctcatgcgtgactgaatgtagcttgtggatcactgctcagcgtcagctcagtagctgctgcgcgtacttgtgttgcttgttggaggtgtgtgtctccactcccgctgacggggctgctatctgcttc

SEQ ID NO: 537780 - DNA, 599 bp, Homo sapiens
atgtctgtgctcattcagaggagggggccagaaggcgacatcactgtacctggtaccgcgtgccatacacagagccatgcctatttggatagtggttctatctgagacaaccaaagggctgccacctgccatgttgcttgaaagaaccatatttggaggggggttcccacactgtgctgagggaggaatcagccattgactgccattaacaagagagcttggaacgactctggtgcataaacagccgaacagcatgctaactggatgcacaagtagatgtacaagagtatatccatgtcaggatggcgcaatatttgaactgtgcatgtcagagctagcatatatgtaccagttaatgtccaatgaccaatcctatcacaccttggaccatacaatgaagtctggcggtgctaaaagattgcaagcctccatagataacggcttgaccaaactgaacgtcagatatttaaagagatatcaagacttcattgcgacacgtaactgctaagtctacgtgaacttgccattacaatgacagctgcagaatgacttttatgactgaaatgcttactcctgactattaaagcttaatcaagctt

SEQ ID NO: 537781 - DNA, 149 bp, Homo sapiens
agactaactgagaggttagactcaagccggtttgtctcactcccaaaatccacaggacattttccattatccacccagttcaagccgtgtaggagggctttcctcatgtacagactattacaataacggccaggacgagtcaaccgacg

SEQ ID NO: 537782 - DNA, 225 bp, Homo sapiens
ggaatttagggggatgggtttttggggccaggggggttttttttccggcccttggccctttccccccgggggggccccccgccccttttggaaagggcccttgggcaaggggttggtagccggttttttcccctgcccctttttttggccccctgggggccgtttttccccctcccccggggggggggggcttttttgggtccaatttatttttcggggggcccg

SEQ ID NO: 537783 - DNA, 174 bp, Homo sapiens
tgtgctgggactcccctgcatgcttaacacacctggttcatattcatcatttcagtcagcagcacatggtccacaatgtatgtgtccggctggtctcgaactcctgaccatcaggtgatcctgccatgccttgtgcctccccaaagtgcttggaattacagtgtgtgagccacc

SEQ ID NO: 537784 - DNA, 767 bp, Homo sapiens
  misc_feature (121)..(121): n is a, c, g, or t
  misc_feature (177)..(177): n is a, c, g, or t
  misc_feature (194)..(194): n is a, c, g, or t
  misc_feature (197)..(197): n is a, c, g, or t
  misc_feature (200)..(200): n is a, c, g, or t
  misc_feature (205)..(205): n is a, c, g, or t
ggtttttttttcctctaggcagagaagaggcgatggcggcgatggcatctctcggcgccctggcgctgctcctgctgtccagcctctcccgctgctcagccgaggcctgcctggagccccnagatcaacccctttcctactacaccacttctgacgctgtcatttccactgagaccntcttcattgtggagatntcnctnacatncaagaacagggtccagaacatggctctctatgctagactgtcggtggaaaacaattccctgtcactctgaggccaggatgtggggcgttatcatggtgtcctggcagcctggaccacaagagcgcccacgcagtgcacctatgaggttcagagttcttcgacgaggagtcctacagtcctcctcatggaaggctcagagtgaataacgaggacatttccatcatcccgcctctgtttacaggtcgagcgtggaccatcggggcacttgtgagacgggccctgggtgtccactgacgtgtgctggctgcgcgtgtatcggccttgtgatctactacttggccttcagatgcgaatgagccactatccagtgcctgagcgtgcggtaccccagccctgctcttgctatccttcattcaatgcatcacaggagctgggactgcacaggataacatgtactctccccagattgtaaaactctgtaagaacgctgcttgtaatctgaatcccttgttgaaactctgaaaacatgcataactaagatctcttctccaaaaaaaaaaga

SEQ ID NO: 537785 - DNA, 445 bp, Homo sapiens
  misc_feature (16)..(16): n is a, c, g, or t
  misc_feature (196)..(196): n is a, c, g, or t
  misc_feature (211)..(211): n is a, c, g, or t
  misc_feature (221)..(221): n is a, c, g, or t
  misc_feature (320)..(320): n is a, c, g, or t
  misc_feature (330)..(330): n is a, c, g, or t
  misc_feature (363)..(363): n is a, c, g, or t
  misc_feature (397)..(397): n is a, c, g, or t
  misc_feature (406)..(406): n is a, c, g, or t
ggttctgtaatcccangctatcaggaggcaggagaatcacttgagtctgggaggcagaggttgcagtgagctgagattgcaccactgcactctagtctgggtgacagagtgagaccctgtctcaaaaacaaacaaacaaatacctcactgcatgaggccactgagatttggggattgttgttacagcaccagaacncaaatcatcctgacngctagggtgncctaactagggtttcttaccaaaagcaaaggcatttttaaagttcgtgacatttaaacaaaagagcaaataccaatatctaccactttgtcaggctaanaaacccaaanaaagccaacagccagaagttaaaataaacagancattaggttgaaaatagaactgtcaaaacaggcncaattgacntcatttagtgattgcaaagaacatcaggcaagacacagg

SEQ ID NO: 537786 - DNA, 290 bp, Homo sapiens
  misc_feature (39)..(39): n is a, c, g, or t
  misc_feature (42)..(43): n is a, c, g, or t
  misc_feature (50)..(50): n is a, c, g, or t
  misc_feature (61)..(62): n is a, c, g, or t
  misc_feature (65)..(65): n is a, c, g, or t
  misc_feature (67)..(68): n is a, c, g, or t
  misc_feature (107)..(107): n is a, c, g, or t
  misc_feature (140)..(140): n is a, c, g, or t
  misc_feature (186)..(186): n is a, c, g, or t
tatccggccgatcatgtctgtatctggtatagcgggggnctnnagggacncactggccccnntanannattaacgaggtaaagttgttccctcaagaaacccttttncttgaagcaaaagagtaaacacggcccagcggnggaaccagccattccttgacaagccagcagcctgcgtcaggagaanggctcctcgccaacccacccacacgctcgtctcacacaattcaatgtcacacttctgcctcttgcaaaattgctggattttttctaataaacatagctactgac

SEQ ID NO: 537787 - DNA, 699 bp, Homo sapiens
  misc_feature (514)..(514): n is a, c, g, or t
  misc_feature (601)..(601): n is a, c, g, or t
  misc_feature (694)..(694): n is a, c, g, or t
tgtccgaaactgacatgaggcaggagaactcttgaacatgggatgcagaggttgtggtacgccgatatcgtgccattgcactccagcctaggcaacaagagtgaaactccatctcaaaaacaaacaaacaaacaaacaaaaaagtgtgctggggcttggataaccacaactgacaacctaaattattgaggtagcaaactgcctagaagaggtagacatttgcggccctgaaatcaggacccggcggtgagagacaccgcctgcgttgtttttacagttttattagccacatccctcagggaatctcaccgcaggtctcaggagctctctctaatcttgttaaccttctgcgcctctcctcccggagtacaaactaatctttcttaatgcaagaggacagggcagctttggaaaggccgtcaccagacagccagcgttccccatcctcacaactggaccttggagagctttggtgtatggaaaccggctgccctggaggcgggaggtgaaacgngaaaccctgacagacggtgtcactgagcttagagctcatgtttctagaaaaggcaacagatgcaggtctgatgatgaagcttaattngggatgtgctgagcaggaattatttaaaccaatcccttgatgaatttgtctttaaggaatatgtcctttctctcgtgagtcactcaggctccnggaca

SEQ ID NO: 537788 - DNA, 285 bp, Homo sapiens
  misc_feature (238)..(238): n is a, c, g, or t
cactcgtggagatgggcgtagcactgcgacatgcgatgaggaaagatcggcacagagggcagctaaagactgctgagcgggtcggagggctggtgcgccaccaccgaagctagtgcgttctgcgtgcccactacgctgcccgcagtttaagggcctacggtccatagagaacaccaccatcatggccagatggaagggtttaattagtacctgctagcagctgtcctgcctggtgaanggtggcctggccagcacacttactgcgagggccagcctggggcttta

SEQ ID NO: 537789 - DNA, 240 bp, Homo sapiens
cggatctgatgctggtgttgtgagacacagccgaggcgcgagagagtcaatgaggcatgagtccaagcgagtcgttcaggacgggcactgagaatgtctcctcggtaggcatccagatgtggtccgcagaggaagcaggagactccgtgacaacaggtagccaatgcccccatgacagtagcgggcctgctcgcctgggccaatgaactcctctggccttgtcggcgacgctatctcgtt

SEQ ID NO: 537790 - DNA, 492 bp, Homo sapiens
  misc_feature (76)..(76): n is a, c, g, or t
  misc_feature (81)..(81): n is a, c, g, or t
gtttggattcggcatttataaaaaaaccccaaatccggaaagggtgaaaattgcttgctggggaagagggctctgnccccnggaaactctcctccccaagagatgccaggagataggagaacctgtctgtcttaagtctgaaatggtactgaagtctccttttctattggtcttgcttattttataaaaatttaacattctaaattttgctagagatgtattttgattactgaaaatttctatataaactgtaaatatattgccatacagtgtttcaaaacgtatttttttataatgagttcaacttaaggtagaaggcttgggctgctagtgtttaattggaaaataccagtagtaaagtcttttaaggagttttcttaaggaggctggctgaatattcctttgttcaaaagaagttttagcatttttcataagaaaacttactctgtctgaccactgttgcttaggaaaccattaaagaattccaatcta

SEQ ID NO: 537791 - DNA, 368 bp, Homo sapiens
  misc_feature (24)..(24): n is a, c, g, or t
  misc_feature (43)..(44): n is a, c, g, or t
  misc_feature (157)..(158): n is a, c, g, or t
  misc_feature (176)..(176): n is a, c, g, or t
  misc_feature (316)..(316): n is a, c, g, or t
  misc_feature (338)..(338): n is a, c, g, or t
  misc_feature (346)..(346): n is a, c, g, or t
tttaccacttgaatgtgtagctcncaatcttgttaaaatgcannttctgattcagtaagtcccgaatatgacccaagagcccgtattattaacaagtttccaggtgacactgatgttgcctggcctacagatcttgacctgagaaagaaggcagtgnngaagggaaacctagtttnagtcccaggttttccactgacgtgctctgtgacataggccaagctgcctcctgagtgcgggttggaggatagaggccttctgtaaggctcttgtgactctaaatctagactctgtggagggccatggatgcctacggtgngagcacaactggctgtttggcnctttctcncatattttcaccttccaaccgt

SEQ ID NO: 537792 - DNA, 128 bp, Homo sapiens
gacgacagcgcgactcccaggtgcatgccaccatgccagttagtttttttgtgtgtttttagtagagacggggtttcaccatgttggccagactggtctccaactcctgacctcaggcagtctgcccg

SEQ ID NO: 537793 - DNA, 113 bp, Homo sapiens
aaggatccccctcaacgactttatacttctaaaacagatcttctttaatttggaggtgagggactactagcttgtattgaaagcagttcgtctcttcttgtgtattaagcatt

SEQ ID NO: 537794 - DNA, 339 bp, Homo sapiens
  misc_feature (209)..(211): n is a, c, g, or t
  misc_feature (243)..(243): n is a, c, g, or t
ttcaataattggtcccctcgggccagaaggggataaaaagagttttattaatgggggtatgaaaaaacaaggtaaaatagaagaaataaggcccttgggtattcatcaggcagtagtatgactaatttgttccaaattaatctatgtatatttcaaataaagtagaagaagaagaattagaatgtttctagcataaaggaaaacccccnnnttattaagtgatgggaatctcaagttacactnattttatctttacaaggcatatgaatgttttaaattgtcatagtacccccaaaatatgtacatgttatgtatcaataaaacacaaaattaaaaaat

SEQ ID NO: 537795 - DNA, 1249 bp, Homo sapiens
  misc_feature (74)..(74): n is a, c, g, or t
  misc_feature (77)..(79): n is a, c, g, or t
  misc_feature (83)..(83): n is a, c, g, or t
  misc_feature (99)..(101): n is a, c, g, or t
  misc_feature (1132)..(1132): n is a, c, g, or t
  misc_feature (1139)..(1139): n is a, c, g, or t
  misc_feature (1144)..(1145): n is a, c, g, or t
  misc_feature (1148)..(1148): n is a, c, g, or t
  misc_feature (1210)..(1210): n is a, c, g, or t
gggaacatgttatcacactcatgaatctgctaacctcaacgtgggcattttccttcacgatatccataatccanacnnntctnacttggaaaacccctnnnatgcaatggagtgtgcattacatttggaaaaaaatgtgaatcagtcactactggaactgcacaaactggccactgacaaaaatgacccccatttgtgtgacttcatgagacgttcttcgccgagagtcgtcggggtttcctgcttcaacagtgcttggacggaacccggcgctcgttccccaccccggccggccgcccatagccagccctccgtcacctcttcaccgcaccctcggactgccccaaggcccccgccgccgctccagcgccgcgcagccaccgccgccgccgccgcctctccttagtcgccgccatgacgaccgcgtccacctcgcaggtgcgccagaactaccaccaggactcagaggccgccatcaaccgccagatcaacctggagctctacgcctcctacgtttacctgtccatgtcttactactttgaccgcgatgatgtggctttgaagaactttgccaaatactttcttcaccaatctcatgaggagagggaacatgctgagaaactgatgaagctgcagaaccaacgaggtggccgaatcttccttcaggatatcaagaaaccagactgtgatgactgggagagcgggctgaatgcaatggagtgtgcattacatttggaaaaaaatgtgaatcagtcactactggaactgcacaaactggccactgacaaaaatgacccccatttgtgtgacttcattgagacacattacctgaatgagcaggtgaaagccatcaaagaattgggtgaccacgtgaccaacttgcgcaagatgggagcgcccgaatctggcttggcggaatatctctttgacaagcacaccctgggagacagtgataatgaaagctaagcctcgggctaatttccccatagccgtggggtgacttccctggtcaccaaggcagtgcatgcatgttggggtttcctttaccttttctataagttgtaccaaaacatccacttaagttctttgatttgtaccattccttcaaataaagaaatttggtacccaaaanaaagagnactgnnaanaatagcagttcgtggcacactagtacaaaacataaatactctcaggggggccctgcccaaantcggcctattgggagcttattcacattcatctgcccgtt

SEQ ID NO: 537796 - DNA, 1266 bp, Homo sapiens
  misc_feature (74)..(74): n is a, c, g, or t
  misc_feature (77)..(79): n is a, c, g, or t
  misc_feature (83)..(83): n is a, c, g, or t
  misc_feature (99)..(101): n is a, c, g, or t
gggaacatgttatcacactcatgaatctgctaacctcaacgtgggcattttccttcacgatatccataatccanacnnntctnacttggaaaacccctnnnatgcaatggagtgtgcattacatttggaaaaaaatgtgaatcagtcactactggaactgcacaaactggccactgacaaaaatgacccccatttgtgtgacttcatgagacgttcttcgccgagagtcgtcggggtttcctgcttcaacagtgcttggacggaacccggcgctcgttccccaccccggccggccgcccatagccagccctccgtcacctcttcaccgcaccctcggactgccccaaggcccccgccgccgctccagcgccgcgcagccaccgccgccgccgccgcctctccttagtcgccgccatgacgaccgcgtccacctcgcaggtgcgccagaactaccaccaggactcagaggccgccatcaaccgccagatcaacctggagctctacgcctcctacgtttacctgtccatgtcttactactttgaccgcgatgatgtggctttgaagaactttgccaaatactttcttcaccaatctcatgaggagagggaacatgctgagaaactgatgaagctgcagaaccaacgaggtggccgaatcttccttcaggatatcaagaaaccagactgtgatgactgggagagcgggctgaatgcaatggagtgtgcattacatttggaaaaaaatgtgaatcagtcactactggaactgcacaaactggccactgacaaaaatgacccccatttgtgtgacttcattgagacacattacctgaatgagcaggtgaaagccatcaaagaattgggtgaccacgtgaccaacttgcgcaagatgggagcgcccgaatctggcttggcggaatatctctttgacaagcacaccctgggagacagtgataatgaaagctaagcctcgggctaatttccccatagccgtggggtgacttccctggtcaccaaggcagtgcatgcatgttggggtttcctttaccttttctataagttgtaccaaaacatccacttaagttctttgatttgtaccattccttcaaataaagaaatttggtacccaaaaaaaaaaaaaaaaaaaaaaaaaaaaaaaaaaaaaaaaaaaaaaaaaaaaaaaaaaaaaaaaaaaaaaaaaaaaaaaaaaaaaaaaaaaaaaaaaaaaaaaaaaaacaacaaaaaaaaaaaaaaaaaaaaaaaaaga

SEQ ID NO: 537797 - DNA, 465 bp, Homo sapiens
  misc_feature (285)..(285): n is a, c, g, or t
actactttgcttttcagtagtggatttgatatttataatgttctctaaagcttgcaactttttcagcaacgtttaaaaatagattaacctggaataacttacttgtttgctgctaaaatactcaagattttgccatttttaaacaaccagtccctgcgatacaactttgaaaaaccttttaacaatctcccatgtatgggctctttttttcccatacgaattgtgtacacccgtgccgcctccacccgggatccccctttaaacagtgtacacctcggaccacantgaaatgtcctctatcctttctctactcaaaattggttctctcctccgacttcatttccgctgcgtccttgcttgtcgctgttttctgcctgaagacgtgtatcataaagagctacatggtatggactatttatttgtaatttgacataaagtttgaagaataacgatctcccaacgttc

SEQ ID NO: 537798 - DNA, 1644 bp, Homo sapiens
  misc_feature (74)..(74): n is a, c, g, or t
  misc_feature (77)..(79): n is a, c, g, or t
  misc_feature (83)..(83): n is a, c, g, or t
  misc_feature (99)..(101): n is a, c, g, or t
  misc_feature (1218)..(1218): n is a, c, g, or t
gggaacatgttatcacactcatgaatctgctaacctcaacgtgggcattttccttcacgatatccataatccanacnnntctnacttggaaaacccctnnnatgcaatggagtgtgcattacatttggaaaaaaatgtgaatcagtcactactggaactgcacaaactggccactgacaaaaatgacccccatttgtgtgacttcatgagacgttcttcgccgagagtcgtcggggtttcctgcttcaacagtgcttggacggaacccggcgctcgttccccaccccggccggccgcccatagccagccctccgtcacctcttcaccgcaccctcggactgccccaaggcccccgccgccgctccagcgccgcgcagccaccgccgccgccgccgcctctccttagtcgccgccatgacgaccgcgtccacctcgcaggtgcgccagaactaccaccaggactcagaggccgccatcaaccgccagatcaacctggagctctacgcctcctacgtttacctgtccatgtcttactactttgaccgcgatgatgtggctttgaagaactttgccaaatactttcttcaccaatctcatgaggagagggaacatgctgagaaactgatgaagctgcagaaccaacgaggtggccgaatcttccttcaggatatcaagaaaccagactgtgatgactgggagagcgggctgaatgcaatggagtgtgcattacatttggaaaaaaatgtgaatcagtcactactggaactgcacaaactggccactgacaaaaatgacccccatttgtgtgacttcattgagacacattacctgaatgagcaggtgaaagccatcaaagaattgggtgaccacgtgaccaacttgcgcaagatgggagcgcccgaatctggcttggcggaatatctctttgacaagcacaccctgggagacagtgataatgaaagctaagcctcgggctaatttccccatagccgtggggtgacttccctggtcaccaaggcagtgcatgcatgttggggtttcctttaccttttctataagttgtaccaaaacatccacttaagttctttgatttgtaccattccttcaaataaagaaatttggtacccaaaaaaaaaaaaaaaaaaaaaaaaaaaaaaaaaaaaaaaaaaaaaaaaaaaaaaaaaaaaaaaaaaaaaaaaaaaaaaaaaaaaaaaaaanaaaaaaaaaaaaaagagaggggggggcgggtttaataagtgtttctctctcggggggggcgcgaagattttgtgctgcaccgcgttttttttagagaagggggctactattatagggggggtagtatttatagaagggagggaggggacgcgggtgttatataaacaacggctttggtggtggggagaaaacatgatgctgtagtggtgtgaagacatttttgaggggggaaagcaccccacttatttttgggggggggggaagcaaatatgtgtgggagaaacaacttcctacccagagagtatattaacggtccgcgagggggaagtaatataaaaaactttgggagggtgtttaggagtggttgagacaaggtgataattatcgttgggtgaaaaaattttgtgcggaggagaatttattgaa

SEQ ID NO: 537799 - DNA, 1136 bp, Homo sapiens
  misc_feature (74)..(74): n is a, c, g, or t
  misc_feature (77)..(79): n is a, c, g, or t
  misc_feature (83)..(83): n is a, c, g, or t
  misc_feature (99)..(101): n is a, c, g, or t
gggaacatgttatcacactcatgaatctgctaacctcaacgtgggcattttccttcacgatatccataatccanacnnntctnacttggaaaacccctnnnatgcaatggagtgtgcattacatttggaaaaaaatgtgaatcagtcactactggaactgcacaaactggccactgacaaaaatgacccccatttgtgtgacttcatgagacgttcttcgccgagagtcgtcggggtttcctgcttcaacagtgcttggacggaacccggcgctcgttccccaccccggccggccgcccatagccagccctccgtcacctcttcaccgcaccctcggactgccccaaggcccccgccgccgctccagcgccgcgcagccaccgccgccgccgccgcctctccttagtcgccgccatgacgaccgcgtccacctcgcaggtgcgccagaactaccaccaggactcagaggccgccatcaaccgccagatcaacctggagctctacgcctcctacgtttacctgtccatgtcttactactttgaccgcgatgatgtggctttgaagaactttgccaaatactttcttcaccaatctcatgaggagagggaacatgctgagaaactgatgaagctgcagaaccaacgaggtggccgaatcttccttcaggatatcaagaaaccagactgtgatgactgggagagcgggctgaatgcaatggagtgtgcattacatttggaaaaaaatgtgaatcagtcactactggaactgcacaaactggccactgacaaaaatgacccccatttgtgtgacttcattgagacacattacctgaatgagcaggtgaaagccatcaaagaattgggtgaccacgtgaccaacttgcgcaagatgggagcgcccgaatctggcttggcggaatatctctttgacaagcactcccttgggagactgttgataatgacatagctaaagcctcgggctaatttccccatagccgtggggtgacttccctggtcaccaaggcagtgcatgcatgttggggtttcctttaccttttctataagttgtaccaaaacatccacttaagttctttgatttgtaccattccttcaaataaagaaatttggtacccaaaa

SEQ ID NO: 537800 - DNA, 513 bp, Homo sapiens
  misc_feature (32)..(32): n is a, c, g, or t
tctagaggatcccccaacgcatgtgccgctcncccaatcttccttcaggatatcaagaaaccagactgtgatgactgggagagcgggctgaatgcaatggagtgtgcattacatttggaaaaaaatgtgaatcagtcactactggaactgcacaaactggccactgacaaaaatgacccccatttgtgtgacttcattgagacacattacctgaatgagcaggtgaaagccatcaaagaattgggtgaccacgtgaccaacttgcgcaagatgggagcgcccgaatctggcttggcggaatatctctttgacaagcacaccctgggagacagtgataatgaaagctaagcctcgggctaatttccccatagccgtggggtgacttccctggtcaccaaggcagtgcatgcatgttggggtttcctttaccttttctataagttgtaccaaaacatccacttaagttctttgatttgtaccattccttcaaataaagaaatttggtacccaaaa

SEQ ID NO: 537801 - DNA, 725 bp, Homo sapiens
cacggtggctcacacctgtaatcccagcactttgagaggctgatgtgggtggatcatctgaggtcaggagttcaagaccagcctggccaacatggtgaaactccatctttactaaaaatataaaaattagctgggtgtggtggtgggcacctgtagtcccagctactcaggaagctgaggcaggagaatcacctgaacccgggagccagaggttgcagtgagccctgatagtgccattgcactccagcctgggcaacagagcgagactcagtctcaaaacaaacaaaccaacaaacaaacaacaacaacaaaacccaaaagtccaggtccagtggctcatgcctgtaatctcagcactttgggaggccaagacaggcggatcatctgaggtcaggagttcgagaccagcctggcaacaaggtgaaactcagtctttactaaaaataccaaaatcagccaggtgtggtggtaggcacctgttaatctcagctactccgggaaggctgagacaagagaattcactttgaaccccagggaggaagaggtttgcagttaagccaagagatagttgcccttgggacaccagcctgggtggaccacgagtggaaactcccggtctcccaaaaaaaaaccgttaaaacgtctggcttgctgggaaaggccctttccttaaaggctggactgcaaattccttaaattctaataaaattggcctgttaagggat

SEQ ID NO: 537802 - DNA, 1141 bp, Homo sapiens
  misc_feature (74)..(74): n is a, c, g, or t
  misc_feature (77)..(79): n is a, c, g, or t
  misc_feature (83)..(83): n is a, c, g, or t
  misc_feature (99)..(101): n is a, c, g, or t
gggaacatgttatcacactcatgaatctgctaacctcaacgtgggcattttccttcacgatatccataatccanacnnntctnacttggaaaacccctnnnatgcaatggagtgtgcattacatttggaaaaaaatgtgaatcagtcactactggaactgcacaaactggccactgacaaaaatgacccccatttgtgtgacttcatgagacgttcttcgccgagagtcgtcggggtttcctgcttcaacagtgcttggacggaacccggcgctcgttccccaccccggccggccgcccatagccagccctccgtcacctcttcaccgcaccctcggactgccccaaggcccccgccgccgctccagcgccgcgcagccaccgccgccgccgccgcctctccttagtcgccgccatgacgaccgcgtccacctcgcaggtgcgccagaactaccaccaggactcagaggccgccatcaaccgccagatcaacctggagctctacgcctcctacgtttacctgtccatgtcttactactttgaccgcgatgatgtggctttgaagaactttgccaaatactttcttcaccaatctcatgaggagagggaacatgctgagaaactgatgaagctgcagaaccaacgaggtggccgaatcttccttcaggatatcaagaaaccagactgtgatgactgggagagcgggctgaatgcaatggagtgtgcattacatttggaaaaaaatgtgaatcagtcactactggaactgcacaaactggccactgacaaaaatgacccccatttgtgtgacttcattgagacacattacctgaatgagcaggtgaaagccaccgccatcaagacgaatgggtgacctggtgaacctattgtgcgcaaagatgggagcgcccgaatctggcttggcggaatatctctttgacaagcacaccctgggagacagtgataatgaaagctaagcctcgggctaatttccccatagccgtggggtgacttccctggtcaccaaggcagtgcatgcatgttggggtttcctttaccttttctataagttgtaccaaaacatccacttaagttctttgatttgtaccattccttcaaataaagaaatttggtacccaaaa

SEQ ID NO: 537803 - DNA, 944 bp, Homo sapiens
  misc_feature (32)..(32): n is a, c, g, or t
tctagaggatcccccaacgcatgtgccgctcncccaatcttccttcaggatatcaagaaaccagactgtgatgactgggagagcgggctgaatgcaatggagtgtgcattacatttggaaaaaaatgtgaatcagtcactactggaactgcacaaactggccactgacaaaaatgacccccatttgtgtgacttcattgagacacattacctgaatgagcaggtgaaagccatcaaagaattgggtgaccacgtgaccaacttgcgcaagatgggagcgcccgaatctggcttggcggaatatctctttgacaagcacaccctgggagacagtgataatgaaagctaagcctcgggctaatttccccatagccgtggggtgacttccctggtcaccaaggcagtgcatgcatgttggggtttcctttaccttttctataagttgtaccaaaacatccacttaagttctttgatttgtaccattccttcaaataaagaaatttggtacccaaaaaaaaaaaaaaaaaaacaaaaaaaaaaaaaaaaaaaaaaaaaaaaaaaaaaaaaaaaaaaaaaaaaaaaaaaaaaaaaaaaaaaaaaaaaaaaaaaaaaaaaaaaaaaaaaaaaaaaaaaaaaaaaaagggggggggggcgaaaagaaacccgggggggggaatgggggcccattgttgttagaaagggggcggccctatggagggggcttttataaaatgtagatgaggaggaggcggcggtataacaaacgattgtgtaggggagaaaagtgaccgagcggatgtcgtaggaacaaaccccacttgtggtggtcagacaactttggcgcataaccgaacgaagtttacagcgcgggggaaatagtagatcaggtaatgtgggcgaacacacttatatcgcgcaaaaagtggttgtgagagatagaatttg

SEQ ID NO: 537804 - DNA, 195 bp, Homo sapiens
ttctagtccagagtgacaggcacaggccacgcgcactcccttacaccctggctgagctgctttcacaccatacggcccgcgaaggggggttgcatggcctgcaaagcctgaaatatttacagagaaggagtgctcacccctgcgctaggggcaaagcccaaagtgtacccttgacgcaagacagaaaaagctact

SEQ ID NO: 537805 - DNA, 416 bp, Homo sapiens
gggatcccactcccttacacagcgaaataaacccctttttaaaataaatcacccagtctcaggtattcctttacagcaacacagacagactaagagagtcataccccaagtatttcttacttattcagtaactgagtaatgtttagaaatggaagaggagacagcaccagagttggtaagaacaagctgagcacaggcaaggagggggctgacaccatgaggctgggaggctcaatctcgggtgtcggcggacaggtgctgaggggctgtgttgtgtgcctggtctggtctttaacactttcacagaaaagaaaaaacatacagagaagcccatgcagtcatgcgctgcagtcaaacagggcaagaagaaagatgtacagggataccaaatccttccaaggtaagaggcacagaaa

SEQ ID NO: 537806 - DNA, 811 bp, Homo sapiens
tcttggtgctggcccccccatcgtgttgtgctctcctgctggcgtgtggcacgctcgctgtttggtcgtgggtgattatatgatgtaccttcccggttggtccccctgttgggggggcccccccacggcgtttggcgccccgctgatatggccgcctgttgttgattgtggaggatgctgttcttcgctggagtcggtgtccccgcgtctcttatttttaaggtgctgtgttgctcccccacctctttgtttttgtgtttatccccaccatgggataattatggccttcggggtttacgcgcgtgtatagccttgtgggggccgccttccgagggggatatatctttgtaggtagtccgcgtcgccccctcttttgtttgttgtttttgggttacccaaagtgttccttatatgtggaaaggcgacattgggttaccaagattccaaaggaaccttaatgtgaatgtttttggtaccaaccttatagaaaaggtaaaggaaacccccaaccaggccatgccactcccttggtgaccagggaagtcaccccacggctatggggaaatagcccgaagcgcccgaatctggcttggcggaatatctctttgacaagcacaccctgggagacagtgataatgaaagctaagcctcgggctaatttccccatagccgtggggtgacttccctggtcaccaaggcagtgcatgcatgttggggtttcctttaccttttctataagttgtaccaaaacatccacttaagttctttgatttgtaccattccttcaaataaagaaatttggtacccaaaa

SEQ ID NO: 537807 - DNA, 416 bp, Homo sapiens
  misc_feature (70)..(70): n is a, c, g, or t
  misc_feature (77)..(77): n is a, c, g, or t
  misc_feature (79)..(79): n is a, c, g, or t
  misc_feature (83)..(83): n is a, c, g, or t
  misc_feature (85)..(85): n is a, c, g, or t
  misc_feature (92)..(93): n is a, c, g, or t
  misc_feature (98)..(98): n is a, c, g, or t
  misc_feature (132)..(132): n is a, c, g, or t
  misc_feature (134)..(134): n is a, c, g, or t
  misc_feature (149)..(149): n is a, c, g, or t
  misc_feature (153)..(153): n is a, c, g, or t
  misc_feature (161)..(161): n is a, c, g, or t
  misc_feature (274)..(274): n is a, c, g, or t
  misc_feature (287)..(287): n is a, c, g, or t
  misc_feature (294)..(294): n is a, c, g, or t
  misc_feature (298)..(298): n is a, c, g, or t
  misc_feature (323)..(324): n is a, c, g, or t
  misc_feature (326)..(326): n is a, c, g, or t
  misc_feature (328)..(328): n is a, c, g, or t
  misc_feature (332)..(332): n is a, c, g, or t
  misc_feature (335)..(335): n is a, c, g, or t
  misc_feature (371)..(371): n is a, c, g, or t
  misc_feature (388)..(388): n is a, c, g, or t
  misc_feature (401)..(401): n is a, c, g, or t
ctttttcccccccggttggggggaatgggtcttaacaagttgtgtacctttggggtctgggcccgggttntagcccnanggcngnggtgttnnctggntgcaggggtcccaggaatttccccccaaaaagtncnttttttgggctttcnggcnggggcccngccggggccccccccttttttttttgaccagctttttgggggtggcacccggggggtggaaaaagggggccccctttttttgcttggtgggccccggggcccttccgttggcntttccccagaagncctttgnccgnttggggggttaacccccccctgtcnntntntttnttnttttgggggggggggggggccctgttttttggccgnccccctgtccccccccntggtttaactccntgttcccccccgcca

SEQ ID NO: 537808 - DNA, 884 bp, Homo sapiens
  misc_feature (372)..(372): n is a, c, g, or t
atcaagctggccatgtcaccaaggtcctgggacaggatcggttctcagggtacgagtgcacgcaggtgcgcgtggaattcatggacgacacgagccgaatccatcatccgcaatgtaaaaggccccgttgcgcgagttggctgacgttgctcatcccgtttgtggagatcagagcgagagagcctcggaggtatagcagctagacgcttggcatgcctcgctggcgtcttgtgattgtctgggttcagaccacattggtgccagatagggcaattggtcctagtcaccaatctagctccatttattttttagtactcgccatcatcgttatacctgaaggaatgacttccccttttacaagtaacacgtggntattgagtgcttatcacagttgtacaatgaacagagacataacaataacaagcaaaggggagcggacgcagtgtcccgaaaagcataatctcgctgaggaaggcgtgtcccacagaagatctataaacgagttataacgcacgggggaataacttatttgttgcgcaaatggggagaggcgccactatacctaggaggacgactcgactcattgtgaataatggcccataaaagccaacacgtgagcctgctcgtgcggatatgtaagcacaacgaggtgatcgggtgcacccgcgggtgcaaaacacagcggaggcaaatagccattgtgaggagaaaactcaattgtgccgtggaacagggagacccacctgtatttgcaatctgccacgggagcgttcgttggccccgctctacttccttggggtacacaaatattttagcgcataaccaaggagccttgtttatccaaagggccgtacaagacgggggagcacatcattatttaacca

SEQ ID NO: 537809 - DNA, 574 bp, Homo sapiens
  misc_feature (32)..(32): n is a, c, g, or t
  misc_feature (563)..(563): n is a, c, g, or t
tctagaggatcccccaacgcatgtgccgctcncccaatcttccttcaggatatcaagaaaccagactgtgatgactgggagagcgggctgaatgcaatggagtgtgcattacatttggaaaaaaatgtgaatcagtcactactggaactgcacaaactggccactgacaaaaatgacccccatttgtgtgacttcattgagacacattacctgaatgagcaggtgaaagccatcaaagaattgggtgaccacgtgaccaacttgcgcaagatgggagcgcccgaatctggcttggcggaatatctctttgacaagcacaccctgggagacagtgataatgaaagctaagcctcgggctaatttccccatagccgtggggtgacttccctggtcaccaaggcagtgcatgcatgttggggtttcctttaccttttctataagttgtaccaaaacatccacttaagttctttgatttgtaccattccttcaaataaagaaatttggtacccaaaaaaaaaaaaaaaaaaaaacaaacaaaacaaacaaaaaaaacacaaacaaanaaaacaaacaa

SEQ ID NO: 537810 - DNA, 569 bp, Homo sapiens
  misc_feature (32)..(32): n is a, c, g, or t
tctagaggatcccccaacgcatgtgccgctcncccaatcttccttcaggatatcaagaaaccagactgtgatgactgggagagcgggctgaatgcaatggagtgtgcattacatttggaaaaaaatgtgaatcagtcactactggaactgcacaaactggccactgacaaaaatgacccccatttgtgtgacttcattgagacacattacctgaatgagcaggtgaaagccatcaaagaattgggtgaccacgtgaccaacttgcgcaagatgggagcgcccgaatctggcttggcggaatatctctttgacaagcacaccctgggagacagtgataatgaaagctaagcctcgggctaatttccccatagccgtggggtgacttccctggtcaccaaggcagtgcatgcatgttggggtttcctttaccttttctataagttgtaccaaaacatccacttaagttctttgatttgtaccattccttcaaataaagaaatttggtacccaaaaaaaaaaaaaaaaaaaaaaaaaaaaacaacaaaaaaaaaaaaaaaaaaaaaaaaaga

SEQ ID NO: 537811 - DNA, 366 bp, Homo sapiens
  misc_feature (104)..(104): n is a, c, g, or t
  misc_feature (134)..(134): n is a, c, g, or t
  misc_feature (170)..(170): n is a, c, g, or t
  misc_feature (208)..(208): n is a, c, g, or t
  misc_feature (225)..(225): n is a, c, g, or t
  misc_feature (256)..(256): n is a, c, g, or t
  misc_feature (276)..(276): n is a, c, g, or t
ctatcaactgaggcgattccgatagagactggcacaagctttgggctaaggacacccgcccccaccctcatctagaaacaatctctctcgccagacttgatggntcacgcctgtaatcccagcattttgggagnccgagtcgggcggatcacaaggtcaagagatggagnccatcctggccaacatggtgaaaccccatctctactanaaatacaaaaattaacnggggcgtggtagcacacacctgtagtcccanctacttaggaggttgaggcnggagagtcgcttgaaccagggagttggaggttgcggtgagtggagatcacaccattgccctgcagcctaagcaacagagcaagattctgt

SEQ ID NO: 537812 - DNA, 253 bp, Homo sapiens
gtgtttgccttacatgtggtcactataaaggtgaataagtagttgcaaaagcttaattgagtgtgtaaaacacctacacatttgtgtaggtgttttttactgcccaaaaatggatagttgttgattaatgtatgctttatattaatatctcctataaagtattaattaattttaaaataacgacaatatttagtatattaccataaaatatatcactatatatgcgaaaaaccttgccaatatgggtcgacgc

SEQ ID NO: 537813 - DNA, 298 bp, Homo sapiens
ttgtctcataagccaagggaagaccaagttccattgacaggaaggtgtactacgttataatctattctctcaggtcagagaagacggatgcgacagagtaaagaacattggtgacgcttaagtaaattgctttaagttggatgttggaagcaatatgcaacatttgagggaactaaaggatggtgaaaaactataatcaaaatttattctttccagaagtttggtagttgaaaggagagaggtggacggtctctcaaaaggcacattagaaaggtgaaagtggttcagactggtcctg

SEQ ID NO: 537814 - DNA, 878 bp, Homo sapiens
  misc_feature (73)..(73): n is a, c, g, or t
  misc_feature (113)..(113): n is a, c, g, or t
  misc_feature (190)..(190): n is a, c, g, or t
  misc_feature (199)..(199): n is a, c, g, or t
  misc_feature (878)..(878): n is a, c, g, or t
cttatccctgtaacacatgtgccataatatacaaacttcaaatgtagctctcttgaatattcactggatcatnaggcataggcatgatgcgtgacgtgcatctctcatccacngttggccaggactggtgtccagattggcaatgcctgctgagagcatctactgcctgagaacacggcatccccaaagncccccccgnaatttgggccaaaatatggcaaaattcaggccgcacaaacagcggggagtggggaaagaccaaataaagaagggaaacacgcctaaggctttcatacagcacgcacaggacaggggcgggaaacacaggcgaggaaacgcaggcaaactattcgggggaatctccgtttcccaccctatatgtatgttcccgaaaaaaagaccaaagacagtcctctgtattatttctccatttttctgcaccaaacagcggcttctagacaacatggagaaaccccatgggacgggtgggaccgacgggccccattttagggggggcgccccataaacaattgacgcgtcccacaaacaccaggtattgtgccccaccccggaggaggtgcccctgcatcggctttcatgataagagaaacattttcggggaaaaatcccacaatctaagacttccaaattagggaactgcaacacgttttcccgcacctggtgcaacccgttaacgcgtcaccagaacttccttttcgcgagcccctgacaggacaagcctcaagttcaaccagaggcaaaagggaaagaagcactgtccttgaccctaaagataaaccttaatgaccccccggaaagggggacaaaccgttaaacaaacccaaattttgggggccaaaggggaaagcaaattccan

SEQ ID NO: 537815 - DNA, 716 bp, Homo sapiens
  misc_feature (173)..(173): n is a, c, g, or t
  misc_feature (194)..(194): n is a, c, g, or t
  misc_feature (261)..(261): n is a, c, g, or t
  misc_feature (479)..(479): n is a, c, g, or t
  misc_feature (505)..(506): n is a, c, g, or t
  misc_feature (519)..(520): n is a, c, g, or t
  misc_feature (539)..(539): n is a, c, g, or t
  misc_feature (545)..(546): n is a, c, g, or t
  misc_feature (591)..(591): n is a, c, g, or t
  misc_feature (602)..(602): n is a, c, g, or t
  misc_feature (641)..(642): n is a, c, g, or t
  misc_feature (646)..(646): n is a, c, g, or t
  misc_feature (649)..(649): n is a, c, g, or t
  misc_feature (653)..(653): n is a, c, g, or t
  misc_feature (655)..(655): n is a, c, g, or t
  misc_feature (673)..(673): n is a, c, g, or t
  misc_feature (677)..(677): n is a, c, g, or t
  misc_feature (679)..(679): n is a, c, g, or t
  misc_feature (685)..(686): n is a, c, g, or t
gtcttccgtgggcggcggcttcgcgggcttggagttcgcgcggcgcaggagtcggagccgcgggctcggacctgggggccccccggacgtggacgggggcggcggcggggccccggactccgtcggcgcacatccccgtcccagcgcagagagccaccccaggaaaagccggntggacgaggtcatggctgcgntgccttacaagcctgtccaccagccctctccttctgggggcccagttgcagcttcagcccagagccnggcctggagccctggaatggaggccctggtgcgagccccaggcagctacagcagcagacagcaacagtggagactggggatgggacctggccagtgaccagtcctctccgtccagcccgtcaccaccacactgcaccccaccgaggcagcccacatttcatgtaatggggagcccaacctgagaaaaaggaagagcccaggccacagtgtcatgtccnagtgtctgtggaagagctgcgggaanngtgctgagcaggnngtcggcgatgcagagacanaatcgnntggtgcacctgggaggcaggcagagctgatcagagtgatggtgangaggattctantacacagagctggatgtaaggtgtggacacgctgaccgnngggntgncaancntgactccagtgtccccanggcncnatgcgnntgcttccccgcggaagttgcagagtggtgg

SEQ ID NO: 537816 - DNA, 650 bp, Homo sapiens
gtattttttagacaaagatggactggctatatagtattagtaatgaagcatctttgcttcactaatttctttaggtggagacgtacatttccttgaaaatttgagagactcaataaaatccatagagccagaggcaaggctaccctaggcctggatccagatgtctgttactaaatagatttttttttttttgcattgtaaaaggaatagaagactttctcagttctcatttttttttccatgttaaaatcacttcatgctgtttcactgaatacaccctgacttttgagtcttgtgaaccattttcagcattttttctttagttgtaaagaatctttctctagcttctgttgacatggctaccaaaccttcactctggagcagcttctttcatgtgagaactgttcttcactgaatgaagctcattgttcagatacctttgttttgctgctgaggtgttttccctaccttggtttggtatttccttctctttagatgcctctgtttcacagctgtctttccaagccttcagggacttgtggagagagggagggaaggtgacttgtggatcttaaatgatgttcatctaatcatttaacttaaccaaatcccctttagttaaataaatggtgttctattaaaaaaaaaaa

SEQ ID NO: 537817 - DNA, 284 bp, Homo sapiens
  misc_feature (104)..(104): n is a, c, g, or t
  misc_feature (182)..(182): n is a, c, g, or t
  misc_feature (212)..(212): n is a, c, g, or t
ccctccctgttttacactggggacagcagaattttctccccgtcttccccttcctgccattttccctcccttgaaaggttgacaatggacaaccttggggcagntgagccctggccgcctcctggctggaaccatgagaaggaaggtcaggacttcccacagtgtccctgttgaaaaccgcngttaggaaaataaaagtttttttcatgggnaaaatttttttctgtgaaaaactaaaaaatagggtcccccgctttaataaaagaatcttttgaaaaaaaaaa

SEQ ID NO: 537818 - DNA, 512 bp, Homo sapiens
  misc_feature (173)..(173): n is a, c, g, or t
  misc_feature (194)..(194): n is a, c, g, or t
  misc_feature (261)..(261): n is a, c, g, or t
  misc_feature (275)..(275): n is a, c, g, or t
  misc_feature (301)..(302): n is a, c, g, or t
  misc_feature (315)..(316): n is a, c, g, or t
  misc_feature (335)..(335): n is a, c, g, or t
  misc_feature (341)..(342): n is a, c, g, or t
  misc_feature (387)..(387): n is a, c, g, or t
  misc_feature (398)..(398): n is a, c, g, or t
  misc_feature (437)..(438): n is a, c, g, or t
  misc_feature (442)..(442): n is a, c, g, or t
  misc_feature (445)..(445): n is a, c, g, or t
  misc_feature (449)..(449): n is a, c, g, or t
  misc_feature (451)..(451): n is a, c, g, or t
  misc_feature (469)..(469): n is a, c, g, or t
  misc_feature (473)..(473): n is a, c, g, or t
  misc_feature (475)..(475): n is a, c, g, or t
  misc_feature (481)..(482): n is a, c, g, or t
gtcttccgtgggcggcggcttcgcgggcttggagttcgcgcggcgcaggagtcggagccgcgggctcggacctgggggccccccggacgtggacgggggcggcggcggggccccggactccgtcggcgcacatccccgtcccagcgcagagagccaccccaggaaaagccggntggacgaggtcatggctgcgntgccttacaagcctgtccaccagccctctccttctgggggcccagttgcagcttcagcccagagccnggccgtcatgtccnagtgtctgtggaagagctgcgggaanngtgctgagcaggnngtcggcgatgcagagacanaatcgnntggtgcacctgggaggcaggcagagctgatcagagtgatggtgangaggattctantacacagagctggatgtaaggtgtggacacgctgaccgnngggntgncaancntgactccagtgtccccanggcncnatgcgnntgcttccccgcggaagttgcagagtggtgg

SEQ ID NO: 537819 - DNA, 153 bp, Homo sapiens
gccctcaaggatttccaagccgatgggggtgtgtgactccttgggagggggaatccaggagcccaaacggggtggccggcaggcaggcggaaaggaggcgcgcaggtagaaggttactacgaaattgcttccatcaaacctgtggctgttgta

SEQ ID NO: 537820 - DNA, 167 bp, Homo sapiens
ttaacgacgttgatctggcggggtatctgttcaacgtgttttcggttggctggatcttggaggcattgttgagtgatcttcgcaactttgctgcccacacggctcaggccaatctcggacgggcggtcgttgaactcgttggctgtctgttggctactggatttatt

SEQ ID NO: 537821 - DNA, 545 bp, Homo sapiens
tgcccaggtgagtgcagtggcgtaatcatagctcatatgcagtctggaactgctggacttaagctatcttcccatcttagcctcttgagtagctcggactacaggtgagcgacagcactcccagctgttatctattttatatttagtagagagagtcttgccatgttgcctggattcaaggaatcctctctccttaatctcccaaagttgggattacaggcgtcagctcattgtgcttggagaaaagtctatatattattttatatcgtcttagagatttctatggctatttaatacagtatgtaagtctgctcactagtattggaatacgcatgatggggcgtacttcctagtatacatgggggggagattattagtagtatataaaaaagactggggtttttctatatataatttggtaataggatatttgatgttattaagagtaagaagatatacaattgttatcgagaaacagaaggatatattaaggtaaaataactgggggtacttcaaagcattgtgtatgtattagcaatcttgag

SEQ ID NO: 537822 - DNA, 253 bp, Homo sapiens
tgcaccggtgtgtggttcattatgtagaaaaagaccttgcttgtgctgtccaggctgctcttgacctcctggaatcaagcagtccttacactttggcctcccggagtgctgggattacaggtgtgagacaccatgactggccacttcacactcttaagtaatatatctgaacaggtgcagcggatcacgcttgatatcccggtgcaggtcccggtccaggtatgggactaccggtgcaggtatggggagatac

SEQ ID NO: 537823 - DNA, 158 bp, Homo sapiens
gtccaacatcgggcgccgtgtgtagaggacatggtaaataataatctgaagtacgctgatacgagatctactgtggaaaaacaaaggatatcgtcaaagggctgaggtctgtgcagactttggcagacgaatcaaaacaagaagctctgaagaatgac

SEQ ID NO: 537824 - DNA, 354 bp, Homo sapiens
gaccgcgtcgtctgctctaatattattaactttgatggtttttcagtaaggcactaaatgccattgccattcttagaatctgtccaccctagatacataaattctggttaataaagcatcaactcaaattttaataataataataataataatacttttaccccttccataacagcaccatctattaagatcacgttctcagacattatcgaaagacaaaatgacctgtaatgtctcaatagaaaatttaatatatcacgtttaattaaatatctatgacacttccggaaacacagcatgcacaatgtaaacaaataaaataccggtgttgccaaaacacgaaataaattgata

SEQ ID NO: 537825 - DNA, 216 bp, Homo sapiens
  misc_feature (17)..(17): n is a, c, g, or t
  misc_feature (81)..(81): n is a, c, g, or t
cgtaccggattagatangacggtgaaaaggggccagaggtcttctggcttaaagggacacaatggattgcaaggtctgctngtatcgctggtcaccatggtgatcaaggtgctcctgtgctccgtgggtcctgctggtcctagtgggccctgcgtggtccttcttggccctgcgtgtgaaaacgatggtcgcacgtggacatccgtggggtggatc

SEQ ID NO: 537826 - DNA, 80 bp, Homo sapiens
ccgcctactactactactactgctcgaattcaagcttctaacgatgtacggggacatgtaaattgatcacgggatacaac

SEQ ID NO: 537827 - DNA, 873 bp, Homo sapiens
gccaaggcaggggttccggggccctggggctgaatgtggcgccgaccctatgcagtgtctggcccctctgctgcacagaagaaaagtggccttgtgaggtgcagagtgtgcaggctatgaccagggccctgtggcaagtcagtgccaactcactaggggagggccacgctgtgggctgtgcagtggtcagtgggcttcagtgtgtgctctgtgggtgacccacgagaagccatcttgagaacagtgtccactggtcaagccagtgccaccctataaaaggctggatgtgtgggccaatgggcatgagccgtccctgaggtggcaccgatggccagagctgaggcacaagctagaggccctggactagtgcttgactcccggcagacacagagcgctgaccttggcttgccgagccccgcgcgttcctaggactagcagggagttgccttgccagaaggggcaccacatgggccaccggtcctgcaagctttctggggcaggccgggccttaccttggctattgagggcaaggggggtgcgggctacaggtggacggcaagaaggacaccaagtgcaggagggcaacacggacagtgacgcggacggaacgcccgacaacgaccaggcagcgcagataaacccgtgggccgagaacaaagagcaagaagccacaggaagacaaacaaagaagaccacacagaggaaagacacaagacatacactggcaccaaaacaaacgcgagtatgcagaaataggagcaacaagcactgagtgcacgagagggcgtcgaaaagcacgaaggaacacaactcgagaacaagtagccacacatagggaaagcagcacgcccacacacaaaaggcacagcgacg

SEQ ID NO: 537828 - DNA, 149 bp, Homo sapiens
  misc_feature (85)..(85): n is a, c, g, or t
aaactaggaaaactgtgtgtttaacaccagtctacaacacaagttgaaacacctgatctgtggatcatgataacacttcaccatnttcagaacaccctcagttactaatcacttaccctgatgactcagactcagagaagaactctgat

SEQ ID NO: 537829 - DNA, 805 bp, Homo sapiens
tcccccccctgttcgccaccgaggtcgccgcgtaaaatttctccgccgcaaaccccgccgcgatgcgctacgtcgcctcctacctgctggtctgccctagggggcaacttctccttcccccagcgccaaggacttcaagaagactctttggacagcgtggggtctcgaggcggacgacgaccggcctcaacagggttactcagtgagctgaattggaaaaacctttgaagacgctctttcgcccagggtatgggcaagctttgccagtgttccctgctgtgggtgggggcttgatacccgctctctcttgcttgccccagggcttcttgaaggcccctgtgcttgcttggttctctcgcccctgtgcttgcacgcaaatggaagaaagaaaagattgaaaacgaaggagggagtctctgaaaaatgctcaggattgatgcacatgtggagatttgggcggccctttgtggactaaaattctcctgttgcctcccctgtgcgaaaatttaaaacggccttttttacaccactttcaaaaaacacaaaaaaacaacacaaaaaaaaaaaaaaacactctggagggcgacaatctatatatgtgccgcgggagcgcgccgagaaacaaaagagagcgtttacactgaaaacacgggcgcgcccaatgtgggcgcaacaacaaaccagtgttctcccaggaaccacccaacgcttctttgtttgtgtcccaaggggtgggcagaaaaactcgagcggggactccccaaaagtaggagcacgcagaataaaaatccaaaacaacgcaggt

SEQ ID NO: 537830 - DNA, 196 bp, Homo sapiens
  misc_feature (53)..(54): n is a, c, g, or t
gatgcaaggcagggtgtgattgcaccagcagtctccgggttgacttgtggggnntacactgggactcatcgagataccgacgccagaaacgggagctctgtacgcacaggaaccttccacggctgctacatgtactattttcagtatctgagcaaaacctactgcgtggatgcaactagagagacaaatcgccggg

SEQ ID NO: 537831 - DNA, 494 bp, Homo sapiens
ttcaactgcggttactgagacaaaggacatcatatattataaaaggtcaggccgggtgtggtggctcacgcctgtaatctcagcactctgggaggccaaggtgggcagatcacgaggtcaggagattgggaaccatcctggcaacacagtgaaaccccatcctcactaaaaaaacaaaaaaaaaaaacaaaaaaatttagccaggcatggcggcaggcacttatagccccagttactcaggaagctgaggcaggaaattggtgtgaccttgggaggcagaccttgcagtgagctgagataacgccattgcactccagcctgggcacaattgagcactgagtgaacgagactccgtctgcaatcccggcacctcggaaggcagaggttagagaataattcgcggtaagaagctggagaccagcccggccaacacggcaaaaccccgtctccaccaaaaaaaaacggaaacccagtcaggcgttgagaggtgcccc

SEQ ID NO: 537832 - DNA, 1075 bp, Homo sapiens
  misc_feature (74)..(74): n is a, c, g, or t
  misc_feature (77)..(79): n is a, c, g, or t
  misc_feature (83)..(83): n is a, c, g, or t
  misc_feature (99)..(101): n is a, c, g, or t
gggaacatgttatcacactcatgaatctgctaacctcaacgtgggcattttccttcacgatatccataatccanacnnntctnacttggaaaacccctnnnatgcaatggagtgtgcattacatttggaaaaaaatgtgaatcagtcactactggaactgcacaaactggccactgacaaaaatgacccccatttgtgtgacttcatgagacgttcttcgccgagagtcgtcggggtttcctgcttcaacagtgcttggacggaacccggcgctcgttccccaccccggccggccgcccatagccagccctccgtcacctcttcaccgcaccctcggactgccccaaggcccccgccgccgctccagcgccgcgcagccaccgccgccgccgccgcctctccttagtcgccgccatgacgaccgcgtccacctcgcaggtgcgccagaactaccaccaggactcagaggccgccatcaaccgccagatcaacctggagctctacgcctcctacgtttacctgtccatgtcttactactttgaccgcgatgatgtggctttgaagaactttgccaaatactttcttcaccaatctcatgaggagagggaacatgctgagaaactgatgaagctgcagaaccaacgaggtggccagcccgcattcagccacctgcccagccgccgggcggagggagcaggctcaggcaccgagactgctgagccactggccgcccgggaagaaggctgcgttctgagtcggtcaccgaatatgtccccccttggacgggagtagcgcaacgatgtgcaggccagctcaggaagtaacgctgggagcttctagaaggtggagcgggatccaggaccgtgggagcttttccggagaagcctacctctcctgtgttgcagctgatgggagcaagacgctcttctcccatcagtgcctccttgcctgttttctttcatacctgaattcccatctttaagctgtggatcctgatgggagcaagactggcgcatcttgctcccatcagagacaaacaaacttttgtttcctaggttgagggtctaattgatac

SEQ ID NO: 537833 - DNA, 301 bp, Homo sapiens
ttatgtatcgtgtgtagtagagatcagtgggtcagaaactactcctgaccactttgtttccttttgagccgcgtcattaggaggcaatctgtatacaactagcacaggtctcctgctgttccactggctcacccacatgattagcagagtgcaccgaaaaaatctaaaacttctattatagaatcatgctgagcacaatgatcagagaggttgtgactttgcaaaccctattagatgcagggggcctggagactggcgttctccaaagggctcccaacgccatctctcctctgatttctgt

SEQ ID NO: 537834 - DNA, 165 bp, Homo sapiens
ctgcggatcggattacgatccgcagcagcggcgctttccactgttccatctagaggtgagccatgatcgaggtcctacgctttccaacattcaggaacctgttcgctgcgcaggttatcgcgctgatcggcacgggcttggctaccgtggcgctctctcttttgg

SEQ ID NO: 537835 - DNA, 834 bp, Homo sapiens
  misc_feature (74)..(74): n is a, c, g, or t
  misc_feature (77)..(79): n is a, c, g, or t
  misc_feature (83)..(83): n is a, c, g, or t
  misc_feature (99)..(101): n is a, c, g, or t
gggaacatgttatcacactcatgaatctgctaacctcaacgtgggcattttccttcacgatatccataatccanacnnntctnacttggaaaacccctnnnatgcaatggagtgtgcattacatttggaaaaaaatgtgaatcagtcactactggaactgcacaaactggccactgacaaaaatgacccccatttgtgtgacttcatgagacgttcttcgccgagagtcgtcggggtttcctgcttcaacagtgcttggacggaacccggcgctcgttccccaccccggccggccgcccatagccagccctccgtcacctcttcaccgcaccctcggactgccccaaggcccccgccgccgctccagcgccgcgcagccaccgccgccgccgccgcctctccttagtcgccgccatgacgaccgcgtccacctcgcaggtgcgccagaactaccaccaggactcagaggccgccatcaaccgccagatcaacctggagctctacgcctcctacgtttacctgtccatgtcttactactttgaccgcgatgatgtggctttgaagaactttgccaaatactttcttcaccaatctcatgaggagagggaacatgctgagaaactgatgaagctgcagaaccaacgaggtggccgaatcttctcagatatcagaaccagactgtatgactggagagcggctgatgcatgagtgtcatacattggaaaaatgtgatcagtactactggactgcacaactggcactgcaaaatgccccatttgtgtactcattagcaatacctattggcggtaagcatcagattggccacgtccacct

SEQ ID NO: 537836 - DNA, 272 bp, Homo sapiens
agtctgacacttgagcagtcgaggctgatgggatcgtctaaagttgacctggaggaatatatctttggacaatgaccgcctgttacacagttcattgtgtgagataagcctcgggctaatttccccatagccgtggggtgacttccctggtcaccaaggcagtgcatgcatgttggggtttcctttaccttttctataagttgtaccaaaacatccacttaagttctttgatttgtaccattccttcaaataaagaaatttggtacccaaaa

SEQ ID NO: 537837 - DNA, 1129 bp, Homo sapiens
gcagcacaagagcaagttccgagtggtggtggaagaggtgcaggttgtagagttgaaagttacatggattaccaatgagtttctgtccagggggcacggacgagctgtcagacccgccacctctctgtacatacacccgatggaaaacctaggacagtggtgcaagcgtctctggatgctttgacgcatgctacagctggcagcattggcggagcgctggtctggtatcgtcttcccagcgcaaggtcagagccatgccagagattgcctggtgcacatgtccagcaacatacaactagcgccacaggggcgagggcgtctatgcgccacagaacggtgacagcgcgctgttcgaagacagcatggtatgtcgcggactcatagtcatcggctccccgagacgacccagtggttacccgggaccagttccatggcaagagccatgacacagaagggggaatccaagaagcacgcagcgaagcgggagtctgcacagaacctgaggagacgcccgatggctctgacagtccagtggagatgcagagacgagggtgcagaggagccccacgaggcaggagaggagatgcgcaccaattccgtgataaaaagaaggcagagatgacaggctgcaatcggaagagacaagacgcagatgatgagcgctgatgatgaacacggacgcaacagtacggtgacctactactgacaaaatcacaacttgctcccagcagcggaagcgacaagagccgacaacaggagcatccagttgacaatcaaggactaaagagcgaaaaaaggagcagaagaatcaaataaccgaaaatcgaaagcggagaacggaggccatcgaggtgtacccagaacaaccaggcgagcacgatggagaagcagagcgcgacgacccagcgaccagggagcaaaccacggaaacagaagacaaacagaacacacgagaaacgagacaaaaacaccaagatgcaacagaagccgaggacaaagaaaaaaaacgagaagggaaacaacagcagacaacaaaaacacagacagccaagagaaaagaaaaaagaagagaacaaaaaaacaaaagcatacaccaaccgacagcaggaagcaaaaccaccaacccgca

SEQ ID NO: 537838 - DNA, 496 bp, Homo sapiens
gcggccgcctactactactactactgctcgaattcaagcttctaacgatgtacggggacatgttggggtttcctttaccttttctataagttgtaccaaaacatccacttaagttctttgatttgtaccattccttcaaataaagaaatttggtacccaaaaaaaaaaaaaaaaaaacaaaaaaaaaaaaaaaaaaaaaaaaaaaaaaaagaacagatagaacatgcatgaacggggggggggggcggacaaaaaaataatcaagacgggggaggacgaaagtaaagaggacgacccgacgaagtagaaacaaaaggggagcacaaaagaagagcgaaaaataaaacgcacagagccgcggacgcacaaaacacacaagcgagagaagaaaaaaaaacagaaagagggacacatacgcggagaagacgacaccaccaacggggggacggaaaacagaagaaaaaaaaaggcaaaaaacaaaacaacgcaccggcaa

SEQ ID NO: 537839 - DNA, 349 bp, Homo sapiens
gacgcagatcgttcgactgagcagcatggagaaatcctgtttctaccagaaatacgaaattagtcgggcgtggtggtgcacgcctgtagtcccagctacttgggaggctgatgcaggagaatcacttgaacctggaggcagagggtgcagtgagccaagatcgcgccactgcacttcagcctgggcaacaagagcgaaactccatctcaaaaaaaaaaaaaaaaagaagggagagggcaggggcagacttgaaagtttatctcaaaaacccttctactgagtactattgggccacggatcttataacaaaacagaattgtcatgacttttcagggcatatcataatcta

SEQ ID NO: 537840 - DNA, 313 bp, Homo sapiens
cagcttataagtacgaaaatatcctctctatctgtatccaagccaaagctattttaaaaacatcaataaaaaaatctaagttactatactatgcattatactttgtatagccatggacattcatgcacatgtcatcaaacttggatcccatatttacatccaatagatggccaaacttttacacaaaaacgatcaatttattagaaaactaaaaataatgtagaatagctagcttgttaaaacagtccattagccttacctcttcagcagatacaaataggctggaatcatttacgtttcttttcttttttct

SEQ ID NO: 537841 - DNA, 87 bp, Homo sapiens
  misc_feature (52)..(52): n is a, c, g, or t
  misc_feature (75)..(75): n is a, c, g, or t
atgccccctgtagtcccagcaaccagggaggcctaggtgggaggcttgcttnagtccagggaagtcgaggctgcngtgagccctgat

SEQ ID NO: 537842 - DNA, 346 bp, Homo sapiens
acaaccaatggatttcctggagactatatcccatactgctctctctgacgaagttattctgccagtgttatggtagatggaaaacgcaggtgaatctgggcttatgggatacagctggacgagaagattctgacagattacgccccctatcctatccgcccacagatgtgtacttcgtttgcttgactcttgtgaagtcctcgccttcttcggaaaatgtccgtgcaatacgtggcatcctgagtgtgcggcagcactgtcccaacactcccatcatcctagtagggaactaaactctgatcttaggggatgataaagacacgatcgagaaactgaaggagaagaa

SEQ ID NO: 537843 - DNA, 484 bp, Homo sapiens
atacgctaggaagaattcatctggcccgctggaaatgacccagcatctgacggattgcctgggccagctgtatcgctacgggctgggcgtgagctatgtcgaacgcgaacacggtggcgagattccgtacaccatctacgtgatggaggacgcgcgctcgatgggcgcgcaactgcgcgtgttccgtggtgcggtgtggttctaccttgtgcagcgccggtgtggttttgctggtattgcaagccttcattctgcaatggagcctgcgtacgctgcggcgggtcatcaacgagttgacgaaggtgcagcgcggcgagatccagcgcatgagcgagcagcatccgcgcgaaactggagccgatgaccggaagcatcaatgccttcatcgagagcgaacgcgacaacctggagcgtcagcgcactaccgctgtgcgatcttgcgcattgcctcaagacgccccatcgccgtcttgcgcacccacac

SEQ ID NO: 537844 - DNA, 202 bp, Homo sapiens
gacgcagcatgtcagactgtagaatatgatatcagcaccttgctgactctcttttcggactcagcccgcctgcaccaggtgaaatagacagccatgtgggcacacaaagcctgttgctggtctcttcacacggactcgagtgaaaatacacacgcacacacacacacgaatggacatttaccccactcctgcttttgtgcta

SEQ ID NO: 537845 - DNA, 394 bp, Homo sapiens
  misc_feature (31)..(31): n is a, c, g, or t
  misc_feature (76)..(76): n is a, c, g, or t
  misc_feature (184)..(184): n is a, c, g, or t
  misc_feature (213)..(213): n is a, c, g, or t
  misc_feature (235)..(235): n is a, c, g, or t
  misc_feature (281)..(282): n is a, c, g, or t
  misc_feature (337)..(337): n is a, c, g, or t
  misc_feature (368)..(368): n is a, c, g, or t
  misc_feature (385)..(385): n is a, c, g, or t
  misc_feature (394)..(394): n is a, c, g, or t
tcccccctaatctggcttttaatgttgaaanaacccaccccctgcccaaccaaaagggtcttcccttcccaagccnactcaagaacaattttaacttctctcctcccccatgttcccctttttttctctaaaatcccctgacatcaagccctccccaactcctaagagggactacccatgagantggggttctgaaggcctccctatgggganagttccgttcttgaagtgtcantgttggggaatatctgtgcctatgaggcccatctcaggtttggggnncccccagtccctatgatcagtgttggagtacccccctgggagagcctagtttctntgagcccaggccctcttttaactacctttgnataggtgttatccctgnatttatggn

SEQ ID NO: 537846 - DNA, 221 bp, Homo sapiens
tcccgttcttccctctattctttctcttccacttgtctctttccattactgactatgtatttaattcctctttcttcctaaatcttattcattagtcccattctccacatatttactggctctattcttccccattacaacactccctgttaaattccctcttccctgttacacaccgattgtccccacatctttggacacccccagaatcccaggctctc

SEQ ID NO: 537847 - DNA, 959 bp, Homo sapiens
ggggacacttggtcctattcactgtgtggagattagtcctgatggagaactctagtggccagtggttcagagagatggaacatatgagactaatggcgaaactgtggtaggaaaaatcgtatggcttaggaaatgtgtgctatcctgaagaagatagtggtgagctggtaagaagcgaagggattggttgttccagagacaacagaagaggagctagggaagaaattgttccagagaattcccgattgcctcttgccttcagctcctgatgttaaggctgagcgtcaatcatatgttgcagttagtatacaactgactaaaacaagcaagcagagaaaagcatcagccttccagagttactgtctgcttaaggcagaaacagcagtcactactgaggaacctgagttagctccagtgctggaacaactaactaacttggtgtcacctgtaagtgaaaactcaagtgtcagatgaagggaggtggagttatcgctcttatagtacagtggcctgttatctcattaatgaatatatacaagccaatatccaatgtctattattacatttagggttcttgtagctgtttatgttaatatggcgaagaagactgtattggctgatttgggctgatcttgaagcagaatgctgtatttcgagttcagtcgtgagaaacggatatgctagagtagctggtttgagttctcgctcatgtccccgggtcctgaaacttattggtttaggttgctaataaatggctttaatctccaaaagacgaagtggggtttttgcgggcgggaagggcaaaaggccaggctgggatcagagcggttggtagcgggttagtggcaccaggaggaagaaagcggacgctcatggcgagagaagtgggccaaggaggacataaaaacgggtggagacaacaatgtaagggagaaaagggaaaacaatatctgctggcg

SEQ ID NO: 537848 - DNA, 240 bp, Homo sapiens
tggtaccggcacgagcgcccaagtgaagcaactgtggaatgtaagccctctctcggcaagaagaagtggaaacagccaggcgtggtggctcacacctgtaatcccagcactttgggaggccaaggcaggcggatcgtgaggtcaggagttcgagaccagcctggcaatatggagtaacccgtctctacgaaaaatacaaaaactggccgggagtgggggcgcacgcctgtaatcccagct

SEQ ID NO: 537849 - DNA, 337 bp, Homo sapiens
cacctctggcgtctctctctccggctttcaccacgggatgcacctgctcctctctctctctctctctcccttgcttatgcgtgcaatgcgacctgctctccctttgccttccgccgatgcgtaaagagctccctgtaggcctccccagtaagcagatgccacctagcttcctgtacgagcgtgcagaaccctagagccaattaaacctcttttctttataaactacccagcctcaggtatgtctttacagcaatgtgaaaatggcctaatagcaccacaacgctcacctaacgctcacattttcccggcaccaccgtaggtgttatcattcaattta

SEQ ID NO: 537850 - DNA, 845 bp, Homo sapiens
ttatattttatgcaattttaagtatggttccattattaacgtttaaaacaaaaggatttccagttagaaaacaaggcacggaccacgataattcgctttgtattgtacacagttatacaaaatattctaaatacacatttggggttcaagatgatggcgaaataagattaacgggacagtacataaggaaagaaaatattttaggtatatttagaagcaatagaagaggtctatacaaaacaagcgaatgggaataaaatttttcattttgaaagtatggcgaacaggcgccacaggttggtaacaaaaaggtcttggcacagttcctcacgagggccattaatagctaaagcaagaaaggatttttgaaaaaatagtggttcacacaaggttaccacggggtacttacgtgttgcacagttggtcccaaaataagatcttacttgggagtccacagcaaaaacctagagggaaatataaccaagacaatttgaaacatccattctggtgtcaaaaaactcatggggcctttattttactccgttcggaaacggtcacacacacggtgtttctaccaaaatattggccgggcacaattatacaaggggatggatatctccgaaaagacacccggtctagtaccagaccggtcaggggaaacccccacaggggtgggcttacaagggacgaagggcctccagtgggaaggaacctgtctaaccaatgacattcaagagggcccatcggagaactcaacccggtataacacgtgaacggggcagagggatggctggacaaggggaacaggacaaggaatagacggaggagagtgacacaacacaggc

SEQ ID NO: 537851 - DNA, 259 bp, Homo sapiens
agctgcattctgtagagtcgagtctagagaatcccctgcgtatcatgtcatatcaacgtctagcgactggtagccaggagaatagttagactcggttgtgactagcctgcacgtctgagatgggacgtataattttacatcggtctcgattgcaagacctcgggggttcaagcaagcctcccacctcagcctcctgagtagctgggacaataggcatgagccaccattcctggctaatttttaattttttttctagaga

SEQ ID NO: 537852 - DNA, 103 bp, Homo sapiens
tccacgctggaaccctgctacgtggcgagggggttgagaagaaggtggatgccagggaggaggaaagcatccgaaacagttgccgcatccgaagcagttgccg

SEQ ID NO: 537853 - DNA, 363 bp, Homo sapiens
gaggatccctgtccaaggctgagtgcagtgacgtgatctcggttcactgcagcctccgcctcccgggttcaggcaattctcctgcttcagcctcccaggtggctgggactgcaggcatgtgccaccacgcctggctaattttttgtatttttagtagagacagggtttcaccacgttggccaggctggccaggctggtctcgaacttctgaattcaggtgatccacccatctcagcctcccaaagccctggagttttttgtcgttgttgttattgttttcagacagggtcttgctctgttgctcaggctggagtgcagtggtgcaaacacagctcaacataactcactgcagcctcaaactct

SEQ ID NO: 537854 - DNA, 1339 bp, Homo sapiens
  misc_feature (407)..(407): n is a, c, g, or t
  misc_feature (454)..(454): n is a, c, g, or t
  misc_feature (470)..(470): n is a, c, g, or t
gtaccgcggattgtgtccgcactgttttacaccagtcccctcactgtggctgagtgtgcgggcacagatgataggtcacagcaacctgattcagtccttactgtggctgagtacgtcagggcagatgacaggccaccacaacctgattcagtcctcactgtggctgtgtgtgggggggcagatgacatgccaccacaatttgattcagtcctcactgcggctgagtgtgtgtgggcgcaggtgacaggccaccacaacctgaatcaggattcagttgggctaccagccagtgccataaggaaaaccattctgggactcttgagaggggcaaagaataatttgcatgtgagagaaacgttaatagtttgtggccagaggacaaactgtggtttattaaagactgctgnaggttcctactatgcttctcatcaagaggtggaatctaatcaccttncccccttgaatcatgnctggtctcagtgatgagtacaactggacagtgtggcaggagagatgctctgggacttctgagggatgatcatgagagaccttacagcttctgcctgggcctcttggacacacaccctgggagaagccagacaaacctgactacctgatgctaccagactggaaggaagtccgtgctggccacaaagagagggctgggtgcctgctccgtgtccccagccactagagtccttctgggtgcctgcttcacatccccagccactagagtccttccagatgagaccagggacatcatgaagcaaccaacccacaccgctctgtccagtgtcttgacccagaaaattgtgacatgtaaaaagaataaattcctggtttaagccagtaaggttacgggtacattgttacatctcagataattaaaaccttgaaaaactcatgagagatcacaagtagaaccttgatctgaaacatggcatgtggcgatttatattgagtattaggttaaaaatgcaagaatggagcatagttaatattttacattaaagctaaaaccataattgcctacttaaaattttcagttaattaggttgtcactttttgttcttaaccaagaaatcaactagttttagtccataaacagttagaactgatgcacacatccgtttttccttactcattttaaacagctatctgaaataggaagtgtaatgtaatctttaaagaatctgaaaacatgacagaaatgtttaaactataaacatatattgtatatgttagcatattgtatacattgtatattaacataagctagaatcattgacataaatttatataaacaaaaggtataaaatatgataatgttcttcttgta

SEQ ID NO: 537855 - DNA, 300 bp, Homo sapiens
catttccataaacttccaagcctcctttcttgtgatgatgtaaacatgagaattgctgctggcgaatctttggcacttctgtttgaattggccagaggaatggagagtgactttttttatgaagatatggattctttgacccagatgctccgggctctggctacagatggaaataaacaccgtgccaaagtggacaagagaaagcagcggtctgtcttcagagacgttctgagggctgtggaggaacgggattttccaacagaaactgttaaatttggtcctgagcgcatgtatattgat

SEQ ID NO: 537856 - DNA, 166 bp, Homo sapiens
tgtgagtcatgaagaaggtagcgatgatgtgtgagctgacagttgacgaaagaacctcctatctgttgcatatagaatgtgattggagctagaagagcctcctggagaataatcagcagcattgaacagaacgaagaaaactagggaggagaagactagctagtaa

SEQ ID NO: 537857 - DNA, 278 bp, Homo sapiens
caaatccaaacagtgccttactcttaaaagagatcctggtcccactcaaaaaactcaagatgagctcctcctctgaaaggtctttattacattttctgccacataagggatattcacaggttccaaaaaacatgggggcttaacttttggggggcttcagcccatgacagataccaaaacttaaaacccacccattttaacccccgggtttaaaacccctaatagattcccctttcttaaagcccacagcccccttaataaaccccacccagaaccct

SEQ ID NO: 537858 - DNA, 144 bp, Homo sapiens
gctgggcgagctgcttctgatgctgcgtctgatggcttggctcctgagcctccgctgctgcccatgccccaactccgtcgccctccatgtacaaagaactggttgttagaatcgatgaagccaggcttggtgatcttggttagt

SEQ ID NO: 537859 - DNA, 764 bp, Homo sapiens
tgcccctgtgcgccatggctgtgcagcctcaatggactgagctgctgtgctccatctgcctgagcatctaccagtgaccctggtgagcctgggctgcgagcactacttctgccgccgctgcatcactggagcactgggtgctgtgcaggatgtgctgcatgggctgccctgctgactgcccctgagtgcctggcgcactgttctgcctgagccctgcgctggctgcccagcctcaatgctggccaacatctgtggatgcgctacatgctccttccctgctggactgccatcctcaacgctgctgcctgcgccgctgcgaccctgccaggcgcacgacaaggtcaagctcttctgcctcacggaccgcgcgcttctctgcttcttcttgctgactgagcctgcactgcactgagcagcatcaggtcaccggcatcgacgactgccttcgactgagctgcagagggagctgaaggaccaacttcaggcccttcaagacagcgagctgggaacacaccgaagcgctgcagctgctcaaagctgacaactggcggagaccaagtcttccaccaagagcctgcggaccactatcgggcgaggccttcgagcggatgcaccggctgctgcgtgaacgccagaaggccatgctagaggagctggaggcggacacggccgcaacgctgaccgaatcgagcagaaagtcagcgctacagccagcagtgcgcaggtcatgggggagccagatctgcaagaacggtggtgaacaa

SEQ ID NO: 537860 - DNA, 233 bp, Homo sapiens
ttactggggcgcagtatcgctggctaacatatgtcaatccagcaactttgggaggtcgagacaggcggatcacgaggtcaagcaatcgagcacatcctggccaacatggtgaacactcatctctcattaaaaacacaaaaattagctgagtgtggtggccagtgcctgcagtcccagccacccgggatgctgaggcaggagcaattgcttgaacccaggaggcagaggttgga

SEQ ID NO: 537861 - DNA, 279 bp, Homo sapiens
  misc_feature (37)..(37): n is a, c, g, or t
ctgagctatccgactagccgacaggagacgaggcgtnacactgtcctgcgtaatcgcccagctggaggcggggggacagcctggcagccctgtggcaccctcaggagcaacaacctagcatctcaggagagagaggccacaccactgtccgcgtagtcgcccagctgggggcgggggacagcctggcagccctgtggcaccctcaggagcaacaacctagcatctcaggagagagaggccacaccagctgtggggctagatcggggggggtacctgagc

SEQ ID NO: 537862 - DNA, 264 bp, Homo sapiens
tcatcaatcctcatctttcatgtttttgattatagctatctaataggtataaggtgaggtgatactgtggttttaatttgccttttcctgatgattagtgatgttaaggattttttttcatatacctgtttgacagttgtatgttttcctttgacaaatatctgttgttctgcccatttttaatgaggttgttttctcaatattgggttgtttgagttctctctatattttggatattaacccattatcagtatgatgtaaaaa

SEQ ID NO: 537863 - DNA, 195 bp, Homo sapiens
gggagaattccagatctcagtagactgattacccccaaacttaaaaatacttaacttacccctatacctacagtgaatgtactaccttaaggaacatggtatggtgcatagaaacctggctgcccaaaacgtgctaactcaaagtcacccagtcaggttcagagtggcaaattttggtgatggctaacctgctgc

SEQ ID NO: 537864 - DNA, 426 bp, Homo sapiens
gtatgtaagcgatctttgttctcagcacggacataacgccgtaaggcctggaaaatgccatgaggccgtggcgggtcaaactgcaaggcagccaggtagttctccaaagccatccgacggcggtcatccagcatagcttccactcgggccaggtgggtctccaccagcagctgcttcggatgggtggttccttttttaaaactttaaccatgggttggaagggccgaatcaaaatctgcctctttgctttggggagggtcttaacttgaaactttggcttttcccattccttttttaccctggccattcgggtggggggccgaaattccaactgctccttaaccttttggaaacaagcatgctcattattatctggagagggctcgaaatacacatcaacatcattggttggcaaaagaattggag

SEQ ID NO: 537865 - DNA, 115 bp, Homo sapiens
gtgaaagtttgttatataggtaaactcgtgtcatcagggtttgttgtacagatcatttttgtcacctaggtacccaagtactcaaccaattatttttcccgctcctctgtcttct

SEQ ID NO: 537866 - DNA, 579 bp, Homo sapiens
  misc_feature (365)..(365): n is a, c, g, or t
atattgcaactgtagagatctccatagtagagaacagctgggcacccctagagcctgttcacctggcagagaatctcaaagttgtgtacccacacagcattgcccaggtgcactggagtggaggagacgtgcactaccagctggagagccagcctccaggacccttcgatgtggatacagaggggatgctccatgttaccatggagctggaccgggagcccaggctgagtaccagctccaagtccgagctcagaattcccatggtgaggactacgcagaacccctggagttgcaggtggtggtgatggatgaaaacgacaatgcacctgtctgctccccacatgacccaacacgtcaacatcccntgagctcagccccccatggaacctgaaatagccaggctctcagcagaggattttggatgcccctgggtcacccaattcccacattgtatatcagttgttgagccctgagcctgaggagggggctgaaaacaaagccttcgagttagatccgacctcaggcagtgtaacactgggaactgccccactccatgctggccagagtatcctgcttcag

SEQ ID NO: 537867 - DNA, 142 bp, Homo sapiens
  misc_feature (7)..(7): n is a, c, g, or t
ctggtanatccttgcagtcggatttcacgtggatgatgatttttgtccggttctaactcccgaagcttcggcgatttcaacagactccagaaccatctgaaagccactggtaacccaggctccccgagactgctcgccaaat

SEQ ID NO: 537868 - DNA, 386 bp, Homo sapiens
tcgatgcatctgtgctccccccactacatctaagttctttgcatcttctaattcaaacttcaagaaagaaaatctaattgaagtcactcctccctttcaggaggagtagtatgtattctggggcctttattgagcttattaattggttcccattggtaatagggaatcccattaaattcatctggtgtagaaaacaggccaaaagaatatctatctggttaggggtgaagtggaagctggaggttggcagatacattgacacatgtagaacatgaaactagttaatttttaccaaatgagtgaaattggtctctgttctgtggtcaggaccatttgaaaaatctccatagaggaagaatcaagataaatagagagagccgagaacc

SEQ ID NO: 537869 - DNA, 1194 bp, Homo sapiens
  misc_feature (283)..(283): n is a, c, g, or t
  misc_feature (316)..(317): n is a, c, g, or t
  misc_feature (324)..(324): n is a, c, g, or t
  misc_feature (333)..(333): n is a, c, g, or t
  misc_feature (350)..(351): n is a, c, g, or t
  misc_feature (494)..(494): n is a, c, g, or t
  misc_feature (946)..(946): n is a, c, g, or t
cgtggctaggcgaggacccttcaatccaaggatgtcctgtcgatcaggattcgccttggagcactactaaggcatttctagcccaataccactaggcgccgtcgtgcattctgctgtcacgtgttatatcacgtggtgagcccgtgtgacctacagcactctgggaggaaaggtcagagagtgcgcattcgcgtgacgtgcatgcgtcgctctggcctcgcaacgtttcactagaagtgccatctacctgttggtggctggaaaatgtagaataatgctcganccttggggcgtgccctgacgagaacaagcgtgnnccctccntccgtgcgnaagattccgcgcgcagnntcgccacgtttccttctcctcccctcgcgaagccccacagggagccgattcgggtgggcagcaaacagtgcgaaccttcctgggagtggtgcatgcaaccgagcgcgtgtcctataccattacttcatcatgatgtccgttangttcctcaacatgctgaccctgactgggctcggttccggtgcttgaaccaaaattggccggggtggttttccatcctctttcgggtggggtgttccactgaagatacccctttcactagttttgcgagcgaaacttttcctgtgttcagtaagccttacgtagtggacgagtttggcctacgtgtggggtcacacaaaaatggcgcgtggcggtgttgcccaaattacgtttggagttcggcagttattcacgaccaattcattataaaagcaagggggggccgggacccagggtccctaagctggtttttggcaaacacgcgttttgtggacactcacctttttccccaacttatatatgtccctctctttaacagcttaacacagttttgtgtgttgttgtgtcaacacacaaacagtgttcgtcgcacattttaagggcgcctaagggntggttgatggtgaggcctccatgggcgccgtgtggtgaaaattccccttgggggcaaacctttttgggggggaggggcccaaagggttgggcggaaaaaggcattccgggtttggaaagtagtccccacagcaaggttttcccaagcaaccaaaggtccctgggggggcacacgccactaagatcgaaggaaaccccgtaaattatcggttttttctacccgacgatctggagagtcagaaaaaaata

SEQ ID NO: 537870 - DNA, 105 bp, Homo sapiens
ttgtaatgggcacagaaattaagtaactgactgtaaggacagccaactagtaaagtgggagaacaaagactccaccctggcaccatgggctccagagttctaaag

SEQ ID NO: 537871 - DNA, 151 bp, Homo sapiens
tacaggatgaaaatctggccccattcagtgcattcattcaggactgtcagcagcttatataatgttctgtgggttcagatcaagtaagttgctgttctgggtgagactcactgatttcagataatgccgctacggcattagccaccaccat

SEQ ID NO: 537872 - DNA, 317 bp, Homo sapiens
ccccggggtcgccttacgtgtgtagcctgctgggatctagctctgggaaagagcagccccttgagtgtgacagagctgtgggccgatagctttaggagccacatatccctcctttgatgtccaggatcagttcgagcctggtcccccaggctaagaggagacgaatgaaagaatcttgctgtggtctttcctcgttaaaataacatttcgggggagcacctgggctgaggacctatccatctgctccttggtccgctcgaagcacctacgggcgagctgctgctgtctggcgtcctcactcaccatcagctccccgt

SEQ ID NO: 537873 - DNA, 1659 bp, Homo sapiens
  misc_feature (1659)..(1659): n is a, c, g, or t
ttcctccatgattggcactgaaaatgaccagcagagacgagggcgtgattggatctgtacatctgctagacacaattgaggcaggctgagtgatgggaaggatctaccgaagtctgggatgatttgaccacccaacactgacgcaaccactagtgagaatccgctgatctctatctaataaaatacatgatacattagtctggcaaatccctatgcgtcactataggcgatgtgctcagtaaggtcgcgtggatggatctacttgtacatatcccgcgagtgctgaatagtgttagcaacgtagatactagcagcattctaatgctcaatctttgcaccatatatacaaggataacataccccacaaacgcgcctgagaacgccatgaagctagaagcacaccaagtgtttactgcacaagaaagtgcacacactgcgagacaacagtccctaaatgcacctgaggtgtgtactaacgtctaacaacaggccccttcatgttgagagagaatcgccgagtgagtgtgtgcgaagcccatacattgtcaagtagctaagcagggttggctgccaccacaggcacgcaacgaggttccccatgggtgccgaataaaaacgtcgtttccgccgtcggattctactacagctaggtgacacgatgtcactaattattttaccagaagagttacctcggccaccactatccattattagtcaagacaacgactcttacatccccaaaatttagaccaccccgatggacaagggattctcccaagtggcggcctatataacgaccccacaaaattgtgttacaaccattagaggagacttatcggaaaccagcctaccaacattcgactatacacagtggtggggtaaagactcacttccccaataggaaccggctttgcccttattagacccacttatgcactacactataaccttgacataatcattcttaccaacgcagacacctatattggggactacaacagcgtattcgataccgcacacttcacagagatagttacggcccacaattatctcaacaacacagtatttaccccacctgacatgaagaacaaaaggagatacagtacccataaccgtgacaacggccggtctgtgactacgcagcgagcgacgataaacggtatcggcacgatgcgggcacccaaaatatttttgctcaccggacttgccgtacgccagttcttgcttcgcctagtggctgatgaaaagcaaactttctaccgttgtacacacggtggcacacgcacaacgtggcactccggagaggcacacaactacagccgccctcgagtggacgagagcgaggaggggctccaccagtaggagagagccctctacagccgaccctagcaaggggcgaaaccacaccatgagcggagacccccccacagagttgcagggtaggggatacaacacacccatacgtgagcatgcacgacaaaaagttgccaccgcgcagctcacaatatgaagacagggggacccacaccaaaccagaggacagcggagaaggaaccacagagacgacaaggaacaaacacaccgagctacaacaggacgtgagcaggagaggcagacagacgagacatcgaacgcagcggacgacacactaacagccgn

SEQ ID NO: 537874 - DNA, 102 bp, Homo sapiens
  misc_feature (62)..(62): n is a, c, g, or t
ttttttagggggggggggcaggggttttttttttttaacaaaaaaaaggccttttagttaanctaaaattaaaaaaaaaggccctttccccttggggcccta

SEQ ID NO: 537875 - DNA, 636 bp, Homo sapiens
agcggagtccacttccggtactatgcagcggtgacaatgggagcagcgctggtgcggcgccgggaggcagctgacaagctgtttgcggcttcgcttcatggccgctctccctgccccatcctgggatctgtggtgagagactggaggagcccagacagacggccacggagaccagtgagctggacgagcctgagacggacgaaccgtgatgacgaccgactgccatcctgcacgtgccgcacgacactgatgaaaaggctgggacagactgtgtcattcccagatgggtgtgtgagctgaagaccaatctcaagacaccgaggaccaccggagagcacattggggcttaagacacagccgtgaccgccggcaaacccatccatgatgcgacaacggcaaggccgacagattactcaggcgtggggaccacgaacttggacacaatcaaataactgtcggacaccaccggtgaccgatcaggcgtgcaacttgaggcaaagcacaaacacccccgccgaggacggcacagcggacacagcggcccgtccccgatacgcgcacggagcgatgacgcaaaccacaatgggaaacaacaggccccgtcctcgccaggcaacataccaccaatccaaacac

SEQ ID NO: 537876 - DNA, 443 bp, Homo sapiens
  misc_feature (177)..(177): n is a, c, g, or t
actgtggctccttctcagatgtagaaagtccgtgatggggaacactcattacacagtggtgtggacagatgaactttgagtgaagtcacgtggaggatttgtcctccgtgtgtcgtccgtgatacatacaagtggttttcttgtttgtccttttgtgagacaagattcagtgctagnctaatgggctacaaacggaccaggacgaaacgatgcaccaataggcaccagacagcccaattggagttgacggagatgatggattcagtcatccaccccttgtgaacctgctctccaggccttgagacgttgtccagtggagaggaactggcactacatgtgccgtcttgaagaaactgggacccagaaggccagggctttagccctggacccatatatggcagtgagtctgttgtcaggctcaggctaggatcctcacatagtca

SEQ ID NO: 537877 - DNA, 845 bp, Homo sapiens
  misc_feature (398)..(398): n is a, c, g, or t
ccccggtctccccctcttttttaccccccatattggggcgctccgctggtccccatgggtctttgggatttgttcctccgcccttgtgattatttcgggccgcgcgatccttctttccacgttgccgctccgggggtttttaacccgcggcgagctggttattataccccgcgcgacgcttttgcccgcgcccgctttatgttgcacacgcggaggacctcgtgggttttataagggagagaagagtgatttctacacgggcgctctcctattgttgtttgcgccgaggcgccccaccagagcctggggagaaaataatatgtttgttggtgagacccaccatttggtggggtggttttggggtggggcgcctttagagaacaaccacgggtgtggtncaaacacgcggttgccttgtttatataggcgagaatatttgtgaatttaataagatgtaataccctccgtgtgtccctacccattcgtgttataacatcctaacccccacagatgtggcctgtattagaagtgaaagatgagagatctttgttccaatctgggaaccacccccgttacaccccctcttttgttctgtgtcttcgttttcttttttttttttgtacacttacaccactattttatggatggatttagatggaagagtgttctttctgctccacacttaatgtttgggttcccgatcccttccaacctggttctatattttctttttacatttccaaactaaccctttttcacaaatggggtgggggggggaaaacccatttaaccccgtcccccaaaataaattttgggttaaaaaaaaaaaatattccctttgttta

SEQ ID NO: 537878 - DNA, 272 bp, Homo sapiens
ccaatgtgaagatcgggggtcaagtcacagtgctgaattactttttaaaagaaaaactatcaaaaatagcttttaaaaacacatcctcaattacattcagaaaactaggatacctgctacattcattctttcagcagaaggcactatgcacaatgcgagaaaaacagactttaaacgagcttagactaatccgtctgacattaacaggcattctatactaccttctgacacacagcaaaacgcctgggagattgtactaggcaaggagacca

SEQ ID NO: 537879 - DNA, 253 bp, Homo sapiens
  misc_feature (96)..(96): n is a, c, g, or t
aagcccttgttgggaactgagaagtgtatatggggccaagctactggtgcagaacacagagacagcagcccagtgcaatcgtgtcgagcattgganagcgccatgtgtggacataggaggaggaatattccatcttgggagaaaccacagcatgggttttttcctactggtgtgtctgggggaatgacggcacagatctgttggacttggtaataaaaatagggttccccaacttccccaatttctgtgtcct

SEQ ID NO: 537880 - DNA, 325 bp, Homo sapiens
gcgagggccaggctggtgttcagtgtcacaatcacaggtgacggcaaccttgacctcctggactcaagcaagggggggtgagcccccagagagtgagtgggactacaggttcacgccaccatgcctggctaatttttgtatttttaatagagatggagtttcaccatgttggccatggctggtctcaaactcctgatctcaagtgatctgcccaccttggcctcccaaagtgctagggttacaggtgtgagccaccacacccagcccagatttttgtttcttttctttttccttttttttttttgacacagccactccctttgtt

SEQ ID NO: 537881 - DNA, 149 bp, Homo sapiens
tggaacagaaaaaaaatcaacagattaacaggttatttaatgtaatttgtagtggctacacattaataaaaataaattagtataaaggaattacacatgaaaggatgaatatcaaagatgggttggtcatggaaaggggtaccgagctc

SEQ ID NO: 537882 - DNA, 1272 bp, Homo sapiens
gagctctggtcggcttctctatgctgcatcagaggtatgattcttcctctttccaccattgagcgacatgtctgggtgggggtatactgcgagggctaggttggagcccaagccattccagatgcccaaccatcgaggattcgtgcgagcccctaatctgccttccggaaagcgtggatcgccgaggctgcgtcgggaccaagtaggtcgcggactatggtgtcgcagcggcacacgcaggttgcgtgtcaccttggtggtgattcccgaaaggctcaagcgagacattttacgcttcggggccgccgacgcatgcatggtacgacatgcacgccaaggcgcaaggcgcgcttcttggccttaggcatcggccttcgcaagaaggtccacaagagacgacgcccggaggggaaactaatggttcaaatagtttggaaagttgttagagcgaggttgactcaaagtctggtggcttacggtattgttctttgagccccaaggttgtgccttatactccacaagcgtgcacgctttcttgtccacgagtagtctcaattcccaaagcttcgaaagccatggattccccaatggcacgacgggaacggaagacctgtggccacctgaacgggaccgttacgattgaaagaactgggaacgcctagagggagacccgagggccctggagaagggcgaccaagaccctttggccacaggggaacggaaagccaacctagggcggttcggacggaataggtgacaatggagcctcggagtcgcccgtggacacccgtacaccctggtgtgtagaccttggcttgaagcccaattctcagcgaaaggggctgctttacgaccccccgggggcggccacaaggttgagcacacaaatggcgactgcgcacggagcgtcgcttggaacttaagcgattaggaactcccaatttgggcgacagcattggacacggtgtaagctacccgcccctggttgtcaaagaaaggggccttaagccggtgtgggggaaaccaaccgctgttccggactccgaaggtattatggacaccccctgtgaggattaaatatggctcgtaacttggcctgtggaacaattggctggacatacgaagggggccaattttgggcctataggccacaggaacggagcaactgggcttagaacagccccttttggatcccaagaggggtgaaccaaagcgcgatataggggacctttgtctttgagacccattcacacttaccatagatccgctttc

SEQ ID NO: 537883 - DNA, 396 bp, Homo sapiens
actctcatctgaagagatatatgaatcgactctgcctctggcacctacactctctactcagtcatagaacatgccacttagacgaacccaatcctctgaaatgtgattgatgtggacatcacgtaccctgcaggaatatgctccctcgagtgtcttgtccccagcagcttaacactccaacatacaggaaattcagccacctgtcccgcgagcttgagaagaggccccccaccgtggtgtccaatacattcaaagaccctgatcctctcgcggattgctatctgcatctacgatctgtgaatccggattggtgccaatgtctccaaattcagttttgctcctaggacgattatatctcacctggaacatgctgctaatgctggaactcatgtatgc

SEQ ID NO: 537884 - DNA, 122 bp, Homo sapiens
ataggcgacatttcaatttagaggggattgtggaaaaccttttttttttttgggaaagggattttgggctctgtgtgcgccagggttggagtgggcaataatggcgaattctcgcttcattg

SEQ ID NO: 537885 - DNA, 597 bp, Homo sapiens
ggctcacacctgtattggcagcattttgggaggccgaggcaggtggattacctgaggtcaggagtttgagaccagcctgactaacatggtaaaaccctgtctctactaaaaatacaaaaattagccaggcgtggtggcacatgcctgtaatcccagctacttgggaggctgaggcaggagactcgtttgaacccaggaggcggaggttgcagtgacctgagatcgcaccactgcactccagcctggggaacagcagcgaaactctgtctccaaaaaaaacaaaaaacaaaatttctttcccctctttgaattatattattttaaatgtcactggccacggtggctcacgcctgtaatcccagcactttggcagcccaaggaggccgcgccacctgagcgcaggagttcgagaccagcctggccaacgtgctgaaaccccatctctactacacatccactaagcttgcctgtgctgctgcatgcctggaaccccagtacttggcagcctgcgcaggttgctgcaccccgaggcagaggttcgaatgagcccagttcgcgcaattggcatccaccttgcccaacccgcgctcgctccct

SEQ ID NO: 537886 - DNA, 300 bp, Homo sapiens
agcggagtccttcatctacgagagctgaaaaatgtgtccggatcctgctcaaaaccgaagaaagttttatttaatctagaatctttcatccatagtatttgagaaaagtgatctcaaattacacaaggatgacctgacaagtccaaggcagtggaaactactatagaacctttttactttataaaggcttccgttgcatgcgaaaaacacctgcacaaatattctggctttgacgtttaactgattaccacattaacctcaacacaggcaatcatgttgcaggtgtgccttccggcggga

SEQ ID NO: 537887 - DNA, 158 bp, Homo sapiens
gccgatctagaggatcccactgaacagcataaaaatgtatctatttctgaagaactaacttgctaatcgcggatattttccttgatatttggttacattgctactggttattttcaacaagttactattcttacatcacccacagatacagggggtac

SEQ ID NO: 537888 - DNA, 159 bp, Homo sapiens
gatcatactgattcgcaaaccttggagcattccctctgaactctagcacatgacatgattagcctctctctccactgtctcttcaaccatactttttgggaagttcttggccaaggcaactccaaggcaaagagaaaaaaaaaaaggatttcagttaga

SEQ ID NO: 537889 - DNA, 88 bp, Homo sapiens
  misc_feature (20)..(20): n is a, c, g, or t
tgaagacctacgaggctgcncaaggctgggccctaccaggaggctcgcaggcagctgtctctcctcctggaccagcagggcctggggg

SEQ ID NO: 537890 - DNA, 395 bp, Homo sapiens
ctggagagttgactttggtgcaagcacttgttggtcgcttcaacatccatcctctcatttcatccacacatcagtcttataaagttggcattatcttatgcttattttaggaatgaagaaaggggggtgggtacccaacgataagtagctttccctaaatcgtttcgtgaataagcaacagagcctggattcaagcttgggctgtctggcccagagcctaccctgagcacgtgccatgttttgcatctcagacagagagacagagggcgcccatcatagctgcccaccatccaacccagctcatacacactcggcatgttcatgtacttccttccatacttataaacccacattctccccgtaataaaatcccaagttttaaataaaaaaaaaaa

SEQ ID NO: 537891 - DNA, 500 bp, Homo sapiens
ccggcgctccatctggccttccgcaaaggggatgtggtcctggcgcagctcctgatttggtacggggtggacgtcatggccccagatgcccccgggaacccagcgctgacctacggccggcaggcctccagccaggagtgcatcaacgtgctttttcaggacggctgcccccacgagtgtgtgtagtatttgttttatttggctgccgtctccctggggccaaaaccaaatggggaaaattaggataactccggatttccaaagggaatccccaattccgctaatattagccttttccggaccttttgttaactaagtgaatacccaaaaaggtggttttttttggccctaagacggattttatgtccctttgcccaggggggtttgttagtttccgggcctcctgggccccttgccccagtccccccgggttttgttttttgttttttgattaaatgtgtggaaacattttttaaataaagttcattaatatgccttta

SEQ ID NO: 537892 - DNA, 344 bp, Homo sapiens
  misc_feature (219)..(219): n is a, c, g, or t
ctgtgggtccattaacctttttttccttataaattacccagtctcaagtatgtcttcattagcagtataaggacagactaatacgcagtctcctctgaataagtgtgttaatgaagatatgacaataaaacctgcctcagcctcccgagtagctgggattgcaggcacatgcctcaattcaagcctcccgagtagctgggattgcaggcatgtgcccanggcaaggttggttttgttttgttttttttttttttaattttgcgacggagtttcgctctgtcgcccaggctggagtgtagtggcgagatcttgggtcactggatgctcagcctcctgggttcaca

SEQ ID NO: 537893 - DNA, 531 bp, Homo sapiens
cattgacattttcactatgccctgaacctgagagcatctggcaggtaggggggtaggtcctcacacacccactggctcacccatcagtgcacacgcgtgcgcatacacacattttgttttgacgccctgttatcactggcctgaggaggcgcacactggcaagaggattgcagctagccttagtgactcacttgtgtgcaccagccatgaagagcccacgcctgtactccccatcactctgctgtccctgagaactgtagatcatgcgcttgtgagcgaagccgttccctctgcaccagctgattgcatagcgaatatcctatcctggaggtacgcatggagaacgtgacagtgctgggtgaggacgtcatagttaatgatgagctctacctcaacggagccagcgtgctgtcccacatgtatattgatgagacagtgccagagcctcgtatcatcatgtgaggggatgcaaagaggcttgccgagccccagtttttccatcaggtgagtgctggactgacacatcaggcc

SEQ ID NO: 537894 - DNA, 1199 bp, Homo sapiens
gggctgtggccggtgccagccatcactgcctgttgccgggatgccgcgtggtgtacatcgcgccgcctgagctaccagtccccggtgagcgctgatgtggacgcgcttctttaatgggctactggtgaagatcctggagtgtggatctgaagacacggatatggtttctgtggacgctttgactgactctgcgtgatgcagatgatgctgttctatgaactgaactggcaaagaccttatgctgcgtgacgcgacgtaacttgttgagcattggcccgcggccccacgtgcgagcatgcccagcttacaggattctgcgacgcacgctggactactggcttcatacgaagaaccgtggccgagcactaaatactggaccctccctaactccgcgcaccacgcacgctacaagcaccatctactctgcctcgcgaccgcaactctcaggtcacacggttcccggcttgccaagagcacttagcgccaaccaacccctacacacggacttactaattgccggttccaagccccacgccgcacgcacacggcttgaaacctcatacctgccacacgaacttgccccttccacgcaaaccggcgaaccctgccaccacacacacttgccaacagccgcgcgcctgcacctcccgcacaggttaccccggtaaacttcttctaattctccctggcaacttaccttggaccacatacgaacggcctttggggggaaacacacaccgcacttccggggccacttggcgccacacctcttgcgaacaccgcgtccaaccactggcgcccaacgccacaccaccgacgaccctccccgcaacatccaacgccctcttgacaccagcaacgcaaaaggccacccaggcggttaaacccccagggtaacgcgacaccaggcccccggcgcgatcccccttaaccgttcccgcaccgtcacacagcgcccccggtggacaggcatcccccacctcgtcccgacaggggggcatccagtcccgacgcatcacggtcgcgacaaccgcaccgagtgcaaacagcttttacccccccgggccaaacgcgcaacgcccctgcacaacacggccccgccgacacccgcccctggagcccagccccgcacgcgccacacacacaacgccgcactaggcagcccaagatcacccatccacagccacaaggactaccaa

SEQ ID NO: 537895 - DNA, 161 bp, Homo sapiens
atagcgcatgtgtctctcttatgaagtgtctgtcaatcctgtagccacattctaatgagattatttttttcttgtaaaatttgttgaagtcccttatcagtatggacattagatctttgtcacatgctttgttgcagaaattttctcccattctgtagggg

SEQ ID NO: 537896 - DNA, 337 bp, Homo sapiens
tggggaggggggcagccacgcagactccgggagccctttgccgcagcggggctgcgcgccctaccccagctaggccccttccccgcagaggatgtgcctctgttgtcctcgcgggaccaccggaccccgctgctctatgccggcttctccacgtccagcatctatcagggctctgcggtgtgcgtgtacagcatgaacgacgtgcgcctggccttcttgagaccctttgcacacaatgaggggcccatgcaccagtgggtgtcataccaggggcgcgtgccctacccgccaccaggcatggttcggagcccacgcactcctgctacaacccacttca

SEQ ID NO: 537897 - DNA, 555 bp, Homo sapiens
tacttccacaggcaagtgtgattatttaaaaatatgcagaacttatttcatctgtgctttagtaaataactgtatacagtgttctaagttgaaaagaactcgaaaataagctaataccaaactatacacctgatgtattagcaattcaaagaaagctgctttctgtgacagtcaatcagcatatattcaaaaaatgacacacaatccaaaacaagatgcatgttcatatataacagggacattgtcaagtttccttgctagcattcaaaccccatgcgtttaatcccatgcaaatttcccttttcaattcatcatttcagacagcaagcatgccaaatagtctccaggatctacttaagcaacctttcccaaatccactagttacactccccttttcaggaactaagcaggtattcgggtagctgcttcctcctctgcatcagctcggtttgcattaatttctgcaagtgttcggacaaaccgtgcccattcatcatagcggggaacagcaatctgctctcccacatcgtatataacactctgtcctacacactc

SEQ ID NO: 537898 - DNA, 904 bp, Homo sapiens
gctgcaatgcctccggagcgcacgtcggcagtcggtcctcgttgacgaatcaccgactctctccccagctgtattttcaaaatgtcgctttctaacaagctgaagctggagcaaactggacgtgtaagggaagcggggcggctgagagtcgacttccatggtcctcattaagaacaaaccggattataaacaaccgcaggaattaggtgctgtgcccacgcatctaattcttgcttggacgatgggggccactcgggtggcttattaagcaacctaaggcgggctgatggttggttcccctgtctgtacaaatattcttatagagcccttggtgttgaactccactctccttcttggggcaagaatgttgcttggttgccttgagaagacagtgtattgggcccccaaagtgtgggaaaagagctcgtgtgccaaaccccacatgtgtgggggctctgtgtactatctctgtgtgggttaaaccttcgcgttttccttggtggtcaggggacgacacagggcaggggagacacgactgcttctggtgaaccaccagtgatatgaccgagagccgacaacatataaaagagatatccgacgcacaccttattccaacacccaacgagggagggaccaatctgccacaaagaaaagggaagcacgtgctcacaggcctcgcaaaagaagccacccacagtgtcacgccgctgggcacggcacacactggcgcgaccaaaggcgcgggggcggggagcacgtaagaacagggagtgaacaacaaggtcaacgaagctgcgaatgccaccagagaaccatcccgggcgaccacggcgagagcaaaaacgaggacagaaccagcatcaaagaatgcgaggaaaccagtgcagccaaggggggcacgaaa

SEQ ID NO: 537899 - DNA, 928 bp, Homo sapiens
gtcggttactgcaagctccgcctcccaggttcacaccattctcctgcctcagcctcccgagtagctgggactacaggtgcccaccaccacgcctggtagtgtgtataagtagagacgcagtttcaccgtgtaagccaggatggtctcgatctcctgacctcgtgatcccgcccgccttcggcctcccaaagtgctgggattacaggcatgatgccaccgtgcccggcctacattcacttctaaagtctatgtaattggtggtcattttttcccttttagactacataaatggttgattgggcgaggaaaacttattctggaatattaccggtggtgacaaaggggccaagtttttttacccttaaacgtgcaaacagttgaaaccattaccaaaaataaggactaatttcttaaagagtaactcagtaattccaacacataacacgatttggatctacgcagcattaagtggttgtgagtgtctagccaacaggacaaacctgtgcttgaactcccccatgaaggtcctggtgtatatgtttacaaatactctcattatagtccacacttaaattaaggcctttatattaggccctctaatttcaggaaatacattcttactatccatatttacctgatttatcatcagattcgaactccgtgcatgaattatgttcacttcacacccttttacactgtgccgctggctcatgcacgttggcggtcctgctccaacactggggcggttctgtcagtaccgttaggtgggcctctcaacagagggtcctcgaaagggggcttttctcctttaaaccatggacgagttaagcggccttgacagaatgttcacctaacaggcgatgttgtcacaccgaacacggagagttcgacaggcgctaacagggccattctttccaacacggcgcga

SEQ ID NO: 537900 - DNA, 286 bp, Homo sapiens
agacctggatgtggccattcttgtgggctccatgccacgaagggaaggcatggtgagaaaagatttactgagagcaaatgtgaaaatcttcacattccatggtgcatccttatataaatacgccaagaagtcagttttggttattgttgtgggttatacagccaataccaactgcctgactgctttcaagtcagctccatccatccccagggagaacttcagtcgcttgactcgattggatcacaaccgagcttaagctaaaattgcttttactcttggtgtgact

SEQ ID NO: 537901 - DNA, 770 bp, Homo sapiens
gctgggcgtgagtgcaggaagtggaggtgtttgctggcgccggtgtaccatggagcgtgggcgaacttcatgagctaccagcctcaataggggcacagaatctgtccccgaggtatgatgaatgaggaggagcagaagatgcgtcggagacaaagtggtacgtcgagaacgcggcctgctatcggtgaatgaagaaatgattgtggtggaggaagcggatgatgagaaatgaaaggctggtgcagattattgacagatgatgggggaagaggaagacggaagaggaaggaagccatgggactgaaagctcagattgacagataactgaatcgatcatcattctgaaagagagattcattattatacaatagccaagaaaattgcgggagttagggtttgcacattaagcaggttcaacaatagaggggtccgtttgcgagattccgagacgctggagcctatacaatgagaacttcattcccagagaaagaagtgccatcgtgtgggtgaccacgactcagtgcccgaggacccgtgatacgcgacgcgttcggtgggtgcgaggcgtgagagtgcctggtagcaaggttctgcgtgtctccgcgggtttgcactccggggaccccccaataaattacccgggcatgatggtcccaatcaggcctagggagctctgagttctggctgtcacgcggaaatttaaaccgaagatttcattagacgactcacttccaatggaaacacgtggaaagagggggatgcacgcacat

SEQ ID NO: 537902 - DNA, 101 bp, Homo sapiens
aaccgtagggcaggtgatagagcgccgttaggaccgaaagatgtgactatcctggcaggcgaagaagagaaactctggtggaggtctgtagcgtggtgttg

SEQ ID NO: 537903 - DNA, 439 bp, Homo sapiens
  misc_feature (54)..(54): n is a, c, g, or t
  misc_feature (57)..(57): n is a, c, g, or t
  misc_feature (60)..(60): n is a, c, g, or t
  misc_feature (374)..(374): n is a, c, g, or t
tctgcccttccctttctccctcttgctccacttgctcctggctccgcagttctnttnttnatttgagtctcattacagctggttgtatgccaccatgtggttgatgggatttgaactcatgacctccggaagagcagtcggtgctcttaactgctgagccatttcaccagccccctgaatatattctcatacaaaaaaaagggggaataataaacctatataggcttaaaaataaatttgatcttgacaatcaagacaatatgattagaggtgaataaacagaacataattacccagaggagaaaaagtattcattctgactaccttgcagtttcctgggcgaagagcatttaaggaatgtgtccggatggaangagctcagataggtccagtgtatcagcgagaagaacttgctttacagctttctctacccaattct

SEQ ID NO: 537904 - DNA, 368 bp, Homo sapiens
aaaatagagaagtgttgttggaataaaatttttattcagattttatttcataatattatatatattcattttaaacatgtttctaagacaggtctcccaacttttgtatgtatttatgagtgtggaaacacgtgttaaatgtgagactttttttttttattgttaaacagagggagttaccttacaaggacatcgacatggatcttaaaattctgttccagaattcagaatgttaagtgtaggtatttactgatcattgttgattttttttttctagtaagattattgttagacagttttggtaaatagggtgatttttaaattttccacacttgggctagattctataataaagttttcaagaaagt

SEQ ID NO: 537905 - DNA, 1023 bp, Homo sapiens
ttctggctaggacgcaggtcgagtcaccagagctccagacgatgtctgtctccttcctcatcttcctgcccgtgctgggcctcccatgcgtggtgtcctggtcaatagcgtacagctgctgcagttcaggtccaggacatggctgaagtccctcgcacgaccctctcacgtcagcctgtgccagtctccgtgggactaactgtctcttaacaacaaattgcttgcttagtgaactgtgatctagggcaagtcccgcatcaggcaagaggcgcttggagtaggctaggtgaaggacgatgactggaccaggtccaaaggtgggtgatcaatggattgggatagcagtgatctagctgaaacagtctgaagtaaccagtcagaccgcaggacaacttatcctaaagaaccgagtatctactcctgcgagcttagatactcctgtagaccgtacgccagacggtaacacctgggcctagtgttaccttgaactggtgaccaaggatggaacccacgtatagcctgggaagcctctattgacttgactgtggcgctcagcgcacacccgtgagttgcaccagtactacctcgaggggaggtgcgataccgcacccgaagcccgtgtattcccccgctctgatctccttgttgtagaagttctccgcgatcgagcatagcgacgctagcgttggcaccgattgcgcgtttcgtcgcgacagtgtactatccattgcccgaactaccaatcgacgttgtctaccggtggaatagtacacatgaagcaacctctagacaatacagataggaagcccgaggagcttccgcaatcaggtcgctgcagcagagggcgcaccgatgacgacagtcacgctacagcagagtggctagcttcgcgcttcccaatggcaccgtacagtgcaggggccaccagaaacgaaaccactgtgcgtggtggcaaaggtccgagcacccacagacggacaacagagacaagaaacgtgccgttcttcaagtgaatatgccggc

SEQ ID NO: 537906 - DNA, 297 bp, Homo sapiens
gtgcctcctaacaaagccgctaagatgaagaatgggcaaaatcgccccaacgaacaggcagcctcgggagcccgttacctggctcgcgaacagaagggagagttgccaatatggatgtgacagcggttcccattaacggtcacagatactctcaagttaaaaccttaaaagttttctcaaaccaatgtcccctccataactcggccttccaaagaaaacatccttcaaataaaatcaaacaaatattaaaggaatgggatcattattgcattctttcagcccaaataaaccaggaat

SEQ ID NO: 537907 - DNA, 884 bp, Homo sapiens
gggcctacggcacggcgtcaggctctgcagcgtgttcctgcctggtgtgtgggtgagggaaagctaagtccgctaggaaatcgccttatgtcacctcgcactcttatcctcaatgaaagaagtctgaagatcgagtgtcctactaaggtgatttaacctgcatggattgggagatactggagcacggtatggggcagaagccttttgccaggtactcagaagttcacatatcaaatatatctgcccgcatgcgcctgttaggcctgtgtacattaaatatgaagcgtggctatgccttcatggcttcgctatttatcgggctttcaccacattcacaggaggatgaatctgggattaaaccaggcagcagaaaatatggacagctttgattgagtcaccgacgtgaagaagtggccctgccttctaaacagacttactttgggaggctctcctcatggggaggagcctttagtcttcatatactgcccttaccaacacagacagaaactggcaggtgtcactgcacctcacggctggtggcttccacttcggggcttcctttccacagggtcctctcggggttgcgaaccagacgatattgcatctcagtgccacggggatgggaacccttggtaccctgaggttggtccctacggggaaaccaagaccatggtgatcaggcaaggcgcctgttaactggaagttgatgcaaggcgggtccaggaaagggggacgccaggagcctgaaaatgcgacccatgagggaccgaaggcgggtaagcacagaagggtacaaggaacccacgcgccgggaaacagggggaaaagtagaaaacacaaaccaagcccccaaaaaacacgccgacagaagagacaaacaggtc

SEQ ID NO: 537908 - DNA, 400 bp, Homo sapiens
gactccccggcacgatctttgctcactgcatgctctgcctcccgggtttcatgccccttctcctgcctccgcctccctgagctcgccttagtgctatctcggtgcccgccacctagcccggtctatattttttgtatttctagtagagacggggttccaccgcgcttagcccggatggtctcgatctcctgacctcgtgatccgcccgcctcagcctccccgaagtgcctgggacttacccggcatgagccctcggtgcctggccttttatctggaatttaaaaaattagccggtctattttttgcccgccttaagctcttaaggggattgttgcccgcttgcaccatagtgactctgccttcgtgtgtatgtcatgagctctgcaaggattcgtgccgg

SEQ ID NO: 537909 - DNA, 321 bp, Homo sapiens
ggctgtgttagcacaacctagggtcagttttgcaggtggtagccatttaccaagatagttgtaggtaaagaagggcagatttattagagaaattgtgaaaatatgttgcagtgggcagctcagcagagaaggggctacctgcaaagaggcaagggctggaggaaagttttatagggtcctgctgaagggtgctacgtgtggaatgaggtcattgtgcccgcaggttgtttgtgattagctggctctaacaattgttcatacaataattgttcattattgttctcaacttggggctctccccaacctggggacccttcctta

SEQ ID NO: 537910 - DNA, 947 bp, Homo sapiens
  misc_feature (947)..(947): n is a, c, g, or t
tgtatagggtagaggcgacaaatctaccgcgcctggtgatagctgtgttgtccaatgatagaatcttagttcacgtttaaattggcccacagaaccccgtctaaatccccttgtaaagttgaactgtgtagatccaacagaggatcagctcttttggagcgactaggaaataacctggtagtaagagagtgaacaaagatttagcaagccataggtaggcctgaaaagcaggcagcaagttaagaaagcgttcaagctcgaatgacccactgagcataaaaaatccgcaaaatatataacatgaagtccgtcgacacccaaattggtaccgaagtcgtatcagcctatagaagaagtaccattgtcgagtataagtaacatgaagagattgctcgctccggatagagcctggcgtcaggattaagaaggcactggaacgtgagcaattgtaaccaagcctcaattgatctacaaatcaaccaaccaagtcaattattaccctcactgtccaatccagctagaagggcatgctcataacgggaaaggttgcaaacagtacagcggactcgggaatcttacccccgggtgttaccaggaaagatcacgttctagcatcaccagtattagaggcacgtcgtggccagtgacaccatgtttcactggcgggtacctaaacgggccaggatgcataagcactgttccttaagtgggactggatgatggccccgaggttccgtgctcttacttgagccgtgaattgccgccggaaagcggtacaagagagggaacctatggcttatttaggggacaggccacaaaagcgggctaagcacaggggaacgggggggcgggaaccacccggggggtaaaacgagggagaaaggaagaggggccgcagagcaatacaaaaagagagggcaagaaagaaatagcacagcgcgacaccn

SEQ ID NO: 537911 - DNA, 1060 bp, Homo sapiens
  misc_feature (1)..(1): n is a, c, g, or t
naaatagttagatacatagcaacttatgtggtttcggtctcacccgttctcgttgcctggtctcttattcctgcatggtccacgtctttgtacacaactttcaaccgtgtctcttattcgtgccgggtcattttaagcctaggctccagtggtatagaacatagttgcctatgggctcactcacagcatatggcattaagcagactatgcaggttcttgtccaccagctttggatggattttcctctcggaccttatgactgcctctagcctttccaggtgaagtactcaatgagcaactccatgtgcatacaggcgatagaacccccagcctttaagggaataaccaatgcacccattccaaagggcatgaagaggaaccacctcagatatgaaccactatcaggaaacgataagccagtcatcataaacagctcttaggaaatcaaaggaagcaagaagctaagaaagtctgcaaagcaggaagcaagaagtgacatagagtccagattaggcacctgactcctgccccacagagcacaccacgaaacaacgtgtctctcagtcaatttctggggaccctgagatagacgaagataatctagaacctataagtaagaaactgagaagcaatcgaactactgaaagaacaagcagcaactggaaaacagctagtattaataatcagttggagataaattcagaaagaaacagcccttctccaggagctggaagatttggaattgggtatttaaagattcacggggaagcaagttgatgatccagaaatcaggcaaacacatcttgctgttaaacccattggtatacagcagaatattcctggcccacacttaatgtcaatctataattttaaccatttatcctagattctagtaagtgtaaaattatttaataatgtctattaaacttgatatttatatcttgcatcctatatcatgtcaatatgtgatatagaaaagagatacgtgaattttttagctaagctgacagattgtaacacagtgtcattcttttgagaggtaactcttacatgtaactat

SEQ ID NO: 537912 - DNA, 176 bp, Homo sapiens
gcggacagctttctaaagtagtgagtaggatgtactcgtttcaggtcatcatctcagtgaatgtttcaataaagatgaagaaatgtgtgtgatctttaataacacatccctatagaaagtggataaaagatataccaaacctgtaatacagatatatacaaatataggggcctttt

SEQ ID NO: 537913 - DNA, 416 bp, Homo sapiens
  misc_feature (416)..(416): n is a, c, g, or t
cagaaatcaaattggcgagagcagttgaagaagtgacgttattggtacctgcggcagagcgagatgacagcctgacgaagatgcagctgatggagctagcgattctgaatggcacctacagagatgccagcattagatcaccataccttgccttatctgttgcagcaacagtccaggctgctccaaggatcattactgggcctgcgccggttctcccaccagctgccctgcgtactcctacgccagctggccctaccataatgcctttgatcagacacatacagaccgcttgcatgctcaacggaactcctgacccaactgctgcaatagttcctccagggcccgaagctggatcgctatacgccctatgagtacccctacacagtggcaccacctacatcgatacttgagttccn

SEQ ID NO: 537914 - DNA, 468 bp, Homo sapiens
ttccccaggcagcatgtgaggctggggtggcactcgacacaggacagcaggcaaggacatgcccccctccaggctgagggtcttgggagcctcccctcccagcccctgctgtggcctccccctgggccctggcatgggaggagttaagctgccgcgggcaccttggcacattgcgctgcccagagtgtccggctccccacccccactgcttttcttcctttttgcctttttccttcttaattaatcatacgctgctgcccaatttaaatatggaaatgcccaggccgaggcgatgcaattattcatgagggccgggcggctgtccggggctctcgggctgtggggagtaccgtggcatcgcctccgttctgatgtgtgtgaaattatgtgcacaaaaggcgcctccttatctgggagtgtgaactaaataaataaataagggcttttgtttgtttgccggctcctgca

SEQ ID NO: 537915 - DNA, 155 bp, Homo sapiens
  misc_feature (2)..(2): n is a, c, g, or t
  misc_feature (152)..(152): n is a, c, g, or t
cnaggcgactcagaggatccccgccgccgtgtttgtcactccgacctgctcactatgatgccggatggaacctttgggattgacccccaccaacaacctgaaccgctttgtgtcaggctgctaccctgctgtgagtgggggtacccgagccntca

SEQ ID NO: 537916 - DNA, 378 bp, Homo sapiens
cacgaggggacctggaaaatgggccggcatgtcgccttgagctcttcggagagggtgccgtaggtggcctcggaagtgagaatctgctccgggcttgccatatcgctcaggtaggcggccaggttcacggtatcgccaaagatgtcccgcccctcctccatcagatccccgtaatggatcccgatgtggagtcgcaccttctccccggcacagggctggctcgccgcctgccgctgcaggacgccggccgcgcggagcgcctggtccgcggagggaaagacgctcaaggcggcgtcccccaccgccttgaccagccggccgccatgctcctgggtgacccgggcgctccgctgcacgaaggcttccaccaccgcgcgg

SEQ ID NO: 537917 - DNA, 134 bp, Homo sapiens
gcccccaaccatcaccacggcggccccccagcgcgtgctcagcgctccacgggctggctgcctgctgcacgccaggccagggcgctgatccacgcagtgtctggcgcttcgtcaaagtgctcggcaaggtcagg

SEQ ID NO: 537918 - DNA, 318 bp, Homo sapiens
ccaatatccactgttctgcagcctccgctgttgatacccaggcaaacggtctggagtggatctccagcaaactccaacagacctgcagctgagggtcctgactgttggggggaaactaacaaacagaaagacaccacaccaaacccatctgtatgtcacatcatcaaagacaaggtagataaaccacacgatagggaaaacagacagaaactggaactttaaatcaggtccttctctcaggattgcagctctcacagcacagacaagctgacagatgcttgcgatggaagagctcagtgtcactcactctaggagagt

SEQ ID NO: 537919 - DNA, 322 bp, Homo sapiens
aattcccttttttccaattttaaaattttggcttcaccccttgcccccaggaggggttgctcccgcatgagcttttggccttccatagattttatttttcccggggggccaggcggagaataaatggtccccccaagccctttttttggttttggtttttcccccctgaaggggggggtgggttttcctttaggtttggacccgggctttttcccagttggaaagttttgcctttttaagggcccttgttgtaagggggggtttcctaacccctccccgatgcgattttccctttgttgaatttgttttaccccttggccca

SEQ ID NO: 537920 - DNA, 797 bp, Homo sapiens
ttttattaacatagtttctcatggcacactcggtgttgaaaaaagtggtctagcagtggtctagttggcttcgactgagtgcggcactggtcctggtttatccatttggagacacaagtcgtaactatgttaaaatcctccagagttcagggagtgaagcactcaaattccagcctacaagaaagaggttgagggccagacccagggaaagagatgatgagatggacaaatgcagcctcctgaggctgctgtgcatgacccccgctgcagccaaggaggcttccacactgaaccaggaggctagcagactcataggactggcacataggggaggagcaaaaccaaggcatcggccaaaagcatccaatgtggagctgaactaccacatttcagggcctgcaaagagaaaattagtgaggatattagtattgatgcattctttcagtgcagagggcattaaaacctaggattaactggcctcttggggccagaagactaattctgagaaaataagaaagggatgggaactagatttacctccaaaccaagtgttttctcctttcaatttgccgtagttaataaattaatattgctgttttactaatagttatatgacaataaaaatgcataagctagcacctggtaggcttaacaaaaaaccttttttagggtattgttaatcttcattggtttcattttaaacattttaaatttaggccctggcaagtacgcatggggttgaaaggagaaccactgaagtttgagggaagtgccagttgcaacagcaatgtgcgaat

SEQ ID NO: 537921 - DNA, 490 bp, Homo sapiens
tggccaggagtaagtttagttttggcattttaccctcttggtttctgtccttgggactgagagggcggtagggaagtaattagccttgtgaatagaggggtcaagggaaacacaatcctcggtccagggacatagaagagggggaaccaagagaggacggccactggagtggggggcgggatgcttcacccggtggtcggactggccacaggcagctggtcagaaccagggggccccggccgggtggacggtgggcaattcccacaggggggtcgggaggtgggagtgggagggagctgtaggaggagtgtgtggtagggggaagagctagatggagaagaggaacctaatcagacttaggtgggccacccttatgagggggggatgtggatcacactcgggtgtgacaggggaggggcagaagagcgatgcacagtgcccaggcatgaacagcagcagttcagagggcggggggaacctaggcatgata

SEQ ID NO: 537922 - DNA, 493 bp, Homo sapiens
tgagaagccacatgtgattgagattttgtgtatttaaatgttctcaattcagtgaagcaaacttcgagttcagcaattattataagctggttatagatgtacaaagttttgtcttatgtagtgcgccatttataacatgaacttgttcaccactagcattgtgtagtgaaaattaaataatagaaaacaaagcaaatgacatgaagaaaaccaagcaatttaccatttaggccaccacacacacgcacacatgcactctatacttgtaaaacattgactttcatcttccacctattgtaaaatcatttaagatgcagcaaccaaagtgacatgcttttggactgaacgtttttcttaactattaccactactaacactttaaaccactgttttagtcctaaaacaaatgtgttgaaaagattttgtattgtgtaatgtgtttttttttaatctttatgacactacaataaacctgtttttatatttgctttta

SEQ ID NO: 537923 - DNA, 294 bp, Homo sapiens
  misc_feature (156)..(156): n is a, c, g, or t
  misc_feature (240)..(241): n is a, c, g, or t
actctacaggatcttacccggcacacttggcaggcgcagagtagaaccagtgactgcctgaaatctttgggctccaggatgacggctccctctctgtcatcctcccacactctcttctgcccatcccttcttccatggatgggaggatcccgttgnacccgtgccgtctttcttgagctttgtaactggtaaatagagtctgcaaagattcctgctagagcctagaaagattttgctctnnttctttgcgtggtagctatgtgtgtgttcccggggtcctgggtacctgagctc

SEQ ID NO: 537924 - DNA, 110 bp, Homo sapiens
atcagctatgtacgactatctacattatatagaaatatagactctagttacttataacacacatctttttcccttggataaataactcataaaaatatctagtatacatg

SEQ ID NO: 537925 - DNA, 390 bp, Homo sapiens
agaaaactgagctagagacttaacttttgcccgccatttgatcctattacgaaaacatgaatgcaaaaccgacacccatgtccgagcttattcttgttgcagtgaaacttctagttccacagactgtgcatgctgccttctataacccagtgtagctgcatcagcctgtttatcaacgctcataccaactaaaattcatgcttacctactgtgggagaataactgtaaccagccttaactcatactatatcatttggcatttgataatggatatattctgattgtcatatcaagaccgaatactgaatgtcatcccattctttatgacatcctttcatggaattggtactagagcattgcttgcgtatacattgacttgtgatagtcatc

SEQ ID NO: 537926 - DNA, 184 bp, Homo sapiens
cgctggagtggggctggcaactctttgtaaaggaagttctttcagtaacgatgcccctgcttgtctttgtctcttttttgtttaccacggtacccttgtttgttacccccggtacactttttgtttcccctacgcttttttttacacactttttttatatccctctgggaaacagtcattcata

SEQ ID NO: 537927 - DNA, 135 bp, Homo sapiens
agatgactctaaggatcccggctttcgatcttcctggtcgatatgcgcgaggggtcggaagggcatgacgatcaagccgatccgcacgatgatgaaccattcgacgaccgaggtgttcttcgacgacatgcgcat

SEQ ID NO: 537928 - DNA, 157 bp, Homo sapiens
ccgggggccccaaaattgtttttgggggcccccggggggtgggggggggaatttggggggggggggggatttttggggggtttttttttttcccctttggttccccccctggcccctttttttttttggggggcccccctaggggggtcccccccca

SEQ ID NO: 537929 - DNA, 399 bp, Homo sapiens
cataatgaaaatgggcaccggacctccctgaaggacaaacgaagccttccattcatcccgaagttcatcgaagctttggcaacagcctgataacgggagcgtgaaggtatcatccttaggtaaaatcagatcaataccgggaaaggcagctatgtagagtaggccgttaaataacaaggactttagtacacggaggcatttaagtaagatagcaaacatgctggatcactgcggtgtaaagccaggtccagtagaactttaatcggtcaccacaagaaccttaaatatcggctgcaacattggtatgtcatgatgcaacatgtaggtcggaatccctattgttgacatgaactatagaatacgctatcgctctctctctctctctctctctctctctct

SEQ ID NO: 537930 - DNA, 793 bp, Homo sapiens
aattggcttcattcagagaggtgctgcaggaattgtcgtgtggcaccgtgcttgggaccgcagatggcccgcccatggagcagctgggcttctctgctcaggtgattatcctggaccctccggcccacattagcgcccgggtatgcccctgtgtattggattgcccacaccggcctcaccttgcacgcccagtttgctgagctgaagggaaagagttgtgtccgcccgttttggtaaaagctggagagatggccctcaattcttgaagtctggtgatgctgcccttgttgatatggttccctggccagccccatgtgtgttgagagcttctccagactatcccccctttgggtcgctttgctgttcgtgatatgagcccagcaccagtttcggtgggtgtctatcgcggccgtggaccagaaggctgctggagctggccaggtccacccagtctgccccgaaagcctcacgaaggctataatggatattatccctctatacctgccacccccaccttcttcatcacgtggtggaagaacggttctcacgaacctgtttgtttccattggccctttaagtttagtagtataaagactggtttatgatgacccatgcactcgtaaaccctctcacgaaggaaaggagaatagttttgtggacccctttggttttcttttttgcgtgtggccgttttaagattattagatttttaaaatcagtactttttaatggaaaccacttgaccccaaatttgtcaccagaattttgagaccccattaaaaaagtttaatga

SEQ ID NO: 537931 - DNA, 104 bp, Homo sapiens
gagatatccacttgactcctccgagagctggtcaaatcacaaactggtccttggttgaactttagtgagggtcaattcgggctttagtgagggttaattgggcg

SEQ ID NO: 537932 - DNA, 156 bp, Homo sapiens
cttccttcctcctactctcactcctgaaaatttagctaagaatataaaccatttaaatcattggaatccataaaggaaaagattactctttgactacataaaatatacgactcatatgccataagtctttacaaagtcaaaagatatggcagactt

SEQ ID NO: 537933 - DNA, 1058 bp, Homo sapiens
gtgctggcttccccttcgccttctgccgtcatttgacaggaaattaggatgagcacgagcaaagtcggtggtcacaagggagcagccaggccagtcctgcttaaactcctgctgttacatgtttgcgattgaactcgtagcaagctgccgatggaacacaacctgcctccggcacagacgccgatcttcaatcccttctccccagcaccggtgacagccctagtcatccttcaaggcccagttcaaatgcctccatctccataccatttcagttcgtggttggggataggagctcccgtcgcgatcgtcatctttctgctgcagacagattttgtttccctctgtaaagttggagtgcaggggacaaggctctgaacatagcatttaagtgacagagatggttgtggtcatgtcccagtatgtatttatctatctcctgctccagtaaatgtcacactccccggggcagcgagggtgtcaccatctcggtgtccccacagcacctagcacagtctcccagacgatccagggcagacccttcgcatgggaacgcaagtccctgtttgtccgggtcactcaggtttacgcctattgtcctgtaattatttatgcaccctcttttgctgtcataggtgttgggttggaacagtcaccctatttagcacacacctattaagccaaagcaccttagtgtgtaggcttccctcacccaaacctgttcccaaaggtcctttctcaccggctactttgggggccccagtaatcttcccgacccctctggtcagggccagagtggggagcaagtgtctaaagcaaggccttcaacaaggtcccttccctgagagactcagtttgtgacgcttgtgattgtgaagctcaaatggattatgtgactccacataactctgcaaactgtggtgcgccctattattgccgtttaacttgtcagtgtcggttctgcacccctgcaggctctgtaggggctggagaagaacacttgatttggaatttcggtaatagccagtgagctaagaaccacataaaataatgcagatcat

SEQ ID NO: 537934 - DNA, 270 bp, Homo sapiens
ctaaggatccctcccaggataggatactggcagttgtgtggcgtgtgcacactcgatcaagatctgttgcagctccttccatcctcttgcagaatgtagcctttcgggcatgaacacgggtatagctcccttcgtgtgtttttgcgagataaagattgcagcgattctgggagccatggttgcaactcgtgcagactctacacaaggaagtcccatgttatatcttggacgtgtacccagattttacaaactgcagatgatatgatcctt

SEQ ID NO: 537935 - DNA, 179 bp, Homo sapiens
aattgagctcggtacctgacacactggggatctccctgttcggggctcctggctagctctgcatgacttccgtctgccagctctcctgatactcgggatcctcaggacgcagtgtcacattcacctgtgggcagagggacagtgtcagacacccaggcccaccccagagaccctccatg

SEQ ID NO: 537936 - DNA, 1129 bp, Homo sapiens
gtggaagaggtgggggcgggacgggaggggcggcgagcccccgggagcctgggcgttaggcccgggcgtggcggggccccggcggcctggggggtctcctgggcccccccccacccatggagccctgccgccctggatggtctggtctcagatgactgaacttgggcacctgagctgcccctgtgttgtccctcgtcagtggacttgactgcctgctggggtgctgacgctatgcctgggtctcctgtgcctctccgcggggatccagatgccctcctgtggggcttgcttggccggaggtgtctgaggcggctgcggccatggctcacctccggggattttgccaaccagcttaaaacaaggtcccctgtgtaggatgacatacattgccacgatccttgcggggagattctgaagggcctggattatctgcacctccgaactgcaagaattccaccggaggacattcaaaggcctgccaaccgtgcttacttctcggacccaggggttgactgtgcacgctggcggaccttttggggcgtagacagggccagcttcactagaccacgccatgacttcctcgacgggaactaccatttcgctgggtgcacctctccgttctgggatgtggcacccttgacgtgtccatccacaggccagcgtctgtgcctacacgactttcactacgggcatgactgatccttgtgtccccctgggtgattcaacaggcacgtccgtagcttggccaaaggggggaggctctcagcgaaacatttttgaccttcctaatccccattagcgtcctgttcctagtttcccttgattttcccaaaggaacatcatgacccaaccccatacgtgggtatggtggcccagtcaacaagtgaacgtgcgccccttcaaagggaagttaccgctggggatggtgccttgccttctaaccgatatgtacccccccaggaatttccatggggctcacgggtcctgtggaaggatctcgttgactgcacccacagtttctcttttcctattgccttcacgccactgtaagtgccccttcgtttcctttacacggactcatatttcgaccgtgctaattacacgtttgagacgtcacgctgtgcgcgag

SEQ ID NO: 537937 - DNA, 350 bp, Homo sapiens
  misc_feature (79)..(79): n is a, c, g, or t
  misc_feature (145)..(145): n is a, c, g, or t
  misc_feature (156)..(156): n is a, c, g, or t
  misc_feature (310)..(310): n is a, c, g, or t
  misc_feature (318)..(318): n is a, c, g, or t
  misc_feature (347)..(347): n is a, c, g, or t
tgccttttgttgtcatgcattttgagttgaagtgttcctttcctgcctttgtcaggcagttacccttttcaagcaattnaaagtgacaaaaatactgtaatcccagcactttgggaggctgaggtgggtggattgcttgaacccnggagttcaagnccagcctgagcaacatagtaggacacagtatctataaaaaaataacaaaaattagccagacatggtggctcgtgcctgtaattccagctactctggaagcttaggtgggaggtattgcttgagcctgggctgtcgaggctgcagtgagcctagntcatgccnctgtgcttgagcctgggtgacagagagtnaca

SEQ ID NO: 537938 - DNA, 927 bp, Homo sapiens
  misc_feature (123)..(123): n is a, c, g, or t
  misc_feature (138)..(138): n is a, c, g, or t
actagttctagatcgcgagcggccgagcaggcggagcggctacgaacgacatggcctccgctatgaaggcggtgacagagctgaatgaacctctctccaatgaagatcgaaatctcctctctntggcctacaagaatntggttggtgccaggcgatcttcctggagggtcattagcagcattgagcagaaaaccatggctgatggaaacgaaaagaaattggagaaagttaaagcttaccgggagaagattgagaaggagctggagacagttttgcaatgatgtcctgtctctgcttgacaagttcctgatcaagaactgcaatgatttccagtatgagagcaaggtgttttacctgaaaatgaagggtgatactacgtatacagcgactctgctagggggtcccttcatttccagaggtcgcttctggggagaagacctgacaggtggcccgaagcgttctgagcgctgtctcacaaggagaggctttgcactagtcagcaaagaggctgatgactccccacgcatcccatcgcggtgggcctggcctcagccttctccgtgttctactatgaagatcccagaattgcagctgaggcaagcctgcctcttaggcaaaccacgccttcgacgcatgccataagctgaggcaggaaaaccctaaaacgagggatacctataaagggacaccacgctgatcatgcagacgcgcggagaacaaccctccccctgacaaggaaagcaggatgaaaggccggcaagcgacccgaggacctccgtcccgcgacatcagccagcgacagccacaccagatcaacacggcccaaccgaacgacaagacacagcagaaagcgcgacgagcaaccaaacacgcggagagggcaaaaacgaccacaaacgcaggaagaaacaacaatcaaagatacaa

SEQ ID NO: 537939 - DNA, 296 bp, Homo sapiens
actccatcaagttgtatttcattggatatatgtgtctgcactacagaaattaacacttttcatatacatggcatcatagaacatgtaaaccttttctgtgctgctactagcttttaaaattgtaattttaaatacttgaagatgatttctcttggttaacgcataaagacattgcatttatattacatggccatttcccgataaaacactagacatcaggtggtttcaatattttgggtattatgcttcagatttcaaagacaccttggagcatttaaattttgggcgtcacgggg

SEQ ID NO: 537940 - DNA, 105 bp, Homo sapiens
ccttcatctaataactgcttattatcatcaatgattccaactcagatgggacaaggaaaaacttgaaccactaaatttgccagcaattccagttaacaggcttac

SEQ ID NO: 537941 - DNA, 1125 bp, Homo sapiens
  misc_feature (76)..(76): n is a, c, g, or t
  misc_feature (82)..(82): n is a, c, g, or t
  misc_feature (84)..(85): n is a, c, g, or t
  misc_feature (90)..(90): n is a, c, g, or t
  misc_feature (104)..(104): n is a, c, g, or t
  misc_feature (111)..(111): n is a, c, g, or t
  misc_feature (449)..(449): n is a, c, g, or t
gacccatgacctgcaggagatgaaggaagagagtcggcagatgatgcgggagaagaaggtcaccatcctggagctnttccgntnncccgnctaccgcagccatnctatcgntgtggtgctgcaggtgatcccagacagactgatctggcagtcaacagctggtcttctagtgtactgccaacgacgcgatctctcgagaaggcgggtggtgcatgcgagccatgtgtaatgccagccagtaggcatccggatatcgtgtcagacagggccattcaactgctcaggtgtcgcctgatattgatgagtggaagctgagcagagccgtgctggaccctgacagcctcagtagggccttcgctgggcattggcgtggattgtcgccatagcttcatgagccatcgcgcctagccacctgctcggagacagactagcccgtggatgttcctatncttgaccatgcgtgcgccactcttgggctctcagtggcctctctgtggaacgtgggctcctgtgccccattgccactggattcagtcgttggtctgaacctcttcaggccagggtccacggttcatgctgactattgccagtggcgggctttcagtccaagttggactctcaagagttccactcgagggcagtgctgcgatcccagatatgtggaagcaaagtgatgtggaacccgtacgatctctcatcagtctttcacctagtgcatccgtgggtacctgattcttatcactactgctacctaactttcaagaggttccttgagcaacgttaaggccggaaccttcggatcgaggatcggttccgggtgcccggcaagggggggagccagtccaagagttgactaggacaatcctggaggagcttagtcaatcaccttggagtagcttgattcccaaagtgtagagtccgcccccaaatttacacccaggccccgggcttggtccccaacacagacctaaaggatactctctgcaggaaactaacaggatcaatggattggcaaatctacaagaagctggacagacagtacgcggcgactggtgctggggacacctttctctccagcaaccaatagatgcccaaagaacgtgtagcgcaggaaagggcacacga

SEQ ID NO: 537942 - DNA, 862 bp, Homo sapiens
  misc_feature (473)..(473): n is a, c, g, or t
gaagggacccgtggtctcagctacagcacagatcaccatcatgaagtttctcacgttggctctggtttacttgctccttggtcctgagatgtcaagcagccagaagtcgttcttttctgttgccgttccgacggagagcttttgagtgtgtggcttcgtggatcatgtgtgatgaatgcctactctgactagtgtatcagacatccaacttaacatcggcttcagatcaaagtacttccattgcctcggggagaactatgaatgctgaccaatatatggaggaccctggcggctagcctgggccgcatgaaggtgatcagcactgctgagataagatccgagagattcttttcgtgccgagtgtgatgctgcatggactctacttgggcctcagatctagagtctcgtccagaatgacactggcgtgcagaggagattggcggtagtaccccgactcatgttccggacctgcntggtctgccgtgagaaattactgaggcttcctcttgcattcttgactctcagtgagatctgggtcgtggaggagcactacagggtatagtggagtaacatagatgcggggggatgaggtgtaatcgtaaatggtgtattttactaaattattgaacagtggatagattaaaaggcatttttggtattctgtaattgcatatagtaactgtttgaaatggcccttttagtgagtgcgtgggagtaatctaagtaagtttaatatgaccagttattatacagtgttcatatggaatgattcttggcattacgaatgtgtgtgggaattttcgtcattttcatagaaaagcggggtgtgtacctctggttttttcttactactacttctgtg

SEQ ID NO: 537943 - DNA, 143 bp, Homo sapiens
ctaggcaacatgtatactgatgtaaactaggtatttgtgtaatctaatgctatgtagcaacagtcatctggtatttggttggcgcgcagagattttccataatcatcaagacaagtgtatgtactgtgatctaaatgcaatca

SEQ ID NO: 537944 - DNA, 294 bp, Homo sapiens
ttttttggcccccccaggggtttccctgggccccttttgtaaagggccttggccccggggcttttttggcgggggtttttttaggggttttcccaggcccacgggggttcccctcgggggaaaaactggcccccagaacccccgcccctgttttcccaagggattcccggtttttttggtaattttgtggggccggttgtttttgggtttttttttgggttcccctttccggggcccccaattttggtttccgggggggttttttttgttaaggggttttaaatttttacttta

SEQ ID NO: 537945 - DNA, 102 bp, Homo sapiens
ggggtctagaggatccgacagcatcctaaccagaggtggggtgacactcatctggactcagacatataagaagcctatataaatcaagacaagcaacaaacc

SEQ ID NO: 537946 - DNA, 468 bp, Homo sapiens
gagatacatagtagattctggttattagtccttttacagatatatagattgtcaagattttctcctctgtgggttgtctgtttactctgctgacttccttgtgccgtgcaaaagcttttagtttaattaagccccaactattatctttgtttttattgcatttgcttttgggttcttggccatgaaatccttgcctaagccaatgtctagaagggtttttcattgttatcttctagaatttttatagtttcaggttttagatttaagtccttaatccatcttgagttgatttttgtataaggtgagagatgaggatccaatttcattctcctacatgtggctagccaattatcccagcaccatttgttgaaaagggtgtctattccccgcttacgtttttgtttcctttgttgaagatcagttggctgtaagtatttgagtttacttctgggttctctattctgttcc

SEQ ID NO: 537947 - DNA, 212 bp, Homo sapiens
attagagggcagcacgactgctcacgtgtcgacggaacttgtacagggaggcatgcaccgcagtggtgaatacacgtcgacctggctccatgtatacaatattgggacatcatcaaggatctcatatatctaaggaacttgtataggaagttatgcatggccgtcgtgaatacacgtcgagctggaggcatgcatgcatactcttggtactg

SEQ ID NO: 537948 - DNA, 391 bp, Homo sapiens
  misc_feature (145)..(145): n is a, c, g, or t
tataaaatagctattatataagctataaaatagatttcttgtgtattttatgtaatatacattattgtagaatatctattattaattttcgggggcttcaatggcaaaagactttggggccaagggttgccgcttcgggtaaggngcaaaggcaaaggggtggtgggggggcgtgggttggtgtgtgtggcggggggtgtgtggggggggtttgttgtggggtggggtggggttggcggggtcgggggtttgttcgttaattagtcttatctaatctcttctgttttttcaaatgaaatctagaataattttaacaagttgcaaaagcaacctcattcgtattttatttggatctcatacctgtaattcatgagaatgaaaaggtattctt

SEQ ID NO: 537949 - DNA, 259 bp, Homo sapiens
  misc_feature (61)..(61): n is a, c, g, or t
cgggtaagatcgatggcgctgaggataggaggatgaaaaggaaaaattcaaagacgctggnatttttttctgtttctggttaattgctaaaatctacagtgtgctgaaggtggagtaaagtatttccgggggaggagggcaagcacatctcccttgcccttgaatatctgtatatctatatgaacatcaattgagatatatatgtgtgtgcccctaattacataattttaagcatatatatataaaaatgtaaaatctc

SEQ ID NO: 537950 - DNA, 111 bp, Homo sapiens
atactctaactgttatatggccggagggggcctggtgtgttcttgtgaaaagggctggagcagagtgagcaacgacggacagtagtgagaggaagtcagagagataggagg

SEQ ID NO: 537951 - DNA, 417 bp, Homo sapiens
ccccttcacaagtgttgccttcatccctatggcaagagctccaccagcggcggcgagatggttcgtcccgttcccattacttcgacccccagtactttgaatttgagtttgaggcttaaaaagctggatctcctgccgggcgtggtgggtcatgcctgtaatccccccccttttttttttaaggcaggcggatcccctgaggtcaggggtttaagacccccctgccccccatggagaaccctcgtttttcctaaaaatacaaaaattagcccggcatggtggcccccccctatagtcccccctcctccgggggttgaggccggagaatccctttaaccccggaggcaaaggttccagttaactgagatcccgtccttgccccccctcctgagccccaaagggcaaaaccccgtccca

SEQ ID NO: 537952 - DNA, 1026 bp, Homo sapiens
tggcaaaggggaagtttaagggggaccatcacgggtgataccccatcaccagaagtcccaggtgggaggccccaggttcgggccgcctctcccagagagtgtggggcctgtggaagaagaagcaccagcaccaccttcccaattttcccgtggggttatggcttttggccccgtgtgtgcctcccaaccccagaggaaagctacaagaagaacgaggcgtgtccgtgtccccaacactctcccgtgggttccgtgggaacctccctgtgtccgtgagggcgctagaggtgagcctgtggggccagagagagggcccttccccgcagagggacaccacaccaatccttcttccctgtgtgtgttacccctgtgacccccacaaacaacgtgaagcgggaaagtgctcttgggtgctccctgtgtgatctccttctgtgcccgaggggcgcccacactgtgcagcgcgtgccaaacccccagagggagtccggggggtgtgagacaacggcggctctgaggaggcggggaggacaacgggggcggggcggccacaaaaaaaaacacgcatggtgacaaaaaggggaacgtggctggatggcattgcgcaaaagagagcaaccacgagcaaccacagcagtctgggagagcccaccccctgcgccaagcaactcatcttaaagaagcgagcacccaacgcattgaagaggcgagaggcgccacaaccacaataaagcgagggcattggagagggggaggcaccccagtgtgcccccccggggagcgcgacgcgcacactcggtgcaccacgatggtgagcgttggacgcacacacggaggggagacaaaggggacacacaaggacagtgccacaagggtagtgtaggacacaccaagagaagcacaccgtaggggtaggtctgatagacagggtagctcagggagccccccagacaggggtacccgtgccagagagccgacaaccaacaaaaaacgtccacggagggagagcgaacggtgagttaaaga

SEQ ID NO: 537953 - DNA, 725 bp, Homo sapiens
gtggatcccccgggctgcaggctcgtgccgaattcggcacgaggaagcctgtgtctactaagagggatgcccagtgccccactgggcaggacgggaagcctagcctgggccccctctgtgcacacagttcaggcctgcccagcttcttatgggcaagccaccatcccactctcgtctccctgagctgtctggttctgcggacccaggaagggccaggctggggccctgcttgtgtttatcctcggctgctgtcttcccagcaggccccaggcaaggaggcttcccactgctgctgctaccggttctccacaccaactctcacggatgcacagatccctgtggtccgccatcgccgacacacacacacgtcgtaatgtggctaacgcttgactcacttaacactactcatggggcagggcggagggtggattgttgctttttgttttttgtaatttcctactagtatttgggtaactttgggggtggggagggcaatgtgggggcaggggaacatgtcattgtgatgacttttttgatattcattagaaacaatacatcctttctgagatatttacagtattattaaaaaatgaaaatgggttgactgacttgcataatgcacatgtttatggggcattccaaaggtgcacgattgggctgctaactattcttaaaaattatgggatagaaccttccgttgggctatttccaaggcacttaaaagt

SEQ ID NO: 537954 - DNA, 119 bp, Homo sapiens
gcctcctccgcatgcgcccaccagcggggccgggcgggggacccccgcggcgggaccgctctgttcgcgtgcggcgccagctctggcgatgatgcagagtataggggagccagcgaccg

SEQ ID NO: 537955 - DNA, 486 bp, Homo sapiens
ggccccgcgccgccggccggccgcagtggaggccggccccgaggaccggcggctccgggcccgccgcaatccggagggctggttccgcgagacctgcagctgtggccggcaggccctgtcgctgcggtggacaggtgtccaccacggcgctcgcagctaccaggacaatcctcggtcttccgcgagtatggacctatggcaagcgtgcgtgtgtgttggatcgggtgtcatccagtgcacggagagagacgagttctcctaccatggagatgatcgctcaacctgcctctctgcagcagcccaaaccgcgaaaggtgcttgaatcatcgggggcggagatggaggtgtcctgcgggaggtggtgaagcacccctcacggtggagatgcgtgagtccacgtgctgagatcgcatcgagggatgtcgatccacagttctccgaatagaagttcctgtccaggcactgggcataggcatacatcgtacg

SEQ ID NO: 537956 - DNA, 726 bp, Homo sapiens
gtggatcccccgggctgcaggctcgtgccgaattcggcacgaggaagcctgtgtctactaagagggatgcccagtgccccactgggcaggacgggaagcctagcctgggccccctctgtgcacacagttcaggcctgcccagcttcttatgggcaagccaccatcccactctcgtctccctgagctgtctggttctgcggacccaggaagggccaggctggggccctgcttgtgtttatcctcggctgctgtcttcccagcaggccccaggcaaggaggcttcccactgctgctgctaccggttctccacaccaactctcacggatgcacagatccctgtggtccgccatcgccgacacacacacacgtcgtaatgtggctaacgcttgactcacttaacactactcatggggcagggcggagggtggattgttgctttttgttttttgtaatttcctactagtatttgggtaactttgggggtggggagggcaatgtgggggcaggggaacatgtcattgtgatgacttttttgatattcattagaaacaatacatccttttctaaaacttaccatctcattaaaacattaaaatccttttacttcttctcatcatcaacacctgtaattaccatgcaaaaattccaacattccgtacttcctcactcttcactttaacctttcgttaatgcgcacgatcacttcgccatatgaccgtcctcttc

SEQ ID NO: 537957 - DNA, 524 bp, Homo sapiens
gtggatcccccgggctgcaggctcgtgccgaattcggcacgaggaagcctgtgtctactaagagggatgcccagtgccccactgggcaggacgggaagcctagcctgggccccctctgtgcacacagttcaggcctgcccagcttcttatgggcaagccaccatcccactctcgtctccctgagctgtctggttctgcggacccaggaagggccaggctggggccctgcttgtgtttatcctcggctgctgtcttcccagcaggccccaggcaaggaggcttcccactgctgctgctaccggttctccacaccaactctcacggatgcacagatccctgtggtccgccatcgccgacacacacacacgtcgtaatgtggctaacgcttgactcacttaacactactcatggggcagggcggaggggatgtgctttgttttgtattcctactaattgtaacttggggggaggctggggcaggacattatgaatctttaatcaaacatctcttctaccaacccagg

SEQ ID NO: 537958 - DNA, 518 bp, Homo sapiens
acgatggtgatcaagtcctctcatgttacaggaatccgtcgaggaccacttattataatattcagatgaaagaggcaaagccgtgcggctttccagactccttcactttctgcaggccaatttctgtataatctaaagttatactccaatccacaagaacctcttagtacatactgctcttcagaggactcatagtccttcacagcctcaccacagttttttccaaatttgtatgctatatccaagttccgtctgacgttcccactgtacatcatacccatcccagcctttgttctgacactgtatgactgtccggggtataagaatcactaccaggtgttcctccaatacatttcaatctgttgtgatgggatccagcctgtgtgagatggtgtacgcctaataggtgtttcccgcaagaaacaggtatgaccggaccaaacgtcagcgtcgtagaaactggaaattgaaagagcttgcgagagagagagaaaacatggataccagatgatgaaagg

SEQ ID NO: 537959 - DNA, 207 bp, Homo sapiens
aattttgccaccttaacatgtaatagcgtatttgtccaagatgtgaatatagaaactatagcttcagtgtctgctgtaataatattatttaagatgctgctgggcttttcatctttatgaactttatgtcaacagctactacttagaccatatctaaactgctaatgttgctgctactgctgttattggggggatcctcttagagtc

SEQ ID NO: 537960 - DNA, 205 bp, Homo sapiens
gattcatgcactccctgtctccatagctggccattgattggcacactgccatcgttggataagcatcaagaacagacatgaatgggtggttagagtgatatagttaacactattgagaccccttccaagccttcgcatgttaattatcccagtaatctgaacctttctctttaatcctgaagtcttagctataacctctttcctg

SEQ ID NO: 537961 - DNA, 873 bp, Homo sapiens
  misc_feature (694)..(694): n is a, c, g, or t
  misc_feature (873)..(873): n is a, c, g, or t
cttccctgtggtattaacgggttctgtgtgaccctcagatctattgcattgtcctctgttaaatataagaactatataaaacactttcagtaaggaagttgaaattttatctacttctattctagattctatgtgaaagtccagacacatctaataaaataaaatcacacttatataggtagtggcacatttctcaggggtcaaaaattaaaataactgaagaattgcatgatttatgtttaaagtgcagtgtatatgtgtctcatgacagagcaagactctgtctcaaaaaaagaaaaaaaagaaagaactgatggaagtcatcctacaaagggagcttcagcattttctacaaactttgaaacagaaaatctttttacggtgggatttttaagtactaattctgcttctgatatttttcaagacattaagtgaagagagtgaaaatgaaacataaatatgctacacttttaaatatctcactttttaaaaagctgtttgggctacagatggaatttcagtccttttcttatttgtgggaagggcttggtttttaaattgcacagcaatctgaccaaagagcagaaattgtgaatgggggtgaccctggaaggaatggtgtaaattcacctttatgtctttataagcaatactctgggaaaatacattgaacgggatggtttctctcaatgtngaataaaagtctgtgagtgaaggtctaaagggaaatatttgttttacaagcggagttggtgggcagaaacgaggtctgacaatgatactaaaatatggcggctccggtgagaaaatatagggagaggagtatttttgtgcaaaaaaaggtgggggatggtgggggcaataaaggagagn

SEQ ID NO: 537962 - DNA, 312 bp, Homo sapiens
  misc_feature (225)..(225): n is a, c, g, or t
  misc_feature (230)..(230): n is a, c, g, or t
  misc_feature (251)..(251): n is a, c, g, or t
attgctggcctggttctccttggagctgtgaccactggagctgtggtcgctgccgtgatgtggaggaggaagagctcagatagaaaaggagggagttacactctaggctgcaagccagtgacatgtgcccagtggctctgagtgtgtctactcacgagcttgtaagagtgtgagacagcgtgccttggtgtggcgactgagaggcaacgagttgttcctgccctnccctnttgtgacttgagagaaccctngactttgtattctgcaaagggcacctgccatgtgtcgtgtgttacgtgtagacaattgaag

SEQ ID NO: 537963 - DNA, 2642 bp, Homo sapiens
caccgcgggaaaccaaaatggcgaggggctgtattgaagtgggctgtgtttgaggccggtgtaagaacgctcattctacccccaacccttgtctccaaggacctcggtttgtgcgtgcatatgtgccgggtacccggtggggcgggtgcccagtaagtgctcggactcgcaggggaagcgcccacggggacggattggttgttttttcctgtatgaagcggttggcaccactgaagtgaccgaatgagagactctacaggggcaggtaattcactggtccacaagcggtctcctttacgtcgaaaccaaaagaccccaacatccttgaccaagctgtctttacaggatggacataaagccaaaaagccagcatgtaaatttgaagagggtcaggatgtcctagctagatggtcagatggcttgttttatcttggcactatcaaaaagataaacatattgaaacagagctgcttcatcatatttgaagacagttctaaatcctgggttctctggaaggacattcaaacaggagccactggaagtggggaaatggtctgtacaatatgtcaagaagagtattcagaagctcccaatgaaatggttatatgtgacaagtgtggccaaggatatcatcagttgtgtcacacacctcatattgattccagtgtgattgattcagatgaaaaatggctctgtcggcagtgtgtttttgcaacaacaacaaagaggggtggtgcacttaagaaaggaccaaatgccaaagcattgcaagtcatgaagcagacattaccctatagtgtggcagaccttgaatgggatgcaggtcataaaaccaatgtccagcagtgttactgctattgtggaggccctggagactggtatttgaagatgctacagtgctgcaaatgtaagcagtggtttcatgaggcttgtgtgcaatgccttcaaaagccaatgctatttggagacagattttatacgtttatatgctctgtctgcagttctggaccagaatacctcaaacgtctaccattacagtgggtagatatagcacacctatgcctttacaacctaagtgttattcataagaagaaatactttgattctgaacttgagcttatgacatacattaatgaaaactgggatagattgcaccctggagagctggcagacacaccgaaatctgaaagatatgagcatgttctggaggcattaaatgattacaagaccatgtttatgtctgggaaagaaataaagaagaagaagcatttgtttgggttgcgaattcgtgttcctcctgtgccaccaaatgtggctttcaaagcagagaaagaacctgaaggaacatctcatgaatttaaaattaaaggcagaaaggcatccaaacctatatctgattcaagggaagtaagcaatggcatagaaaaaaaaggaaagaaaaaatctgtaggtcgtccacctggcccatatacaagaaaaatgattcaaaaaactgctgagccacttttggataaggaatcaatttcagagaatcctactttggatttaccttgttctatagggagaactgagggaactgcacattcatccaatacctcagatgtggatttcacgggtgcttccagtgcaaaagaaactacctcgtctagcatttccaggcattatggattatctgactccagaaaaagaacgcgtacaggaagatcttggcctgctgcaataccacatttgaggagaagaagaggtcgtcttccaagaagagcactccagactcagaactcagaaattgtaaaagatgatgaaggcaaagaagattatcagtttgatgaactcaacacagagattctgaataacttagcagatcaggagttacaactcaatcatctaaagaactccattaccagttattttggtgctgcaggtagaatagcatgtggcgaaaaataccgagttttggcacgtcgggtgacacttgatggaaaggtgcagtatcttgtggaatgggaaggagcaactgcatcctgactgtaggactgaacattatgttcactgcactctgattttctgtaggtacagttcaaagccctaaagggagtctggcttttactatctttcttaaaaaaaaaaaaaaagagtcaaaaaaattcaaaaaaggggatgatactagccttaacatgtacctgtcaatgttatggatattgtcataaaaaggtatcttttaaaaatcagaacagagacttaattttttaaatcttaagatttgtagaatgtttctaggataggatattaaaaatgattgaaacccatgcatggtgttagacaatttttctaattattccattgagtcagttttttgtgattagtgattatcagagcaaacatcatgtagatagcacaagtatttggagaaacgttgtttgttttgattagtgattatcagagcaaacatcatgtagatagcacaagtatttggagaaacgttgtttgttttgttaccaaaatgttggaaaaatttatttcaataccttttagatttcataaagtgcagtgtatataatgcctactgaaagactgtaaaatattgaaattttctttcaagcaaagtgtaaaaaaatatattgagcctgtaaattgcaaaaaaa

SEQ ID NO: 537964 - DNA, 518 bp, Homo sapiens
  misc_feature (250)..(250): n is a, c, g, or t
  misc_feature (376)..(376): n is a, c, g, or t
  misc_feature (413)..(413): n is a, c, g, or t
  misc_feature (429)..(429): n is a, c, g, or t
  misc_feature (438)..(438): n is a, c, g, or t
  misc_feature (487)..(487): n is a, c, g, or t
  misc_feature (494)..(494): n is a, c, g, or t
tgttgttgttgttgttagttttttccttgaaccatgtgaaaacaagttacagacatggtgctgcttataaacatttcagtgtgtgtttaagaccaaagatatcatcttatgtgatcagagtataattatcaaaatcaggaaatttaatactgaagaaatgctcttatccgcagtctaaattatttcataccagtaatgttccgtatcgctgttgcttcctgatctttcccttccccagcctccagtccangaattcatcctgcatcacacaagtgcatccagttgtcaggcccatcttggcgagacggggtctccctctgtcggcaggctggagttcagaggctctgcttctgtggtccagggtccaactcctggntccagcggtcctcccaactcaggctcctcaaatagcnggggccaaggggtaantgactccanacctgggcaaatttttgaatttttttggtagagacaggggcttgctaangttaaanaggctgggaaggcccatcttccta

SEQ ID NO: 537965 - DNA, 331 bp, Homo sapiens
gtctatcatactgggtaaggagagacaaaacatacaaaaagaacaggcaggcaagcatggtggctcacacctgtaatcccagtactttgggaggccgaagcgggtgggtcacctgaggtcaagtgtttgagaccagcctggccaacatggtgaaattccatctctaataaaaatacaaaaattagctgggagtggtggtgcactcctgtaatcccagctacttggggggctgaggcaggagaatcgcttgaacctgggaggcagaggtcgcagtgaggtgagatcacatcactgcactccagccaggacaatagagcgagactctgactcc

SEQ ID NO: 537966 - DNA, 138 bp, Homo sapiens
ggacacagacgactttacggaacgacgacgacttgaaaaccctcacctaacggacgttagacgacggtaacccggcatttcacgtaacgacgcctcaggcgctacgtctcacatggacagaagacatttcctgactcc

SEQ ID NO: 537967 - DNA, 212 bp, Homo sapiens
tctcacacatgcaaactataaggctgactctgaccagtgcagctcttagatgctcatccagacagagaggatggcatgatccatatgcagagatcaagctaagtgaatgtgagagagaaaaggagaaagaataggcctttggacaccctggaccaaccctccacccgcttcttgtgcccatggaggcctccagggaagttagcaaatccctt

SEQ ID NO: 537968 - DNA, 365 bp, Homo sapiens
  misc_feature (13)..(13): n is a, c, g, or t
  misc_feature (22)..(22): n is a, c, g, or t
  misc_feature (68)..(68): n is a, c, g, or t
  misc_feature (83)..(83): n is a, c, g, or t
  misc_feature (94)..(94): n is a, c, g, or t
  misc_feature (101)..(101): n is a, c, g, or t
  misc_feature (107)..(107): n is a, c, g, or t
  misc_feature (109)..(109): n is a, c, g, or t
  misc_feature (144)..(144): n is a, c, g, or t
  misc_feature (155)..(155): n is a, c, g, or t
  misc_feature (201)..(201): n is a, c, g, or t
  misc_feature (204)..(204): n is a, c, g, or t
  misc_feature (219)..(219): n is a, c, g, or t
  misc_feature (231)..(231): n is a, c, g, or t
  misc_feature (233)..(233): n is a, c, g, or t
  misc_feature (267)..(267): n is a, c, g, or t
  misc_feature (299)..(299): n is a, c, g, or t
  misc_feature (345)..(345): n is a, c, g, or t
tgaggagcctggntgagagggngtgtggtctgccctccttcactttatatatatggattccaggctanagctaaaaaaatttnttttagtttanaccaaanagaaananaaccctttaaaagcaagtttgtgtgttctcacggnaagttcagaanaatggtccctgcctgcagtggagaggaaggggttctgggggcccanaanagggcctactggttntcgtcccgcatntnttccatgatgctgatgaggttctccaggccaaanacgtagcctctgtttggcccatcatgcacggnggggtcatcccggaagcccttgaatgtgctgtgtgcaaagtcaatnatgcggacatccaccttggg

SEQ ID NO: 537969 - DNA, 612 bp, Homo sapiens
ctcagaggatccccgagtctctcccatcagttgtttttaagttttttctgcaacttagattactctgcttattcctgtgaaccaaccagtgatctctggcgtgctgctcacaagaaacaaaaggaatgggtaatgtaaaaatctggatcaatattctaattctgggcacatactggaatcagctagtaaccccaaatcagcttggttccaacagttgcccagttcatggaaaaccttcttatttaatttactggggatagttttgcttattttgctttactgttgaggagtatattgctgttgtactctttgtgtaggaatgcaggataagcttactgaatgttttcttaaactgaacaccttttaatcttccagatatcaccttttgttggagttatgaatagctctcaccatactgatgctttctgactgagctcctctctgaaccctgaatacaagagaccctaagagtcaggcaggaatatcatcgcccctattcaccctgaaaaagttacagaagatggatctttatttctttgtaacccctaggattaagggttctctaataaaagggatgggagaaatgtcagaggtgttctgatgggagcaaga

SEQ ID NO: 537970 - DNA, 1044 bp, Homo sapiens
ccccggatgaaggagatcagtggccagtgacatgtatcagacctccacatgccttttgcgccatcctggtccttgcactgggctacagagacggacacctggtcaacctgcattaatgaatcgggattgaaggagacatcatagctatgaggactgacacaggaatcagtctgcttctctgagcgggcgatacaaggatgacgagcacaatagtcctggagccgggaagtaactcacacacatcacaactacaacctaccagagagacaaaagcgaacaaagagagaacaacgaagaccaacacagccacacacacagggacacaaacagccaacacggaagaacacacacgagactagaaaccacaacaacaaggagacactgaagcatgacacatgacaagacaaagcaaaagccacacaccaaacaccaacagaaaaacaagagaagacaaggctaccagcccaatagacaacgaagcagaataaagacaaaaacaaaaaacaaagaacagacgagacacgaaccacgaccccgacaacacagccagggcagaccacaaaccacaaaaaacaaaaagagcagcgccacgacacacacacaagagaacagaagaacaccggcaacgacaaaacgaaagaaggaacgaaaaacacagcaacgcaaagcaggaaacaaagagaaacagacgcacacaaaacgagaaaaacacgacacgccaaaagaagacacacatccaacacaaacacaagacacgaccaagccaagagacggcagacacacctcagcacagcacaaaaacaaagacacaccagaacccaaacagagcacacaaacacaaaacaacacaacaaccaaacaagaaaagaagaaaagaaaaacaaaaaagccaacaaaaaacaaacaaaaaagaaaacagcaaacacccaacgcacacgaatagaccagcaaaccacacaaagagagacagcacacgaacgcgaagacacacaagacacaaccgcccgcaccacagacaacagcacaataaagaacgcacacaac

SEQ ID NO: 537971 - DNA, 806 bp, Homo sapiens
  misc_feature (9)..(9): n is a, c, g, or t
  misc_feature (115)..(116): n is a, c, g, or t
  misc_feature (118)..(118): n is a, c, g, or t
  misc_feature (128)..(128): n is a, c, g, or t
  misc_feature (144)..(144): n is a, c, g, or t
  misc_feature (171)..(174): n is a, c, g, or t
  misc_feature (195)..(195): n is a, c, g, or t
  misc_feature (221)..(223): n is a, c, g, or t
  misc_feature (241)..(241): n is a, c, g, or t
  misc_feature (267)..(267): n is a, c, g, or t
  misc_feature (269)..(271): n is a, c, g, or t
  misc_feature (285)..(287): n is a, c, g, or t
  misc_feature (289)..(289): n is a, c, g, or t
  misc_feature (291)..(291): n is a, c, g, or t
  misc_feature (293)..(293): n is a, c, g, or t
  misc_feature (295)..(295): n is a, c, g, or t
  misc_feature (297)..(297): n is a, c, g, or t
  misc_feature (306)..(306): n is a, c, g, or t
  misc_feature (316)..(316): n is a, c, g, or t
  misc_feature (329)..(329): n is a, c, g, or t
  misc_feature (338)..(338): n is a, c, g, or t
  misc_feature (344)..(344): n is a, c, g, or t
  misc_feature (349)..(349): n is a, c, g, or t
  misc_feature (353)..(353): n is a, c, g, or t
  misc_feature (438)..(438): n is a, c, g, or t
  misc_feature (454)..(454): n is a, c, g, or t
  misc_feature (459)..(459): n is a, c, g, or t
  misc_feature (689)..(689): n is a, c, g, or t
  misc_feature (759)..(759): n is a, c, g, or t
aattaacanatgtgcaagaaggcaataaaaaaagagagaaaaaaacccaaccaaggaaaggcgtgggggggcttagcaacaggggccagggcacacttagcactaattgagatgnntnggtgaataantacaataccaaacggnaggggttcggatgcgttcggaaagggnnnnccccgcctttcccctcaggcnaatgacaaacacaatacaggcagacnnnccagccccccccacttcnccgacttcccacagcccttatatctntnnntccacaagtctatnnntncntncnanacaacatcnaatacaaccntttccacagaacnaggaaatanatttcnaaganaganagattttacagaccccatcttttatacccaccccaacagtctaactctaaagagggtaaagccaatgactttcctcacaagagcncacgactaacgtcgcnttgcnatcaaaatctgtatttctgatccgttatgagcattgagacaagattcaaatattcccaaagaaagaagcacaatgcacgttgtgatcgcctattcagcaacagcgagcactgcatcccaaactctcatcccaggaattaaataaggtcagccacattcatgggcatctcctccactgtagtattgtagaaagtctcaatgtcacgaagaatcctcttgtcttcttcagtnacaaagtttatagccacacctttcctcccaaatcgaccccctctgccaattctgtgaatatagttttcangattggtaggtagatcataatttataacaaagacacttgttgcacat

SEQ ID NO: 537972 - DNA, 126 bp, Homo sapiens
acaactgtacctcccatatgctaccccatgtactgtaaatggcactacattcttctagtatgctcaagtcaaaaagccttgtaaggccgggtgtggtggcccacgcctgtaatcccaacattttgg

SEQ ID NO: 537973 - DNA, 822 bp, Homo sapiens
ggaatgcttgaaagactgcgggactgggcctgtaaggaaggatgcatccagtcccctctgccttgcctccggcgcctgagtcatggggtcgtggagaagggggcgggtggctgattggctcgctgccctgggggcagtagagggggcagtagagggggcagtagaggggccccgcctatctaggggagccgctccgttccactcaccctgcctagcgctggtacccacgggcctgggcaggaatgtttgtaccgcgctcctccccaggggccagagggcaggacgggccggggaggtactacactcttctactcctcgacatctccatcaagacaaggtgagagcggagcgacgcaaggctgcgacactgataacacgcaccgacttcgcaggaagggtggacagagatgggttggacaaccaagacagagacgaggacgaaggaggaaacaacaggacgaacaagacgagagaaaacagcgaacagaagacagagacgacagccagtaagaaagcaaccaacgagacaacagcgaataacaaacagacatagcgccggacggaggcgcaccagagatctcgaaacagcaggaagagagggcggaggcgcacgagtaggaagccacagcaacacggaaggcagcacacagggacaccaccaccaagcaacaaagcacaacagcaccgcacagacgaacacgaagcagaccacagagcgacagcccccgacaacgcaccacaaagaaacacaaaccgagaggacgcaccgcgacgaagaagcacgccacacgacggagccagccgcagcgcccgccccgaggg

SEQ ID NO: 537974 - DNA, 446 bp, Homo sapiens
  misc_feature (41)..(41): n is a, c, g, or t
gagcttcatccttggaaacgggtggcacctattatcccccntgagctgcaggagcggccccatcagtgagcctgattgaaacacactagatttcaggtcatggaaactgggcgttaggatccgtttccctggctgcagagagtggaaggtgtgatgtggaatatcccttctcccagcacaccccaattaatattgaagagtagggcaggagaaggtgctggaaaaaccgggtttcttggcacatgggggtgcaagcactgtggttgaaattggccatgtccaaggcacaccagacgatttcaggtcatttttagccctaaactggaaaggggtcaggggacaggtgacgtgggctcagcccctacaagctcccagcgggccctgtagcgagcgagctcctgatccctgcttttgagggaataagcaaatagaacccaaaataaaaa

SEQ ID NO: 537975 - DNA, 395 bp, Homo sapiens
gggctgcatgaattcagctcgaggtcacactgaccgagagtttcacatggaagaaagcccaacttctccctctggcgtggtacagacacttacccattgaatggacctgactcgaggaccctgaatcggcccactctctgaatgacaccaggccatgagctagagagaactgctcaatgaccatgatcataaactcactggagatctgatcaatgacgcggggctacagactagaggcaatggccccttgaacgacctgcgcactcatgtgcaacggatccaacacatgtgctgtgattccgctaccaacgtgctctcatcaagccaccttgacacatgtgagcgaacaatcgtggatgtgcacctacaagtctacagaggactatgcgttgcgt

SEQ ID NO: 537976 - DNA, 324 bp, Homo sapiens
  misc_feature (10)..(10): n is a, c, g, or t
aaaaaaaaanaaaaaaaaaaaaaaaaaaaaaaaaaaaaaaaaaaaaaaaaaaaaaaaaaaaaaaaaaaaaaaaaaaaaaaaaaaaaaaaaaaaaaaaaaaaaaaaaaaaaaggtgtaaataatctatgtatagtttttctccttttagattattttgtatttgtttaaaagaagttttgtcaaaatacaaaaatataaagaaatgactgaaagttgttgacagggtttttaagaaataattattctaattgtttttgtttgtttgtttttgccttgtaaactagcgccaaggaactgcagcaaataaactccaactctgcccaa

SEQ ID NO: 537977 - DNA, 756 bp, Homo sapiens
tgaatctggagctgaaggaggaggacttctctgtgtgtggtggagccaggtgtcacccgcgagagccctcaacgcccacctgcgggacaagcgggctctggtttcccgtggacccaggcgcggacgcctctctctgtggcatggcgtgccaccggggcgtcggggaccaactgcgtgtccggctactgtgcgaccgatgctggggacgaagcgtgcgtcaaccctggacggttgcgtgcttgccgcgactgggtgctgtgcttggcttggcacaacggctgtgtgcctcggaggccccgggggcaattttcccgtggcgacatcgaatgttttggccaaggcccctgggccttttagctagaagcgccgttccgaacctggtggtggggcctttacagttttccgcgggtttgggcgctggccatatacccccgggaaagcgcgcgggcgctggaaaccccggcccttttggcgcggggcgcacgttctactgcaaatttttcccaaaagccataaaggggggcgcttcacggaaaagcagagccataaaaatacacgcgaccactttttttggtccgcgtgtgacccccaccctttttttttggccagcagaagaagccccgcgaccccctgctttttgggatgcgaccccgctgcccgcccgcccttttttttgcgacagacacggtgcggcggacgacgtccagagaaaagcactacaaaaacgctgctattttatcgggcgacgcccaacgg

SEQ ID NO: 537978 - DNA, 339 bp, Homo sapiens
gtcaaaggcaaagccagagtgcagtttggagcatataagatcaatataatctagcaagagcccaaccaatcctataattccattgtacagatacatgagaaaaatggctggtacacccttccaaaggaggatggctaattatgttgactgttgtatgtttggactaatgtggctttaaggaaaatcttccaacatgacagacaaaggctgtgagtcccctatcacagcagtcccgagatgtgagtgatagatattagagtggatatctctcatctcacatcgtagtataggtacagcctgcgcattgctgctcattagagatatcggcgactgcagcag

SEQ ID NO: 537979 - DNA, 2403 bp, Homo sapiens
gcttggaagagacgctgtttcattctgactgcactgcctttttctacttgaggtatacacgaataaggagccccgtgaatcatcctttagagaatctgagtatcgggaaagtgaaggctccaaaaaaccaactgcttttgagctttatatccccgacaataaagaccaagttatcaaggcctgcaagaccgaggctgacgggcgggtggtggaggggaaccacactgtttaccggatctcagctccgacgcccgaggagaaggaggagtggattaagtgcattaaagcagccatcagcagggaccctttctacgaaatgctcgcagcacggaaaaagaaggtctcctccacgaagcgacactgagcgtgcagccaagggcgttggtctgcgggggccttggagctcctgctcttctcccgcacctccatggatgcactgctgccgagcagagcgtcctctgccaggccccgccctggattcctagagactagcttcagcttttgctattttttttaagtgggagaagggtgggcggttatcactggggaagagaggaccggccacctgtccagcatgggctccagagccttcctctctcacagggcagagctcttgtcggcagggcagcctcctggccagtttctctgctcagtgttctggtagcagagctcagagccaactgtttacctcttggttgtccccgtgaagaagccttcaaaccctgcaccataaatacatgtgtccatatattattatatgttaagagaaaaaggtggaaaggaagagaagccacatactataaagatctatttttttttttttaagagagaacgtagggctgttcaggtgcattctgccctggctgcgctggggagcttctccctggagaagagcacctggggctgcggccaaggggcatcagcctgggcccgcggcagggcctggcctgcctctcctgtgctgtgggagctcgctgcctggtgcttgtctgggcgagatggacaggtgaggtcgaggacgcagagggcagaggcccagtggagcctcagacggcacagtcagagtcgggggcctgccctggccggggtcgcagtcggcagcagcgtgcagtccggcatctcccgcggatgcttttccatcccaagtgcctgcggagcgccgaggagaggagagagctgactggacgcttacgttattttcctccttcagaatccaagttcttgttgggctttaaagtagaaagtcagcattttccttgagctaaatacctaataaccaaaactgtgaggaaggttatcgggacagaggttccggataacctgtttcattttgggttttcttcctcttccccagactccagtcctcgttctagaggaaggagtaggacttccccgatccccgtagggcttcagctttttctgcctcaaaaccagccctaactggactactctggatgcattttgtggtgggccccctagaggggaagatgggcctttatctgctccgtggggtgcactggagtgaggggggtggccgggctgcctctcgcatctctgtcttcccctgcaggcgctgtgtgagctggccctgcccctcctcattacagtatgaagggagccgtgacacgcagcattttcctgccgttctctcagggactctcagggcagctcctgccactccgccagggccagcatgccagtccaggcagagcaggtggctggctgtctggccgtctcgccccgcccctccacaggaccctggaccagggcggtgcagggcgcagccccgaggaggcaggtggaggagctgcgggttttcacagggccgcgtcgccacggctcctctgatcctttagggttggcgagcatctctggaaatagcttttgcagaggagtggtgggaggaatagagggggacagtctgtcacctccctccccgccactttgtgtagatcctacctggagggaatggctttaggcacttttgtgccagagcttgtgagggtgacagaagagggtccaggctggaaacctgaactttctgggtgggagaaccaggtggtgcctgccgaggtctgggcgtgtttgggccggtgctggagcctgtccagctggcccgggccctggcctggttctcaagtgtttcctagacagagaggcacctgggtcagtattagtctatttatcagaggtgtaaataatctatgtatagtttttctccttttagattattttgtatttgtttaaaagaagttttgtcaaaatacaaaaatataaagaaatgactgaaagttgttgacagggtttttaagaaataattattctaattgtttttgtttgtttgtttttgccttgtaaactagcgccaaggaactgcagcaaataaactccaactctgcccaa

SEQ ID NO: 537980 - DNA, 340 bp, Homo sapiens
  misc_feature (165)..(165): n is a, c, g, or t
acgcacgggtgatgcggttgatggtgatgggagcaggtaatgtggcatatccctaaaaagaaggagccttgagctcctgaagggctgggccaaggtcagtgggcaaggacaggattatatccttcagctctggggccttcgggggtagtaaagaagagttcaccnttgagggacacatctccattacgcatggccctttccctttctgtgcctggtggacaacttgattcctcctgattttgtgtacgttctgacacaaagtgactacgcggtgcttgtcgttttttccttccactcatgacaggcacaggttcaacagacaagggcgaatgggggccag

SEQ ID NO: 537981 - DNA, 2808 bp, Homo sapiens
cagacatagggttgtggtgttgccagtccactgcaggtgctccagcccgcggcgcggcctgcgctgctgtctttgaggctgtagcacaagcatgagctcgggccccctccctgtgcaccggagacccagccaggtccagccggtctgtccatggtgccccaccagcagcatcgtgctgggcagtgccgcctgcagagtcatggagccttagttactgagcaggtgcacgtggggggcttggaaggccccactgcattaccatgccagctatcacacaccccgtgccagaggactgcatgtgacacggcttgattacgtggcactcgctgctgcaaagcaaagtcagatgtcatcatggaaactcaagcaccagtctttttctctgaattggaatatagctgtaagaatgtggtatgattctgttcctaaatgtgaattgattattatgttgaaacaggtaaaaaccccaaaattttcttgtcacgtgttcctgtgtctctttcgaagtgtgtcaccttaggtcactgtgtggacacagcaagggtggaggacgctaacttggcctttgcagtgatggtggggtgggacaggtgttctggggcacgaggggccctgagaatcccctgcctgggtgtgtttcttctgattctgtccctcacgtctctgttttctcccttttctgtgctccagagcagccatcagcagggaccctttctacgaaatgctcgcagcacggaaaaagaaggtctcctccacgaagcgacactgagcgtgcagccaagggcgttggtctgcgggggccttggagctcctgctcttctcccgcacctccatggatgcactgctgccgagcagagcgtcctctgccaggccccgccctggattcctagagactagcttcagcttttgctattttttttaagtgggagaagggtgggcggttatcactggggaagagaggaccggccacctgtccagcatgggctccagagccttcctctctcacagggcagagctcttgtcggcagggcagcctcctggccagtttctctgctcagtgttctggtagcagagctcagagccaactgtttacctcttggttgtccccgtgaagaagccttcaaaccctgcaccataaatacatgtgtccatatattattatatgttaagagaaaaaggtggaaaggaagagaagccacatactataaagatctatttttttttttttaagagagaacgtagggctgttcaggtgcattctgccctggctgcgctggggagcttctccctggagaagagcacctggggctgcggccaaggggcatcagcctgggcccgcggcagggcctggcctgcctctcctgtgctgtgggagctcgctgcctggtgcttgtctgggcgagatggacaggtgaggtcgaggacgcagagggcagaggcccagtggagcctcagacggcacagtcagagtcgggggcctgccctggccggggtcgcagtcggcagcagcgtgcagtccggcatctcccgcggatgcttttccatcccaagtgcctgcggagcgccgaggagaggagagagctgactggacgcttacgttattttcctccttcagaatccaagttcttgttgggctttaaagtagaaagtcagcattttccttgagctaaatacctaataaccaaaactgtgaggaaggttatcgggacagaggttccggataacctgtttcattttgggttttcttcctcttccccagactccagtcctcgttctagaggaaggagtaggacttccccgatccccgtagggcttcagctttttctgcctcaaaaccagccctaactggactactctggatgcattttgtggtgggccccctagaggggaagatgggcctttatctgctccgtggggtgcactggagtgaggggggtggccgggctgcctctcgcatctctgtcttcccctgcaggcgctgtgtgagctggccctgcccctcctcattacagtatgaagggagccgtgacacgcagcattttcctgccgttctctcagggactctcagggcagctcctgccactccgccagggccagcatgccagtccaggcagagcaggtggctggctgtctggccgtctcgccccgcccctccacaggaccctggaccagggcggtgcagggcgcagccccgaggaggcaggtggaggagctgcgggttttcacagggccgcgtcgccacggctcctctgatcctttagggttggcgagcatctctggaaatagcttttgcagaggagtggtgggaggaatagagggggacagtctgtcacctccctccccgccactttgtgtagatcctacctggagggaatggctttaggcacttttgtgccagagcttgtgagggtgacagaagagggtccaggctggaaacctgaactttctgggtgggagaaccaggtggtgcctgccgaggtctgggcgtgtttgggccggtgctggagcctgtccagctggcccgggccctggcctggttctcaagtgtttcctagacagagaggcacctgggtcagtattagtctatttatcagaggtgtaaataatctatgtatagtttttctccttttagattattttgtatttgtttaaaagaagttttgtcaaaatacaaaaatataaagaaatgactgaaagttgttgacagggtttttaagaaataattattctaattgtttttgtttgtttgtttttgccttgtaaactagcgccaaggaactgcagcaaataaactccaactctgcccaa

SEQ ID NO: 537982 - DNA, 610 bp, Homo sapiens
tcagggatgcccattgaaaagttatttcctgatgcccattagactgagatttgaagaccattccagccaggataatgaccatagtcccaagtcttgccagccttttccagaaatatgggaatgatccagattccctttagctcctgaccaccaggccgagcgaactcacgcacgatgggagggggattcttttccggtgtgctcaccacgctttatactggagtggcaagtggtcctgctcgtctatcacctggagcccgcccgggaatctgacaccgacctcctggtccaaccaggctgtggcccaatggacggcggaagaagttgtcctctggctggagcagctgggcccctgggcatctctttacacgggaaaggtttttatctgaacgagtaaatggaaggtgaggagccaagtcttctgacaccccgtggacattttagaaaaccgctttcttgagatataatcccggcccggccggtggctcacacctggatccccagccctttgggaggccgaggcggatcgatcatttgaggtcaggagttcccagacccgcctgacccatatgatgaaccccctctctactaaaaataccaaaaaaaaaaa

SEQ ID NO: 537983 - DNA, 2554 bp, Homo sapiens
gcttggaagagacgctgtttcattctgactgcactgcctttttctacttgaggtatacacgaataaggagccccgtgaatcatcctttagagaatctgagtatcgggaaagtgaaggctccaaaaaaccaactgcttttgagctttatatccccgacaataaagaccaagttatcaaggcctgcaagaccgaggctgacgggcgggtggtggaggggaaccacactgtttaccggatctcagctccgacgcccgaggagaaggaggagtggattaagtgcattaaagcagccatcagcagggaccctttctacgaaatgctcgcagcacggaaaaagaaggtctcctccacgaagcgacactgagcgtgcagccaagggcgttggtctgcgggggccttggagctcctgctcttctcccgcacctccatggatgcactgctgccgagcagagcgtcctctgccaggccccgccctggattcctagagactagcttcagcttttgctattttttttaagtgggagaagggtgggcggttatcactggggaagagaggaccggccacctgtccagcatgggctccagagccttcctctctcacagggcagagctcttgtcggcagggcagcctcctggccagtttctctgctcagtgttctggtagcagagctcagagccaactgtttacctcttggttgtccccgtgaagaagccttcaaaccctgcaccataaatacatgtgtccatatattattatatgttaagagaaaaaggtggaaaggaagagaagccacatactataaagatctatttttttttttttaagagagaacgtagggctgttcaggtgcattctgccctggctgcgctggggagcttctccctggagaagagcacctggggctgcggccaaggggcatcagcctgggcccgcggcagggcctggcctgcctctcctgtgctgtgggagctcgctgcctggtgcttgtctgggcgagatggacaggtgaggtcgaggacgcagagggcagaggcccagtggagcctcagacggcacagtcagagtcgggggcctgccctggccggggtcgcagtcggcagcagcgtgcagtccggcatctcccgcggatgcttttccatcccaagtgcctgcggagcgccgaggagaggagagagctgactggacgcttacgttattttcctccttcagaatccaagttcttgttgggctttaaagtagaaagtcagcattttccttgagctaaatacctaataaccaaaactgtgaggaaggttatcgggacagaggttccggataacctgtttcattttgggttttcttcctcttccccagactccagtcctcgttctagaggaaggagtaggacttccccgatccccgtagggcttcagctttttctgcctcaaaaccagccctaactggactactctggatgcattttgtggtgggccccctagaggggaagatgggcctttatctgctccgtggggtgcactggagtgaggggggtggccgggctgcctctcgcatctctgtcttcccctgcaggcgctgtgtgagctggccctgcccctcctcattacagtatgaagggagccgtgacacgcagcattttcctgccgttctctcagggactctcagggcagctcctgccactccgccagggccagcatgccagtccaggcagagcaggtggctggctgtctggccgtctcgccccgcccctccacaggaccctggaccagggcggtgcagggcgcagccccgaggaggcaggtggaggagctgcgggttttcacagggccgcgtcgccacggctcctctgatcctttagggttggcgagcatctctggaaatagcttttgcagaggagtggtgggaggaatagagggggacagtctgtcacctccctccccgccactttgtgtagatcctacctggagggaatggctttaggcacttttgtgccagagcttgtgagggtgacagaagagggtccaggctggaaacctgaactttctgggtgggagaaccaggtggtgcctgccgaggtctgggcgtgtttgggccggtgctggagcctgtccagctggcccgggccctggcctggttctcaagtgtttcctagacagagaggcacctgggtcagtattagtctatttatcagaggtgtaaataatctatgtatagtttttctccttttagattattttgtatttgtttaaaagaagttttgtcaaaatacaaaaatataaagaaatgactgaaagttgttgacagggtttttaagaaataattattctaattgtttttgtttgtttgtttttgccttgtaaactagcgccaaggaactgcagcaaataaactccaactctgcccaagccatctttgttgttcgcggtgtctctgggctcaggcggggccctcgaggtgggaaaggggtgctgaccggacacttgtgcaggagggtgttactccagctgcaccttgagttcagttgtaacaccttgaaagtgggaggagggttctgtc

SEQ ID NO: 537984 - DNA, 999 bp, Homo sapiens
ccggtaccgtacgcccacaaggactggattctgaaggaggaaaatacgtaagcgtcagtcagctctctcctctcctcggcgctccgcaggcacttgggatggaaaagcatccgcgggagatgccggactgcacgctgctgccgactgcgaccccgtccagggcaggcccccgactctgactgtgccgtcagaggctccactgggccacgccatgtaaggtctatcacggggctggaaatttcctcatgtgacaagtatctggaaacatggctttctaaagtcagttggcttctcttgcttaatgttcttccctgggacttggtctgcctggctctccctccagtccctgtgcgagggtcagcagtgagcattctgactttgccttctctcagtgatgctttctcctccctccagtccctgtgcgagggtcagcagtgagcattctgactttgccttctctcagtgatcctttctcctaagagcacagccttgccctctccctcctggtgcttcatccatgagagttcacctagctgttttcctgagaaagactcctcagctgcctgtgtgacttcacctggaagacagggagaatgtgcccacaggtgactgcgaaggtccctgtaagtcctctgtgtactgtgggagaaccaggtggtgcctgccgaggtctgggcgtgtttgggccggtgctggagcctgtccagctggcccgggccctggcctggttctcaagtgtttcctagacagagaggcacctgggtcagtattagtctatttatcagaggtgtaaataatctatgtatagtttttctccttttagattattttgtatttgtttaaaagaagttttgtcaaaatacaaaaatataaagaaatgactgaaagttgttgacagggtttttaagaaataattattctaattgtttttgtttgtttgtttttgccttgtaaactagcgccaaggaactgcagcaaataaactccaactctgcccaa

SEQ ID NO: 537985 - DNA, 961 bp, Homo sapiens
gaggaaactgaggcccatagaggttaagaaatttgctggaagtcacataccgtgatccaaggtccgggaggagggagaagcttcctcagggttccacagctaagaagtggagctcccaagtccaggcctctgactcctacctctcggctctgttggctccactgggccacgccatgtaaggtctatcacggggctggaaatttcctcatgtgacaagtatctggaaacatggctttctaaagtcagttggcttctcttgcttaatgttcttccctgggacttggtctgcctggctctccctccagtccctgtgcgagggtcagcagtgagcattctgactttgccttctctcagtgatgctttctcctccctccagtccctgtgcgagggtcagcagtgagcattctgactttgccttctctcagtgatcctttctcctaagagcacagccttgccctctccctcctggtgcttcatccatgagagttcacctagctgttttcctgagaaagactcctcagctgcctgtgtgacttcacctggaagacagggagaatgtgcccacaggtgactgcgaaggtccctgtaagtcctctgtgtactgtgggagaaccaggtggtgcctgccgaggtctgggcgtgtttgggccggtgctggagcctgtccagctggcccgggccctggcctggttctcaagtgtttcctagacagagaggcacctgggtcagtattagtctatttatcagaggtgtaaataatctatgtatagtttttctccttttagattattttgtatttgtttaaaagaagttttgtcaaaatacaaaaatataaagaaatgactgaaagttgttgacagggtttttaagaaataattattctaattgtttttgtttgtttgtttttgccttgtaaactagcgccaaggaactgcagcaaataaactccaactctgcccaa

SEQ ID NO: 537986 - DNA, 568 bp, Homo sapiens
tttttttcttaattctttgattcatcataccattaagaaacaagaattagtcatgagcctcggttccatattcattacgtgcacatgcacatatataatctcatatcttcctactcttctagtaagcaattcctcttctaagatataaaaacctcagaggtagaaatttacctgtttatgtgcataaacattctgctggtttaaagcacagaatattttttgtaaaactgtactgttcgtcacacaggtttatatgtgactaaaattttcatgacaaatttgaaggtcatatatatatatatatatatatatatatatatatatatatataaaatctccttatatatattgggaaatttatgcacatgtttgtaatagtttttgctctagatagtagtaatttttccaccttagtgttctacttatatgcaaatggactcaacagttgctgtaggacaaaatctgtttatgcatgttaaatgtgacccataacgtatataattatgtatcttttgttagaaaacatgtggattgtgtgatgtgtgaattatatctcaaagccattaca

SEQ ID NO: 537987 - DNA, 1316 bp, Homo sapiens
  misc_feature (1312)..(1312): n is a, c, g, or t
gcttggaagagacgctgtttcattctgactgcactgcctttttctacttgaggtatacacgaataaggagccccgtgaatcatcctttagagaatctgagtatcgggaaagtgaaggctccaaaaaaccaactgcttttgagctttatatccccgacaataaagaccaagttatcaaggcctgcaagaccgaggctgacgggcgggtggtggaggggaaccacactgtttaccggatctcagctccgacgcccgaggagaaggaggagtggattaagtgcattaaagcagccatcagcagggaccctttctacgaaatgctcgcagcacggaaaaagaaggtctcctccacgaagcgacactgagcgtgcagccaagggcgttggtctgcgggggccttggagctcctgctcttctcccgcacctccatggatgcactgctgccgagcagagcgtcctctgccaggccccgccctggattcctagagactagcttcagcttttgctattttttttaagtgggagaagggtgggcggttatcactggggaagagaggaccggccacctgtccagcatgggctccagagccttcctctctcacagggcagagctcttgtcggcagggcagcctcctggccagtttctctgctcagtgttctggtagcagagctcagagccaactgtttacctcttggttgtccccgtgaagaagccttcaaaccctgcaccataaatacatgtgtccatatattattatatgttaagagaaaaaggtggaaaggaagagaagccacatactataaagatctatttttttttttttaagagagaacgtagggctgttcaggtgcattctgccctggctgcgctggggagcttctccctggagaagagcacctggggctgcggccaaggggcatcagcctgggcccgcggcagggcctggcctgcctctcctgtgctgtgggagctcgctgcctggtgcttgtctgggcgagatggacaggtgaggtcgaggacgcagagggcagaggcccagtggagcctcagacggcacagtcagagtcgggggcctgccctggccggggtcgcagtcggcagcagcgtgcagtccggcatctcccgcggatgcttttccatcccaagtgcctgcggagcgccgaggagaggagagagctgactggacgcttacgttattttcctccttcagaatccaagttcttgttgggctagaattctccaagcagctgcccaggcccgagcccaagccccgtccccttatcctgaatgagcccaaagggatcctctagancacc

SEQ ID NO: 537988 - DNA, 557 bp, Homo sapiens
agcgtaccctaattgctttggagctggcactgctgtggtggtagcagttgccggtggtagaagtggtggtggcagcagcaggagggaaggtgtagcctggtggcactgtcagtgtgcttcaacaggctagaggagcctgaagtggggctgggctcaagcgaactaaggcaagttgtgttgggtttaaggaccaagttggcgttggaaggcgtgaagttccactctcaagaacccccaggggggattgcaacaactggggtgagagaaacaatggtgggctgcgagtggaggccagaagaccggggcaagaaggcgagattcaggaattagcgggggcccggcaagttaagcgtgaaaacattagtgattcttggcagcactttgggggacttgggcccggggttggcttgggcgttgagaactccgtgaacttggaggaagtccaacttgggaccggggcccaagggcggcccgtgggttttgtcaacaacaacaatggtcgggcttcttggttaagttcttggttggaggattctgtgtgactttcatctttgatt

SEQ ID NO: 537989 - DNA, 110 bp, Homo sapiens
agagctggctattttacattctcgcattgcttgtgaactctcaacacatgttagactctcctagagaaggcgcagaacgtcagaggttgcatccttagcccccaagggta

SEQ ID NO: 537990 - DNA, 129 bp, Homo sapiens
cgttatgatacataatagttgtacatagtaggaggggttcctctaaaaaactaaaaatagaactaccataagatccagcaatcacactgctgggtatatacacaaaggaaaggaaatcaggctgggtga

SEQ ID NO: 537991 - DNA, 1253 bp, Homo sapiens
ccggtaccgtacgcccacaaggactggattctgaaggaggaaaatacgtaagcgtcagtcagctctctcctctcctcggcgctccgcaggcacttgggatggaaaagcatccgcgggagatgccggactgcacgctgctgccgactgcgaccccgtccagggcaggcccccgactctgactgtgccgtcagaggctccactgggccacgccatgtaaggtctatcacggggctggaaatttcctcatgtgacaagtatctggaaacatggctttctaaagtcagttggcttctcttgcttaatgttcttccctgggacttggtctgcctggctctccctccagtccctgtgcgagggtcagcagtgagcattctgactttgccttctctcagtgatgctttctcctccctccagtccctgtgcgagggtcagcagtgagcattctgactttgccttctctcagtgatcctttctcctaagagcacagccttgccctctccctcctggtgcttcatccatgagagttcacctagctgttttcctgagaaagactcctcagctgcctgtgtgacttcacctggaagacagggagaatgtgcccacaggtgactgcgaaggtccctgtaagtcctctgtgtactgtgtgacgggctttctcccacccaggctacagccccgttcccgagggtgtgcaatatcctctagcctttgttttatcttttggtatttctactcagaccagtgtaggttttggcccaagctaaataccttaaaactgactgaagatggagatgatgtgatgatggagggaaaggaatagatgatttatcctctcaaaagtaatctgaaaattcatgcaatgaaaacagacaggaaccagctggagagaggatggatttggcgcccaggtcacgctgcgctgagactcctcgctctgtctctctgagcgcagtgcctggtaggtgggtaacctacctcttctgtgtgatagaggtcatttctgcctcatggggctcttttgaggattaaatgagattgtgtagtgggcatggggtttggcagcttccctggcatgacagccatcatgggaagtgtggccctgagcgggggccagcccaccctccattgagcagacgcggcgccacggtgttttcagagtcccctaccagtaatggcaccagccctgtgttctggggaagaaaacagcagtgttgtgggggaccggtatccttttttttaacatactgaaaaaa

SEQ ID NO: 537992 - DNA, 792 bp, Homo sapiens
agaatttaaaaatatctgctaggacaccccgtgtcccccacaactcatcacagagcaaacccatcacagagcaaactccttggctacttcttgtcttgggccgtcttttcatctggcctgtttgcctgactggactttggggtctttgttcccagcatcaaaatttcctaccagcgactttccatcacagctcccttccagtcttctggaaattgtcagatgtgcctggatttgcagggcctgcacaagatatgctgtcgatctgggatttttggggatttttgcagttcacactccaatgtgcaacagcaaccaaacggagatggaggacgtgaacatgaactactggagatgctgatgaaacgtgtgtaaggaccgcaatggtatctgtgtcctgctcgtgaaattgaccagatacagcagcttccttttgcttccgaaggcccggattgacctgacaattgatatgctttgctctatactccaactcccattgaccatggggtgaaagcaccctttctcggtcagcctcactgcttccccgcagatggagggattttctgcaggagcatgggccctgggccttcctttcccactgtctcttgaaagcctcctccagatgtgctgcctggctcagctctttgggtgactttttttctgtctcatgtgacccatcaagattcacacagggctgtgtcccgggcagggctggagtcgacattcagggaggagatcacttgttctgggaacagagcagtgattggtttaattgaaatctgatagatcatcatg

SEQ ID NO: 537993 - DNA, 733 bp, Homo sapiens
ggggaagtgagggcaatgagctgttcagaggtggagactacggggtgcgccctggcggcctacactcaggccctgggtctggacgcgacgccccaggaccaggccgttctgcaccggaaccgggccgcctgccacctcaagctgtgaagattactgacaaatgcatgaaacatgatggcggtgcaaatgccattgaaaagtgatggtggggatgtcaaagcactctacctggctggatgccaatgcccctagatgaatgcttggtgcctgcctggaccagtgctgtccttgacctgcatgagatgtgttgatgcttggatgcccaagaacaaatgttttcgcagtgatggccttgctggaacatctgggggccagattcaggagaaggtgcgatacatgtcctcgacgtgatgccaaagtggaacagatgtttcagatactgttggacccagaagagcaagggcactgagaaaaagcaaaaggcttctcagaacctggtggtgctggccaggcaggatgctggagcggagaagatcttccggagtaactggggttcagctcttgcacacgtttactggaccatgggagagcactgcgctcatgctggccggcctctgggtacgctgggttgggatttagcgcctgagcattcagtcaccgacagtgccaacctgagcctactgcgaactcggcacgtcagatccctcctgggcgtcgaaagccaggtgtgtcc

SEQ ID NO: 537994 - DNA, 276 bp, Homo sapiens
attgcacgttggtatgtgtcaattgcatattggcacggaagaaaacgctttaattgggtggatggtagacagagacagcagaaagaatgagtatgcttgaattatggataatcttttttttcacattctcttttagttagtaattttttgttgcaggaataaattaactgggacatctgaggctgtatttaaaaggagactaaattaacttaaagaatggcacataaccgagcgtggcaaatgggaccggagcccaattcgaactcatggcctagc

SEQ ID NO: 537995 - DNA, 1275 bp, Homo sapiens
ggcgtgcgtggactggggaggctgctgctcacgctaccgctcctccgacagacagtgggcaaagtgctggcccatttctatggcgcgatgaacgcattggaggtgcaaggtgcccatgcacaagctgttcttggagatgctctgaggccatgatggactgagtgcaaggggtgggactgggtggtggttctggcaggacctgcctagcaatgcgggtcatagccccaagggcatggcggcagagagcttggggtctgggcagtgccacagccatgctggcagggccagtgcaatgccatcagcccctgggaaacgaggcccgacgacacctctcctcacccctcctagtggggtgtccagaagctggggtaacgtagtgtgcaggctcttggtgccacagttgctgccccattgcgaagcccacatacgtgcccccaagagtgtagcggcggcattgctggaagcccataagggggcattgcatgggattgctgtgggagtgctagcaatagcgtaatcgtcagggcacgggacagcgggcatggagcgcccaggagtcgtcccaggatgagtgaatgcatttggctgactggcttaagtccgtacgccccatacttcataagcagatctggggacgtcggaagaaggcaaacgtggcccaagatgcccccgttcgatgcctcctctcatccatttgccatttggggcatttacgtgttgccgcccttgaagtccaataatttccaaagcagaactccaagacgcccttgggaacccctgggggttggcacgtggctttcccgcaaatcaggttccccaaagaaggccttcctacaaggagggctagacagaagcgagcttcccttcctaaattgccctcgttccatgtattacactaaagcccgtattacttaaaattctaggggctgtcgagccccgggaagggcagcaccacggggacatgtggtggcccacggcccagaggggcgccccgaaagaccccttgggtgcgtgaaaaaccaagaaagacagcaacgcacaaacgggtcaacatctgggagggcgacgaaagaaaaacccggtctatggagcgcatgaacgccgtcctctggaggacacagcacgaccaatcgtaaagaccgaaggagccgaaccacacaacgacaccgcacacaccaagatcgacagcagagacgaaaaaccaagaaaacaacaacagcgcgcgacgcacgaggcacgcccgcgcagacagaagggaccgacgcaatacacaaa

SEQ ID NO: 537996 - DNA, 180 bp, Homo sapiens
gctagagacaggaggcgcaaactccccaggccattaggtgcttcagcgccgaagtcttgcacctaggcagcaccatcgcgaggtagacggctgcggcgggacgacataggtggacacgatagctagaggccagtagtccgtgatgcagtacacacctgtacgggctagtacgggggggta

SEQ ID NO: 537997 - DNA, 777 bp, Homo sapiens
gcttgtgagggctgggcctgggctggggaactgggctggggctgtggcctggatggctggctgtgctggctgactcgccttctctccgtgggctgctgacccctgatggcaacctggctgcagatgtggatgccctgctgtgagccgagtgatgctgtggctgtggcctggggactgcgactgcctggctgatggtgatgcttgttcctgtgtgactgcctgccttcccctgcctgctggactcctctgctcttctgcgacttgtctacgcctgctggcccagttccgctgatggacatcacgtggagtgctggccccaggatgattttgttgccacacccctggctgtttccagatgacccactgtggaatgggcatggtgaagcagggtgcttgctaggtgggatttgcttggttcctgtgtgcctgctgcctgctgctgcagaatgagcaggcacctcctggaccaggtcattcctccgggacatgcctgagctgggcctgaccagtgagtacctgggggctccttcacctgtcgcattttggcagttatggacgctgggtggagtgtgaccacagatgacctgctgcctgtgccttgcagtggagactctgtatctcccgctgccagagggaggatgtgttctggctccccttactggaaaggtctacgccaagggtccatggggtcctacgagcaactgtgggccgggcggtgcggatgcctggtggacctgacggtggctgcggaaatatgggactagagggcgtaaggac

SEQ ID NO: 537998 - DNA, 203 bp, Homo sapiens
  misc_feature (6)..(6): n is a, c, g, or t
  misc_feature (97)..(97): n is a, c, g, or t
  misc_feature (138)..(138): n is a, c, g, or t
  misc_feature (145)..(145): n is a, c, g, or t
  misc_feature (191)..(191): n is a, c, g, or t
tgactnccctttgatcacagagattagggaagcaggaaagattgcaaaatctaaaagaaaaaaaaaaggcttataactaagagaaaaagaaggaggnccttatgcccactctggtttgttacctgcatttttcatcanggatgtntcacatgtgagttctgtgaatcagtgctgagctgaattctctgggntattgcaacttt

SEQ ID NO: 537999 - DNA, 1063 bp, Homo sapiens
attttaatgcatagcagtatgttgaaaaatagaccagttctaaaaagcccatgataccttagctgttgatgaaaaaggatgatcatatatatagaacttgattagtcagagcatgggcattccaaaatacagccttggttcagtagattttaatgcttataaattagactgacggtcgcatacccgttatagaattggcaatatgcattgtctcacaaaattcaattgtgatacatttcaatgtatgcatgtgcgatatatgctaaacagcaatgccagcaaacatccattttcatgcaatagccaacatttggggttgatgtgaaccattttaatgtgtacatcattaggttttatagcttattatttatttttttagttatattaaaagggtggtaggatatatttacaattaacacgaaagaataatttagaccaaaatatgtgacacgttaagattaacagataacatataaataaacattaaatttgtgagaagtgggacggtcatcaaccatcagtggataaaaccgcaagggcgaggcaagatcgcaagaaaaagatgcagaaaatcaacaggacaaccactgtagacaacaccagtacgtgcgactaccgtgagaaatcgcaaaagacgaactatccatcgcgtgtgtccacacaaagcatgccccagaggtaaagacgtggagcacaataataacggccagccgaatggaccaaccaaacaacacgcgggcagtaaaaaaaaaaaaacagcgaagtatatatagaacaacaaagaacacacaggggaatataacaaccacaaaggaatacaacgaccattaagaggaggtgacgaacccatcacacacgcccttcccagtgaacacacaagatgtgagagaaatcaatgggaccgcttgaacacctacgcgacaccatcacgaaagaaaaagaggcgaaggggagaaaataatacacccgagaccgatagacaactcacaacaggaaacgccacaatggagcgcacaagagaataaaccaacaacacacaaagagatgaaaagacaaaagcaga

SEQ ID NO: 538000 - DNA, 290 bp, Homo sapiens
gggcctggagggcagaacattgagccaatgattattctgaggccgtaacatttcatgttgtttcctctgttgggtttcagacttacttggcaccagtcactgttttcttctttcctatgtctcccttttaaaatggaaatatctatcctatgcccatcccaccattgtattttggaagcacagaacatgtttgcttcactgctagagagcagtttacctcagaatgagtcatactttcagtctcacctatatctgatttagatgaaactctgaactggagattttcgagt

SEQ ID NO: 538001 - DNA, 177 bp, Homo sapiens
  misc_feature (7)..(7): n is a, c, g, or t
  misc_feature (9)..(9): n is a, c, g, or t
  misc_feature (11)..(11): n is a, c, g, or t
  misc_feature (50)..(50): n is a, c, g, or t
  misc_feature (101)..(101): n is a, c, g, or t
ccaattngncntgtgaatgtttgccttgtggcctaaagttaactgatcanattgcctctcttcttaaaccctgagcctggagaaaagtgtcaaacgcaggntctctctctattcgggttacttgaatttccactagaggagcagaaatgccaccaatgccaagtgccccacctgtgc

SEQ ID NO: 538002 - DNA, 399 bp, Homo sapiens
  misc_feature (6)..(6): n is a, c, g, or t
  misc_feature (17)..(17): n is a, c, g, or t
  misc_feature (49)..(49): n is a, c, g, or t
  misc_feature (89)..(89): n is a, c, g, or t
  misc_feature (156)..(156): n is a, c, g, or t
  misc_feature (256)..(256): n is a, c, g, or t
  misc_feature (359)..(359): n is a, c, g, or t
  misc_feature (375)..(375): n is a, c, g, or t
attgtnacatggctctngcaagtgatgataatagtgatgcttataatantgaggattagctgcactcatcagcctgtagaaagtaaaangtttccttttcgaaatttcctttcttgttaaagaataaatcataagtgttagaaataatagtttctnttaaagactaacttccttcaagcctcctctgctctgtgctaatgactcttcattaagccctatcctatgtagctgttagatataagggaataagtatatnctatgtccttgtactttaaccaagatatttgtgctggacatgctcacaggcacgttccagcttgcagcctatgccccttccttatttggaaatattattactnttctaaagtctttttngcaagcaactgcttcttttgccct

SEQ ID NO: 538003 - DNA, 356 bp, Homo sapiens
ataatagaagatatgggggaaaatcagctaataaaaaagggtattaacaataagacatacgtgtagaaagtaaagagtttcctgttcaaagttccccttcttgttcaaagaatgaatcataagtgttagaagtagtagtttcttttaaagactacctttcttcaagcctccttggtttgggctaataactctttgtcaggccctgtcctaagtaactgttggacatgctcacaggcacgttccagctcatagcctatgcccattccttatttggaaatgttattgcttccttaaacctttcataagcaacttcctctccttctttgttctcccccacacttacctatttaggaaag

SEQ ID NO: 538004 - DNA, 679 bp, Homo sapiens
caacaataaaaaaaaaaaaaaaaaaaatatgataggtagaactggtgttaataggagaggtcaggcgagcgctagttctgcgcgtggtatagtacgtgtacgataacctgcaaagagttctactgaggtggtccagagccagagggtcctatctcttcgtggcctcgtgactgtggatgctctgtgtgctgtgcaagatccttcagtgccttgtaaccagttgtgaccacagtgcaaatatactgctaggttccagtattcttggtgtggcaagaactatgaaacttgcatatctctatgagcataaagaacagtattcattatatattatatctacataaacttgtgtgagctaatgtagacctatatggatattctatcaacctgatgaagacactatattcttttgttgtgtgacacccataggccagtcaatgtctgtacaatgtatacaacagatacccagatcaaattactcattaaacaagatgattgaccttgaagtatcccgcctatgaagacatcttacagtggaatgaagaggcggatgaagagcattcaggaaatgacagtgatgggtcagagccttctgataagcgcaaacggtaagacgaggagatagtggagcaaccatgcggaggaggcatgcgaggagagtgggaggccggagaagagacta

SEQ ID NO: 538005 - DNA, 145 bp, Homo sapiens
agcgagcagtacaccagctagagggacaggaggaaagaaataaaagcaagaataaatgagatagtaattgcaatcactaaaaatataaaaaccagctgggcatggtggtgggcgcctgtaatcccagctactcgggaggctgaag

SEQ ID NO: 538006 - DNA, 217 bp, Homo sapiens
aaagataacaggagcaaaagagcagaaatacggtacagagtacaaaagtgacaacccactacagctcaggaataaacaaaacccccataatggaacaacaaataccatcctactcacttactactagcctactataaggccaccaaactcccaggactgaacccgaatcaggtatacaataccctataatataggtaacctactaccctagaaacta

SEQ ID NO: 538007 - DNA, 1193 bp, Homo sapiens
ccccaccccggacggccagcccatagccagccctccgtcatcctcgttcacctgcaccctcgtgactgcgcccaaggcccccgcctgccgctccagctgcctgcgcaggccgagccgcctgcctgcctgcctgctctctccttatgctcgcctgccgatgcacgacctgctgtccaccatcgccagcgtgctgccatgaacctacgcaccacggactcacgagtgcctgccaatcaacgctgccgagatcatacctggacgctcttacgccatctctactgtttacccttgttcacacatgctcattacgtaacatatattgcagcctgccgactgcactgatgcgctctctgacaccgaacctttcatgccgagacactacatcttactttcaacccaaatcatccatggacgcgagacgcgtgacacactagcctcgacgcaacacctcgagtagaactggctcgcgatccaaccacaaccgcacgtgcttgtgcaccgaaagtcgtatacactttacagccgactactcccactcgcacaatcccacgcacttggcctgcacttggaccctggcgcaacgaacgcccgtgctgcctcgacacctggcccacccggcgaccgttgcttgaccacttccaccactcactggcgactcacacaccacactgcgtccacactcacgcctcaccctaccaccgcgcaaaactctggctacccaccaaacccctcgcccccacaaccttggaaccacaacacagcactggaccctccccccccacctaatctgcttgctggacccttttccactattgccacctgcacagaccactataaccacaatggaaacattgaccgccacccacgcgtgacacacagttgccccaatcatcaagacaccacgcacccaatcttcgcgcgctctggaatcccaaccggctttggaccccccaaaaacccactaataggaccgcccaacaaacgcaacattagcggcgacaagcctctccctaccggacaacctcccattgagccacttatgcgccacccgtcgacaaccttacctcccttccattattcttcatcccccaatcgcacactcaaccctcctttgagtggaacacgaacacacgctacgcgactaaccctatcgaacaacgccttcaaacaaccataaccgaaaccactaaaca

SEQ ID NO: 538008 - DNA, 513 bp, Homo sapiens
tgttctagaggatacctcacgcccatgtcacacaaattttttaaataggctgggcgcagtggctcacgcctgtaatctcaacactctgggaggctaaggcgggtggatcacctgaggtcgggagttggggactagcctggccaacatggtgaagcgctgcctcttctaaaaatacagaaattagctgggcatggtggtgctgtcctctaatcccaactactcgggagactgaggcaggagaatggcttgaacccagttggtgaaggttgcagtgtgctgagatcacaccattgcactttattctacttgggtgacagagcgaaactctgtctcaaaaaaaaaaaattctattaaaaatagtgcgcttggccaaggcatgtggtggctcacgcctgtggtctcagcacttgggaaggctgaggcaggaggatagctcgagcccggacagtcaagaccagcctggacgacatggggaaaccccgtctctacaaaaaaatagcaagagtaagccag

SEQ ID NO: 538009 - DNA, 261 bp, Homo sapiens
ggccaggcatggccagcagatgaacgctgttcttagttcactaatgtaagccttatttaggaggaagtcagccagacaccttgtactgggcacgcgtcagactgtcagccagtccgtttccgtttcatttagccagccatcctaggtactagtaagtttagcgggttgactggtaggttgaaacttgattgtctggctaggttactaaaggtgcctcgctagccacttgtataaaaattaaacacatagaagaactatttt

SEQ ID NO: 538010 - DNA, 383 bp, Homo sapiens
gccggacctgcaaggttggaggagagatacgcgacaagaaagtggaaatcatagtggctgaacaatctcatattatgagccacattcatctacacatccaggaagcgtcaacaaactccagtgtaggatacacacaggaagattcgcagctgaacacatcatagtcgtcatgctgccccgaccgataaggacaaaatattgaaagcgacaagagaaaatcacttgtcacttacaagagaccctcagtaagattaaccgcttacttctcatcagaaacaatgaaggccacaggcaatggggtcacacacagatgctcctcaactgagggtgagcctatgtctaggtaaacctgctgtaagtttaaaacatcataaataaaaaat

SEQ ID NO: 538011 - DNA, 789 bp, Homo sapiens
gcttgatggtctctgagggactcaactttaggaactctgtccgttttgtgctgctgtcacagagtgcttgagactgggtaatttataatgaacaatcaactggctcacggtactggacaggtgccagcatctggcgagggccgtccagctgcgtcatcacatggtggaaggcaggaggggagccaccccacccttttataaccaatcccagccgttagggcgcagccttcatggcctaaccaccctctgaaggtcccactcgatactgttaaaaggcaatgaaatttcaacaggttttggaggggacaaacattcaaaccatggcagaaagtgtggaaggagcaataaccacactgaacagaatgaccatggtaattaaaccccaagtgaaaccatgacctgttttacatcatcctggagagaacagtgcagctccagtacttgctgagctgcagagacagggtccatccaactcgacagcatccagcagccactccaggccgccagcagacagatgttgggagcagcactgatagtttgggttttcgtttgtttttttaagacagggtctcacttgcccaggctggagtgcagtggtgtgattatggctcactgcagcctggaactcgggctcaggcgatcctcccgcctcgtgctcctgagtagctgggactgcaggtgtgtgccatcaaatccggctaatttttgttacttttgtagagatggggtctcactattgttgcccagggcttataggatttttttaaatgatcataccggacggctggg

SEQ ID NO: 538012 - DNA, 899 bp, Homo sapiens
tggatacttgcctaacatgcttgtgctgtaaaaatagttaacagggaaataacttgagatgatggctagcttggttaaatgtcttatgaaattttcatgaacaatccaagcataattgttaagaaacacgtgttattaaattcatgtaagtggaataaaagttttatgaatggccttttcaactactttctcatacagctttccatgtaaattagtctgggtcctgaaacttctctaaaggaaattgtcacatttttggaaatttattccttattccctcttggcagctaatgggcctcttaccaagttttaaacacaaaatttatcataacaaaaatactactaatataactactgttcccatgtcccatgatcccctctcttcctccccaccctgaaaaaaatgagtccctaatttttcctggggaaagggggggatggattcagaaaaaatatgtcgcggtgtcccatttaaaatttgggcatatggcattttctaaccttaggaagccacaatgtccttgggcccatcatgactttgggtagcattacctgtaagtttggtgctcccaaatcaccttttgggttttaagaattccttgatactcttaaagcctgccttcaatttggactccttatccttcataattggtccaggtgcacaagattaccttcctgtttaagccttctgtcttgtcaccaaacattcttacttgggggccatgtacttggaaaaaagggcgatgaacttcgtggctccacttcggtgttctaaggccccctgcttcctatggttgcatcccaagattattccctaattctatttattgggcaatctccccttattgatcagcactggttatctccctttaaacctacctaactgaatggccgcgctg

SEQ ID NO: 538013 - DNA, 501 bp, Homo sapiens
gacttgtacatccagtagctattctatgatgtatcctcatgctgcgctaccgcatgacactacgtaataaaaggtgcagcagaagtcagccgtaaaagcgctcaattaggtgggcttgtgagggctccaaatgcgatagctctatgaagtagtatttggaaggtatggacgaatagtggaagtactcttgatgaaagaccgtgaaaacaacatatcaagaggatatgcttttgtcacctttgaaagccctagcagacgctaaggatgcagcccgagacatgaatggcaagtcataagatggaaaagccatcaaggtggaacaagctatcaaagcatcatttgaaagtggtatacgtggaccggctccacctccaagaagtagagtgcctccaagaggtcttagaggtggactaggaggaagtggagaaccaggggacctccctcacggggagaacacatggatgacaggggatattccatgaattttaacatgagttcttc

SEQ ID NO: 538014 - DNA, 204 bp, Homo sapiens
aaccaaagtccatacctctgtcgataacggttgcctctgcgggtactcctccggagagtacaccagaggcaacaaatattaaaacaccatttcaagaactccaagaatacaccgagaggtttgtaaaggtgccatatttaagcattaaagctatatcctaaatcattttactgtaaacgtatttattatttggcttagggaaaa

SEQ ID NO: 538015 - DNA, 130 bp, Homo sapiens
gtggaagcgcaggggtgcactctcagctcagtgcaccctccattccccgggtccaaacgattctcttgcctcagcctcctaagtagctggcactgggggtgcggcccaccaggcccagttaatatggggg

SEQ ID NO: 538016 - DNA, 126 bp, Homo sapiens
gattcggcacgtggcggaacgccgaggacccggctgaggcggcagagagcatcctggccagaccagccaagggccaggccgggaggagcacacggccaaccaccaggcagaggcggtacttgtccc

SEQ ID NO: 538017 - DNA, 165 bp, Homo sapiens
ggactggatgtcctacacgaaggggctgtgtggccatcgtgtcagcagagagagtctctgtacacggccccgtagaaccctgagagagtggtgtcatacgctaccggtgtgtggccaggctgcagagctgcttgccgtttgtgtccgagcaatctacgtgtggct

SEQ ID NO: 538018 - DNA, 258 bp, Homo sapiens
aggggggggggtttcccccccccccccccgttggttttccaaaggggccttaaatttttttagcctggggcgggcccccgggttgggttttttttaacggggaattaagccccttcccagctttccccccaaggtttcgggtttagggagggggccccccccttggggccctttttttttttttggggggtttgggcggccccccccctttttttttttcctttccccccgggggccttttcccttttgggtttttta

SEQ ID NO: 538019 - DNA, 136 bp, Homo sapiens
ggattagataccccactatgcttagccctaaacatcaacagttaaatagacaaaactgctcgccagaacacagcgagccacagcttaaaactcaaaggacctggcggtatttcatatccctctagaggaggtcgac

SEQ ID NO: 538020 - DNA, 713 bp, Homo sapiens
tcatggccaaaaattggacaattagtttcaaagcaggcactagctgcttgaccacatttttctaaagatgcgtggcaaaggtgtcaagtcagtgcaggtcttaccaatgtcttctcgcatcctcccagaggctttgcataaggtgctactgcacgggaggtctttgcaaggatatcttgtaaggtctggatccgatctacagaaaatgatgcatgggtgtgaggacttctgttgaaccatctcaaagcagtgccaaagtgtaaaatgattaaatgcggactacctagccttcgtcacgggctgatccagcagaaaatacatgctcacgttctgaaaaggagagccatatcgacaacctatctgcactcgctaagctagttgctttcgggccctatgcgacaacagagcgactaaaaatatgctatgaatgatttaacagcttatgtacataagttctacatgtctgccaatacgaagctccggtctgtcgaatagggtcaacattttgtttatacgagtcagtttctaagtgtttataacggctccttgagaaggctctcatcttggcgttacaattgtagaaagtcaatgaagatcgacagcttaatgtcgtgattttctttgtcgtttgggatatggaagcgtccggttcaaagagcatgattttcaagaatctctttgcctctctgccctgagcttctaataatatactt

SEQ ID NO: 538021 - DNA, 223 bp, Homo sapiens
  misc_feature (113)..(113): n is a, c, g, or t
  misc_feature (206)..(206): n is a, c, g, or t
gggtctattcaccctcttctctccattcccgggagcaagtccacatctggctgttggatgcatggcaaaagcaaaggtgtggagaaggttcagaggagacaggacatgtatanatggtagggtcaggttgtcatgggggaaactgaggcacaggaggcaagctgagttagtacaagaacagtctgaatcataacggcatgccagtnttacctaaaaggatgac

SEQ ID NO: 538022 - DNA, 373 bp, Homo sapiens
cagggctgggggaagggggacgcaggatcatcccctcagcctgtttggctaaaaatcaggcctggagtttgggtttgccccctccccggctccttggggctttttggtttcaggccagctggcgatgggtggctaaaattattaactccagccctgtggccccagttttgggagccttcaaccctgggtcattctgccatagtttccccggtgccctttccaaaggggttggtagtggcagaatggccatgccccggtgtgtttttagaccctttacaactgtttgtgttcaggccccccccagccccaaagcattgggcccaccaggcattcgagttaaaggattaaggggaataaagtcagttccacttga

SEQ ID NO: 538023 - DNA, 843 bp, Homo sapiens
  misc_feature (17)..(17): n is a, c, g, or t
  misc_feature (63)..(63): n is a, c, g, or t
  misc_feature (85)..(86): n is a, c, g, or t
  misc_feature (115)..(115): n is a, c, g, or t
  misc_feature (164)..(164): n is a, c, g, or t
  misc_feature (168)..(168): n is a, c, g, or t
  misc_feature (253)..(253): n is a, c, g, or t
  misc_feature (280)..(280): n is a, c, g, or t
  misc_feature (301)..(302): n is a, c, g, or t
  misc_feature (420)..(420): n is a, c, g, or t
  misc_feature (441)..(441): n is a, c, g, or t
  misc_feature (521)..(521): n is a, c, g, or t
  misc_feature (752)..(752): n is a, c, g, or t
  misc_feature (823)..(823): n is a, c, g, or t
ggtttcgaagcaggagnttgggcatgggctctgggggtaggagtgaagggcatgcgacccccntgtgcggggggaggggtagganntgagcgagcactcactgcaaagctaaggnaaagaatagagctggtgggagatgcctcccctcaccccaggggcatggnttgntgaggcccaggatacagaccaggagggtgtggtgtgatgggggtctggtctcagcctggagcggcgagcaggactctgggtgtanacatgggtgtggggtgaagaggggggnatgctgaagagggagcctgannagggtatgaggggggctttagcttggcatattccccctggccccagaacagctcccagaccatggtccccaatcctacacttggcccctctcttaagtgtgctacttcatggtggggntctctgctcatgttccttctnccactcttatcgcgcctcccactgtcagttcataacattcttagggccaagcccctgagtcccctgtcacactgactggngctgcagggaagggaggacagcaaggtgctagctgggagcctcccccagcaccaggaattccttgcacatctctcggacaatcatgcggtccatctggcactggggtgaggtctcctcctcattcaggatgcgtcgcagtatggcctgcaggtcgggtagccggtggcggtgctgcaggtagggtgtggtgcggactatagcatgcatcagggagaggtatccatgcgcanttgtctcctggtgacagtctgcgatgtgcgcacagtgatgtcaatgagagcatcatgtctgtgtggtaganatggagctgtggcgggctgc

SEQ ID NO: 538024 - DNA, 177 bp, Homo sapiens
ccacatgggtcctggacagagtgtcttagcatcactaagctttgcctggttattttctaaagaagcactgcatactgcaacgtgtttcgtcggtggatgagtgatgggaaagaatccgaagggcaagttagcgattccagaattttatcacgaggctacacagatttagataataca

SEQ ID NO: 538025 - DNA, 412 bp, Homo sapiens
tcagtcggtccctgcttactgggcgtatgtgcgtgccacggtgacatagtgggactctggtctcaagaaaaaaaaaaaaaaaagatttcagtagatttagtggtgttgggtgagagcctactttctagcctgttttttaaaggggcactccctattctcgttcataagtgtttggcctcatgacctaagcttacccccaggtaggcttcctacctgggcgttttgttgggaggataatgttggtaaaagtcacaatgaagcctttattgacgaaagcttgcgctttttaaccagcacaagtttgagcaaagggttaagtctccaaacctttttagacgtggataaggtacgcatcagtaacggccacctttgcgagatttcaggaggtctcatccccatcgcaggtcgagca

SEQ ID NO: 538026 - DNA, 212 bp, Homo sapiens
tagctcggcacccttaagaaggttaacaaatgcatgcggggattttcttgcctcaaatgaattgtttattctcatagcgtaggggagttctgcgatttgagtatcaagccaatcttccaattgattacgtaaagcgatatcttcgtcattcggcttaaaggaggtactgttatgaacattcattaagttacattctttaattaatacttttt

SEQ ID NO: 538027 - DNA, 225 bp, Homo sapiens
  misc_feature (200)..(200): n is a, c, g, or t
ggtatctacggactaagtgacctctatatctacatgactgtaatggtagtggaattatttgaatctacaccaagcacttaccatgtgccacgggctttgcagaggtgcgtccttactggaccacacagaaaaaggggttgttcctgccacattatagatgtggagcctaagggtcacagaaattgtgtgctattcgccanaaaacattgaactggtagatataga

SEQ ID NO: 538028 - DNA, 216 bp, Homo sapiens
agagagagaacaagaaaaagaaaaacaagaagaaaaaatccccagtaccccgtagaaaccccttaaagatgttaaaaaagagttaacgtatcagcaacacagatttaagtggaaattaaggaagaagagcaggtaaagtgttactgtacagacagtcagcagtgggaagcccaaaacgaggtgactcagaatccaaaaacagaaaattgcagcaga

SEQ ID NO: 538029 - DNA, 257 bp, Homo sapiens
attcgcggccgcgtcgacacagggtcttgttatgatgcccaagctggtctcaaactcctggactcaaacgatcctcccacttgagctcccaaaatggtgaaattacagacatatcctttttttttcttttgagacagtctcgctctgtcgcccaggctagagtgcagtggcacgatcttggctcactgcaagctccacctcccgggttcacaccattctcctgcctcgtcgacgcggccgcgaatttagtagtagta

SEQ ID NO: 538030 - DNA, 293 bp, Homo sapiens
ccccccccccccttttttttgggggggggcccccccgaaaaccccctttgggggttaaggggggggggtcccccctttttttttaggggccgggccccttttgggggcggggggttggttttttaggggggtgcccgggggtttttacccccccccttttggggggggcccggggggctttttttttttttggggggggggggggttttttttttttttttttggggggttttttttaaaaggggggggggggggggccccccccctttttaaaccctttttgccccttttta

SEQ ID NO: 538031 - DNA, 478 bp, Homo sapiens
  misc_feature (188)..(188): n is a, c, g, or t
  misc_feature (304)..(304): n is a, c, g, or t
  misc_feature (307)..(307): n is a, c, g, or t
aaagacttcctgggtttgacttaaaccttgtccacctcttgatattttaggattgaggaataagtcattaatctaaggactgattacagtggctggagcttgggcacttgtcttatcactggtcactgagtctgaaagtcccagctgaattcttgcccttaagtgcttttgctgctatttttttgccnccagttccacaagatccaaccaagaattctgtatcctgggacagtcagattcctctaaatcagggcagggaaggaggggaaaagaggtgagagaatggtatcccagatattcttcntcntgcccttttcccagagctctagacagatgttggctctgacttactcctagttaggaaagtgtggttatgaatgtttgtgtttctaatgtggtgggttataaggttgggttaaaaccctgccctcttggaattggtggattttttccaagtaaagtttttcttttcccgaaa

SEQ ID NO: 538032 - DNA, 876 bp, Homo sapiens
tcatgcgggcttcttgtattccgcgcgccggtgtgctggtccgcgatatctctccgtggcatatgccttcttgaggtctgaagagccgtcgttattttcgtggtggcggtctgtggcacgcgcggccttcgtgttctctggcgtgtcgcccctcgctggggccaatgcgcattcccctggggtgaggcctaggcgttcttccctctcccgtttctggggggcccgcttctccccacaaccgggctttgtgtccttgacccccccctagggcctcttgtgctcgtggagcaaccttgagcccgatgttgccgcccgcctttgacgcgcggggggtccctttcccccagtggcgagccccagtgcctcccagtaagttgagggcatccctctcccgctatggtctaccccaccacggcgcttatttccacagccctttttcggcccctggcgcgggacgtcttcctttaacacggcatactagcaggtacaccccttgtcccggtcactatgtctgtcacgcctctgattgcccctcgcgtgcgttccccgggcagtctcggccggctcgccccttttattatttcgggaaacgcaaaaggctcgtcgcccgacactccggtgtgcacgaaagttgccacccagcctttgtccgccaagatgatgttgtcctccccaaatacgcctcgttttgtctcttcaatgaagggcagctccccccccgtctgggcacgctttatattccatcttggtaggggtcacacaggcacccgttattactatgttgtcgccctgcaacattggaagtttgcggggaccccaggaactaatcccccgctgcaccgcaacccgggttttcaaacagaaccacacgtcgcc

SEQ ID NO: 538033 - DNA, 211 bp, Homo sapiens
ccgtcatagactgcgccggctatttttggtattttaacgtagagactggggttgtcaccttgctgagccaggatggtctcgatctcctgacctcatgatccaaccgcctcggcctcccaaagtgctgggattacaggcgtgagccaccgcgcccggactggtttgtgtcatttgaagcagaggatacccatgaagtcacaggtttgatgtg

SEQ ID NO: 538034 - DNA, 402 bp, Homo sapiens
gagtagtactcgacgtgctcagtgtcctgtgagggttcatgtataacgaaggtgagtataattcgacctccaatgtaaagagttcgtcaatttaaataggacggtcattgtgaactgtctgtgatctcatgtgcctttccatgacaacacactctcagggctgactggtttaccattatatcttctttacattcatgttctttatcagtaaaacgattacaatggtctattcagacttgagtgatgaatgacaaaacaacacagttccattctaaaatgtgaatggccgtggagctcagatccaaaaacgaactgcaatggttatgccagagaatagataacatccagcaacagaatcaaattctaaaattaagcaagaaaaagaagtagaaataacaggag

SEQ ID NO: 538035 - DNA, 288 bp, Homo sapiens
aaacttaaaacccaatctaagctggtaaagatagaaggataagctgggtgtgatgctcatgcccgtaatcccagcactttgggaggccaaggtgggtggattgcctgagctcaggagttcgagaccagcctgtgcaacatggcgaaacctcgtctctactaaaatacaaaaaattagctggatgttggcacatgcctgtagtcccagctactcagggaggctgaggcataagaattgcttgagcccaggaggtggaggttgcagtgagctgagatcccaccactgcac

SEQ ID NO: 538036 - DNA, 1361 bp, Homo sapiens
tggataccattgggctcctttttgggcaaaacagtcactgtccttgtaaagttttttaagttccaataaagtccatggtctttcaaaaaaaaaaaaaaaaaaaaaaaaaaaaaaaaaaaaaaaaaaaaaaaacaaaaaaaaaaaaaaaaaaaaaaaaaaaacaaaaaaaaaaaaaaaaaaaaaaaaaaaacaaaaaaaacaggagagagagagcagagcgacgagagggggcgggcgcagcgcgagacgagcacctagtgggctgcacccacacgaaggacggacacaaaggggtctttcttttgtgtgttttttcttgcgaagcagccacttagaaaaacatgagcagagtaatgataaaaaatagagaagtaaataagagatgagaatgataactaagctgacggcgaaaaaagagataattacacagagagagaagagtgtaagtatgaggtagagattataatagtaatgattgtatggtgtgcgatcacagaggtagagagacagatacgcagagaggaaggaaggagagggaggtataagcggaaggtaaggagagaaaagaatgagaagaaagcatgtggcagagtggatgataacagggggggaagagcaagaagaagcgaagaaggagcggagagagctgtaaaacgagagaacgaagagggaggacagcagagaagagaccaataacacaagaaaaagaaaaaacaagaaaggagagacaagaagaaggaaacgaacacagagaaaagaaaaagaagggagaccaaaggacagagcaaaaagagaaacaggaagagatgaaacaaaatacgagagcagacaagcagaagaagcatgaagaagagagcagggaaaagaaaaacgaaagacaggaacagagaaagacaggaaaaaagaggaaaaagcaaacaaaaaaaaaaaaacacaaagaaagaagaaaaagaaagagagaaaacaagagaaaagaagaagaacgcaacaaaaaaacaaagaaagcagaagacgcacagagaaaacaacacacgaaaatagaaaaaaaagaaagaacaagaaagtaataagaagaaaaagaggaagacgagagcaactaggagagagctgactaggactgagagggaggagacgggtagccagggtagagagcgcaaggaacagagtgcgagagggagcgtacagaggaagacaacgaggtgagcgagccagagcaccgacacgaaacgacaagcacaaaaaacgaacatcagacactaggtaacgaaacagacgaatgagaagataacaagacagaagaagggaagaaggagacgagagggagcaagaagaggaagcagtgaagagagtgagaggcagga

SEQ ID NO: 538037 - DNA, 169 bp, Homo sapiens
  misc_feature (41)..(42): n is a, c, g, or t
gttttgccacattggccaggctggtctcgaactcccgaccnngtgagccacctgccttggcctctcaaagtgctgggattacaggcgtgagcaccacgcccgacccatagctctttacaactgccttgtaaagaaagcatcatttggcactgttagtatttctcttgaa

SEQ ID NO: 538038 - DNA, 202 bp, Homo sapiens
tagccagggtcatactctgtcacccaggctgcagtgcagtggtgcaatcatgactcactgcagccttgacctcccaggctctagctattctcactccactgcctctgtaatcttttttcttttcttttctttttttctttccttctctttctttctctttctttcttctttctttcctttctttctttcttttctttctttt

SEQ ID NO: 538039 - DNA, 119 bp, Homo sapiens
ggtctgttacctgggggtcacccgaagtatagtcaaacctttacttgatggtcagtgcttccagcttgctgccgttgccatacacataacaaagcatgttacccaccaccagcggacgc

SEQ ID NO: 538040 - DNA, 456 bp, Homo sapiens
tcacgaagccacactacagaacataataattgaattgctatttaaaactcagtagtagagtttaaaaggacatagacagagaaacaaaaataagaatgattacagacttctctccagaaacaatgcaagtcagaagacagtagagtatcagcaaatgctgaaaggaaaaaaagtgaatgtagaattccattattaagtaaaagtatctttcaaaattgaaagtgaaataaaaacttttataaacaaaagctgagtgaataccttcctggacttcatgcaatgttaaggaagttcttcagggtgaacagaaatgataccaggaggaaatttgtatctgtacagagaaatgaagtggaccagaaatgatagctttgttagtaaatattaaagcctttgttttaaaatttcttttttattattttttgagattgtcttgctctgttgctcaggctggag

SEQ ID NO: 538041 - DNA, 435 bp, Homo sapiens
cgttgtgtggattgagcgtgatgctagatggcttctattgtatgatctccgtagtatgtctctgtacggtgtcgcctatgagaagactgacatttaagtccagtacactgtgagaggcagagccatcctcaatagcaatgggaccatccaatcgactgccagtagtgatagaacaaaacaggcagagaaaggagggatcgtagctggcctgctgagtcttctggtttccgtctttctcctgtggttcctcctgcctttggacgtcaagattccaggttcttcagcctttggcactcagtgatcttgcactggtggcctgcctttgtggctcctaggcctctggccacagggtgaaggttgcgctggtcaacttccctacttctgagcctttcggactagaactgagccactaccgtattctttcttcctcctgct

SEQ ID NO: 538042 - DNA, 328 bp, Homo sapiens
aaccttttttaattttttatttttttgaaactttgctttggggttggggccccctggcccccccctttggttgtgacagcctttccaggccgggggggggcagtttgttgtttttttaagtttccttcccccccccggcccccttttttgggaagggttttaagagggttgtttggggggccccccccccgcttttggggttaaaagggcctccccttttttggggtttttttggggccgattgggggaaaaaaaaatcaatagggcccctgttttttttttgaattttgccaagggttttttttaaataaaaaacccgtccccccca

SEQ ID NO: 538043 - DNA, 290 bp, Homo sapiens
gtatccagcccaggacagactactcagagcactggacagaatgtactctgggcgtggaagggccagccctttacttccatggagatgagatggtgtttggcgtgcgtcaggtggctggctgtgccgtgaatgtgtactcagcaggctgggcactcaggtgtcagagcacagaaggtggtagacacaccaatctgcatgcacagccttgcagcccatcaggccttggaggaagtcctaacttctctcagcacctctaagggatacagccaaaggagcgggcaagcttccat

SEQ ID NO: 538044 - DNA, 612 bp, Homo sapiens
  misc_feature (54)..(54): n is a, c, g, or t
  misc_feature (125)..(125): n is a, c, g, or t
ggatcccggatgtatcgccaacacccccatcatcacgattcttcttgccacaantcactaaatatctagtactaaactatctgtattggcagcacagttactcagatctgactcctgtctcttgngaagcagtttcaaataaatcaaggggcattgcgtggactgatggttgctttgagcccacaggagctccctttttgaattgtgtggagaaggtgtgttctgatgaggcattttactatgcctgttgatctatgggaaaatctaggcgaaagtaatggggaaagattagaaagaattagccaaccaggctacagttgatatttaaaaagatccatttaaaacaagctgatagtgtttcgttaagcagtacatcttgtgcatgcgaaaatgaattcacccctccccacctctttcttcaattaatggaaaactgttaagggaagctgatacagagagacaactcgctcctttccatcagctttataataaactgtttaacgtgaggtttcagtagctccttggttttgcctctttaaattatgacgtgcacaaaccttcttttcaatgcaatgcatctgaaagttttgatacttgtaacttttttttttg

SEQ ID NO: 538045 - DNA, 92 bp, Homo sapiens
tttaaactggaaattgtaaattccccccgaaaagttttttcatccagttcccctgaactaatactccaaaaaaagatggttttgggtgtcca

SEQ ID NO: 538046 - DNA, 433 bp, Homo sapiens
tgtgtatttttagtagagacagggcttcaccgtgttaggcaggatggtctcgatctcctgacctcgtgatccacctgcctcggcctcccaaagtgctagctaggattacaggcgtgacaactgcacccggccaagaattcttaaatataagacacaaaattgtataggaaatacaacttatattgagagagatgttctcatgctagagtgagacagtgataagcatcaatgtttttgttggctggttggttgtttttctgagacagagtcccgctctgctgcccaggctggagtgcagtggtgcaaatgtggttcactgcagcctcgacctcttgggcccaggcagtctcctgcctcagcctcccacgtacattggaatacaggtgttcatgaccatgctcatcaactttttgtagagacgggactcacttgt

SEQ ID NO: 538047 - DNA, 119 bp, Homo sapiens
ccttaacggggtaatgtgtccatatcgagggcggatcctctctgggcgtgagtgaccaagatgaagatgcagaggaccatggtgatccgccgagactatctgcactacatccgcctccg

SEQ ID NO: 538048 - DNA, 489 bp, Homo sapiens
  misc_feature (207)..(207): n is a, c, g, or t
  misc_feature (234)..(235): n is a, c, g, or t
ctccgcctgtgcctggaggaacgcgactggctgcctggcaaaaccctctttgagaacctgtgggcctcggtctatggcagccgcaagacgctgtttgtgctggcccacacggaccgggtcagtggtctcttgcgaccgagctatcctgctggcccagcagcgcctgctggaggaccgcaaggacgtcgtggtgctggtgatcctaangcctgacggccaagcctcccgactacnngatgcgctgaccagcgcctctgccgccagagtgtcctcctctggccccaccagcccagtggtcgcgcagcttctgaggccagcatgcatggccctgaccagggacaaccaccacttctataaccggaacttctgccagggaacccacggccgaatagccgtgagccggaatcctgcacggtgccacctccacacacacctaacatatgcctgcctgatctgaccaacacatgctcgccaccctcaccacacacc

SEQ ID NO: 538049 - DNA, 213 bp, Homo sapiens
gtcgcacccggatcacaaaagcggggttcccaggctaggggtctaatcagagctgtagccgccagcctacaccacagccacagcaacacggggatccgagccgcgtctgcaacctatataccacagctcacagcaatgccagatccttaacccgctgagcagggtcagggatcgaacctgcaacctcatggttcctagtcggccgcttttgtg

SEQ ID NO: 538050 - DNA, 807 bp, Homo sapiens
gttggggccctgggatggtgtcctgtccgtgccagtatgttcggggggtgaacgatgttgtgccgtaaagctggtttgcccccgcgcgcgttttgttgttgtgttgaagcattgtgtctattgctgagttgttgctgggcgtgggggcccggtggcatgattctcggcgtccgctgcaaccgtccgcctcctgggttccgcgattttccttcctccgcctcctgggtgtgactgggattacaggcacccgcccccatgccccggtatatttttgtatttttagtagagatgagggttcacccaaggtgcccggctgatctggattcctgccttccaagttgatctgcctgccttggcctcccccacaatgctaggattaccaggtgtgacccccggtgtccccagccctgacctgccttgtttatgcccccgcgattttaaaattaaaagtcccggccaacttatttacctccctagggcgttctcttgggaacaccaaggggagacccgccatcagtaggccccgattcctccgagccaccattggcttgagctggagagccgctgtccattctgtacgggcgatatttgtgctctatttgggggttcttcttatacgtgttcctataggacattgcagtttggaattacttgtccctggtatgtggcagaagtggttcccgctacttgggaggctgagatgggaggatcacttgagcctaggagtttacagggtaccgctgagctatgatcgcacccctggtactcccacctgggccaccaagagagggagagaccctttttcca

SEQ ID NO: 538051 - DNA, 913 bp, Homo sapiens
  misc_feature (559)..(559): n is a, c, g, or t
  misc_feature (848)..(848): n is a, c, g, or t
  misc_feature (851)..(851): n is a, c, g, or t
  misc_feature (855)..(855): n is a, c, g, or t
  misc_feature (859)..(859): n is a, c, g, or t
  misc_feature (863)..(863): n is a, c, g, or t
  misc_feature (866)..(866): n is a, c, g, or t
gtctgaaactcctgggctcaactgatcctcccgcctcagcctcccaaagtgctgggattactggagtgagccatcgggcctggcccagattttgcatagtaaaacagtgaaacagatagagttgtatttaaggtcagtattctaggcctcccttcaactgcagtcataccatcatagaagatagttctatgtcatcctgttatctggacattataataaacaacaagccctctatacacaggttccaaaccccgttatctagacattatcaacaacaagccctctctctatacagagtttccaaattctgaagctgatagcgcacttggtctcactgagcctccctccccgccctcctgctgctcctcagacatctgggcctgcagacacattgcagttacagcacatacacttctagctcggaaaagcctagtttcttgtatttctttcaggtaactgccagtttctgtggctgaatttaagcacttacagcatcttcctagctgggtgtggtggctcacacctgtaatctcagcactttgggaggctgaggcgggcngatcacctggggttgggagtttgagaccagcctgaccaacatggagaaaccccgtctctgctaaaaatacaaaattagctgggcgtggtggtgcatgcctgtaatcccagctgctcgggaggctgaggcaggagaattgcttgaacccaggaggcggaggttgtggtgagccaagatcgtgccattgcacccagctgggcaacaaagcgaaatccatctcaaaaagaaacgcgcccattcgtcacaaaggctttttctcatgatggtgggggaaaggccaggtccacgnagngctntcanttanaanttctccccttgaacctagtggagactgggccgctcgacaatatgggg

SEQ ID NO: 538052 - DNA, 106 bp, Homo sapiens
cattgagagtgcaacgttatgcgtgtgtgtgcgagtactatattcacgtgtgtgtgagtacaatgtagtggtgtgggtctggtcacatgtatctttgctttgtgca

SEQ ID NO: 538053 - DNA, 150 bp, Homo sapiens
gagagaaagccggagagatctaaaagcgacaccctagcatcacgattaaaagaactagagaagcaagaggaaaaaatcttaaaattacactagggaggaggaaaatgtgagagtggcggtggtgttgtcggacatggcgcgatgagggga

SEQ ID NO: 538054 - DNA, 1355 bp, Homo sapiens
  misc_feature (559)..(559): n is a, c, g, or t
gtctgaaactcctgggctcaactgatcctcccgcctcagcctcccaaagtgctgggattactggagtgagccatcgggcctggcccagattttgcatagtaaaacagtgaaacagatagagttgtatttaaggtcagtattctaggcctcccttcaactgcagtcataccatcatagaagatagttctatgtcatcctgttatctggacattataataaacaacaagccctctatacacaggttccaaaccccgttatctagacattatcaacaacaagccctctctctatacagagtttccaaattctgaagctgatagcgcacttggtctcactgagcctccctccccgccctcctgctgctcctcagacatctgggcctgcagacacattgcagttacagcacatacacttctagctcggaaaagcctagtttcttgtatttctttcaggtaactgccagtttctgtggctgaatttaagcacttacagcatcttcctagctgggtgtggtggctcacacctgtaatctcagcactttgggaggctgaggcgggcngatcacctggggttgggagtttgagaccagcctgaccaacatggagaaaccccgtctctgctaaaaatacaaaattagctgggcgtggtggtgcatgcctgtaatcccagctgctcgggaggctgaggcaggagaattgcttgaacccaggaggcggaggttgtggtgagccaagatcgtgccattgcaccccagcctgggcaacaaaagcgaaattccatctcaaaaaaagaaaacgcgccccatctcgctccaccacaagcgcctttatatactcaatgatgggtggaggaaaagggcccaagggctcacaccgcacaggagcctttactcaagtttcagctagttttccttcccctgcattttgaactccttttagttgttggtgatatcctttggtgttcactgcctttgtaaaacaagtaaataaagtaagcggaagatatctcttttgtttctgtagttgttaactgttctggattttctttacaatgcatccatttgggcataatgttatccctctttttatcaggtaaatgtagcatctaaaagtagctttggatcaaatcatgttgaatacctggtcaaagtaatgttttcttccttgttcttgcagagaaacaaattcatcagaacattaccacttgaccaggtttaaaattgtataacaggctgggcatggtggctcatgcctatagtcccagcactttgggaggccgaggcaggaggatcacttgagcccaggggtttgagagcagcctgggcaacatagcaagaccctgtctcccaaaaatta

SEQ ID NO: 538055 - DNA, 1278 bp, Homo sapiens
  misc_feature (559)..(559): n is a, c, g, or t
  misc_feature (1226)..(1226): n is a, c, g, or t
  misc_feature (1251)..(1251): n is a, c, g, or t
gtctgaaactcctgggctcaactgatcctcccgcctcagcctcccaaagtgctgggattactggagtgagccatcgggcctggcccagattttgcatagtaaaacagtgaaacagatagagttgtatttaaggtcagtattctaggcctcccttcaactgcagtcataccatcatagaagatagttctatgtcatcctgttatctggacattataataaacaacaagccctctatacacaggttccaaaccccgttatctagacattatcaacaacaagccctctctctatacagagtttccaaattctgaagctgatagcgcacttggtctcactgagcctccctccccgccctcctgctgctcctcagacatctgggcctgcagacacattgcagttacagcacatacacttctagctcggaaaagcctagtttcttgtatttctttcaggtaactgccagtttctgtggctgaatttaagcacttacagcatcttcctagctgggtgtggtggctcacacctgtaatctcagcactttgggaggctgaggcgggcngatcacctggggttgggagtttgagaccagcctgaccaacatggagaaaccccgtctctgctaaaaatacaaaattagctgggcgtggtggtgcatgcctgtaatcccagctgctcgggaggctgaggcaggagaattgcttgaacccaggaggcggaggttgtggtgagccaagatcgtgccattgcaccccagcctgggcaacaaaagcgaaattccatctcaaaaaaagaaaacgcgccccatctcgctccaccacaagcgcctttatatactcaatgatgggtggaggaaaagggcccaagggctcacaccgcacaggagcctttactcaagtttcagctagttttccttcccctgcattttgaactccttttagttgttggtgatatcctttggtgttcactgcctttgtaaaacaagtaaataaagtaagcggaagatatctcttttgtttctgtagttgttaactgttctggattttctttacaatgcatccatttgggcataatgttatccctctttttatcaggtaaatgtagcatctaaaagtagctttggatcaaatcatgttgaatacctggtcaaagtaatgttttcttccttgttcttgcagagaaacaaattcatcagaacattaccacttgaccaggtttaaaattgtttnatcccaagatgctgggattacaggngtggagccacttgtgccccggcccccc

SEQ ID NO: 538056 - DNA, 747 bp, Homo sapiens
cacattcagtagagctggggtaaggcctaggaatctgcattttcaacaaccattgcacatgtttttgtttttgctgaggcaggagaattgcttgaacccaggaggcggaggttgtggtgagccaagatcgtgccattgcaccccagcctgggcaacaaaagcgaaattccatctcaaaaaaagaaaacgcgccccatctcgctccaccacaagcgcctttatatactcaatgatgggtggaggaaaagggcccaagggctcacaccgcacaggagcctttactcaagtttcagctagttttccttcccctgcattttgaactccttttagttgttggtgatatcctttggtgttcactgcctttgtaaaacaagtaaataaagtaagcggaagatatctcttttgtttctgtagttgttaactgttctggattttctttacaatgcatccatttgggcataatgttatccctctttttatcaggtaaatgtagcatctaaaagtagctttggatcaaatcatgttgaatacctggtcaaagtaatgttttcttccttgttcttgcagagaaacaaattcatcagaacattaccacttgaccaggtttaaaattgtataacaggctgggcatggtggctcatgcctatagtcccagcactttgggaggccgaggcaggaggatcacttgagcccaggggtttgagagcagcctgggcaacatagcaagaccctgtctcccaaaaatta

SEQ ID NO: 538057 - DNA, 275 bp, Homo sapiens
cttttcctgcaactagatggtcccatctgggggtgatgggagacaatgacagttcatcaggcattagattctcctaaggacagagcaagatagatcccttgcatgcacagttcacaatagggttcgtgctcacatgagaatctaatgttgccactgatctgacagaaggcagagatcaggtggtaatgtgaggagcggctgtaaatacagatgaagcttcgctcacccacccttactcacctcctgttgtgtggctcagtacaggcctgtgaccc

SEQ ID NO: 538058 - DNA, 895 bp, Homo sapiens
agtttgagttctgtgttctccccgcccgtgtccgtccgacccgtgcacgcgatgctggcgctgcgctgggctcccgctggactcggctgctctccgtcccggctccgtgccgtggcctcccgggccggcctgcgagaggggctccgggaccgtctcttcgctcctcctcggggaacccgctacgatgtacctggacgtggacgccaacgggaagcccgcatcggccgcgtggtgctggagctgaaggcagatgtcgtcccaaagacagttgagaacttcaggagccctgtgcatggtgagaagggcttcggcttacaaatggctccaccttccacagggtgatcccttccttcattgtgccaggccggggcgatttcaccaaccacaatggcacaggcgggaagtccatctacggaagccggtttcctgacgagaactttacactgaagcacgtggggccaggtgtccctgtccatggctaatgctgttctaaacaccaacggtcccagtttcttcatctgcaccataaagaccggactgctttggatggcaagcatgttgtgttcggtcgacgtcaaagagggcatggacgtcgtgaacgaaaatagaactctttgcgggtctacagagtgggaggacatcccaagaaagacttgtcatcaccagaactgtggggcagttgagcttaatctgtgtggccccgggtgttggtcattggtgggacggttgcaatgttcactggcccacagtgtgccgttggggttgttcaccaaggtgctgaagcgaacctggtgaccctccacgtcacaatggcttaagacgtttaggagagttaaaccggcgcaccccacatgtttttataaatacctttccacaccactttggggtttgacac

SEQ ID NO: 538059 - DNA, 139 bp, Homo sapiens
ggtgataggatgaaggggaaataccagagacagttataagtgtctcccaagacagcagtgggtgatgcgcacatggcgcaaacaggctgacttcaatgagtgttcacgggatgtgtgataaagcccagctgtacaattc

SEQ ID NO: 538060 - DNA, 405 bp, Homo sapiens
gcccactcacctttttagtgggctcctgacctgccggccagaaattgccactgggaaacctggacccctactgaatggatctgctggcacctagacctcagagaagggggaactgaagactgatgtctgaccacggttctttgttgaaaatttctttctcaggggcttggagggatcacatctacaatcctgagctaatattctcttctgctgtccccaaaatttaaacgaagcttctcttaacccattgcaaatgagaaaaatctttgaatctacctatgactataagcccttatttcaagatatcctgcctttttaggccaaaaccaaagtgtaacctccatctattgatttacaattttgcctgtaactttggctttcctgaaatttaccccagccttaaaa

SEQ ID NO: 538061 - DNA, 346 bp, Homo sapiens
  misc_feature (9)..(9): n is a, c, g, or t
  misc_feature (85)..(85): n is a, c, g, or t
  misc_feature (196)..(197): n is a, c, g, or t
  misc_feature (301)..(301): n is a, c, g, or t
attcggcanaggcctctccctcccttcctcaggcatcagagcggagacttcagggagaccagagcccagcttgcctggcaagtgncctgtcttcctgacgaaccccttctcatactggccctgctggcatgggttgctctggctgaccaagagtcatgcaagggccgctgcactgagggcttcaacgtggacaagnngtgccagtgtgacgagctctgctcttactaccagagctgctgcacagactatacggctgagtgcaagccccaagtgactcgcggggatgtgttcactatgccgnaggatggagtacacggtatatgaacgactgggcgaggagaaaaac

SEQ ID NO: 538062 - DNA, 180 bp, Homo sapiens
gtgatctagaggtatccccttatgttctgacccactatcacaaaatcacatctttgagcaatggtctatagcttccactttgggtaaagctccaccttccacgaagaaatgaatacgtcttaaagcactctgccttctctgagaacccagttctgcagtagtcgtgacaagatgacttcc

SEQ ID NO: 538063 - DNA, 329 bp, Homo sapiens
  misc_feature (108)..(108): n is a, c, g, or t
cccaagcttcaggtggctcagtacagagagagaaactttggtttggggaacaagagtctgcccggtaatccagtgaactctttcagatcttatccaagaccacaaggntgatacctctatgagtctgcaagaaccatagcattactgggcttggggtgcctctaatgtagatatggctcagatcacaacacacaagtcccttcgaatacctgaaaagccttcccaagaacaggtacaaacaagcccaaactggaaagactatgaggaatacctaattgttcaatgcccagacaccagtgagcatccacaaacatgaagaccatccaaaa

SEQ ID NO: 538064 - DNA, 127 bp, Homo sapiens
acttatacgatccgttagtgaataatcacccactggctggccctctagcacaccttgtacacagccagtagcaagggaaacttgtctaccaggcccttgtgcttggaggatgctgtatagctcccgg

SEQ ID NO: 538065 - DNA, 141 bp, Homo sapiens
ttggctgggtgtggtggcttacactgtactccacgcctgtgggcggctgccgtgggcggatcacttgcaggccggagttcacgcacagcctgggcaacctagaccctgtctctctagaaaaatcctcctactcaggtgtgt

SEQ ID NO: 538066 - DNA, 270 bp, Homo sapiens
gtcaaattgaagccagtgcttatttaccatttcaaaaatttttagggcccttaagggttattctaaatctgctatgcctgcgttctctgtaaatggaaaagaaagactggataacagcacatcggtttatagcatggtttactgaatgttttaagcccgctgttgagacctactgctcagaaaagggtcttataaaatatattactgctcattggcaggcatctggttatccagagctctgatagagttcatcagagagatgaatgtgtt

SEQ ID NO: 538067 - DNA, 106 bp, Homo sapiens
gtagtgcaggtagaggcttactagaagtgtgaaaacgtaggctggattacggcgacagcgatattctcggatagtcagtagaattagaatagtgaagatgataagt

SEQ ID NO: 538068 - DNA, 137 bp, Homo sapiens
  misc_feature (5)..(5): n is a, c, g, or t
gaagnggaaggcgacgtctgagcccggatcctgcccaaccacatagttcacgaagaaccgcttcatgtgctcgctgggcactccttgtatgtaaacagacgttcccacgttgagcccgcccgggatgggctggtagt

SEQ ID NO: 538069 - DNA, 571 bp, Homo sapiens
aataattaattaaattttttttaaaatatataaataaatacatatctaaacttaaaatataaaataaaaaacaatacaacacaatatctcgaaaaaaatttattaaaatcaaaaataccactatccccccacccacaaacccaatcttttttgaaacaaatacattaaaaccacaataaacacctacattttacacaccaacacaataaataaaccgaatataacgtataaataataaacataaattaacaccctctaacatctcaatacactccaacttcaatactcaacattaaataaactaatacatacaacctcaacatctcacaaaaaacccactacaacaacacaaatcccctccataacaccaccccattcacctccatcccttataaaccatcttaataaccaaatcatccatacacaacaaacacactaaaacttcaataattttaaacaaactaacataaaaatccaaaatactctatacacacaacccttaaactcaatatatataactacacaccatactaaacgcaaaaaaattataccacaaacacctcaaacaacc

SEQ ID NO: 538070 - DNA, 1613 bp, Homo sapiens
  misc_feature (442)..(442): n is a, c, g, or t
  misc_feature (1149)..(1149): n is a, c, g, or t
cagtggccgagtgtctgtagtcgtacgtgtgctagcgttgtgctcgcagtgtgttgtgtgctgacgttggttgagtatctgtcgtgtagtatggtgagctggtcgttgtactcgtcgctgttgtcgctcgctcgctatacgttgtagtaggtgcgctcggcaataacataccccgtttgggttgtcaaaacacaccccgccgtttggggcgcacccctattggagccgctccggagggagtccgcaccccaacgtgtgtggccacacagaaccgcgccgggctttgttttttaactccgcgcgccgcgccggtatcctctattacctcggtgtctcttaatggggtactcgaaggtcccttgggggtggccgaaaatttcgtgcatccgtagtgtctggtgtgctgccggcccgggcgcccaaggtggcgcaacgagcgcgngattattctcccagagaaggatggggtaaatgtttttgtccgcccctgtgttgggcgattacgtttctcaaaagacgttgtgttcccttgggagaattggaagcgtttttctttgataccttccgcggggagaaccgttggtcctggagaagaaattggcgctgaccttgcgttcgggaatgttttgaaaggagtgtccggaaggtgtttcccccgcccacctccccgggtccccggactactgcgccgtgtgattccgtgttagtcgcccccccaggacccacccacgagaatggttttctctgggttgaagaaatgggggccccccgcgattttttcgcgggaatacttgagactcgcctcgtattactttccacgcaaagaaggttttttgggcctttttcccagaaaggcgccacgctgtatagaagcctctttaatgcctcgtaaaaaacgtgggggccaccctatgaggggtttctcgtggggggccacattggcgccccgcgcccgaggttcttctggctgcttaccccagctccctataggacagggcctcttcctcgtgtcccgaagggccctcgcctaattggctgttgcccttccggtttcacatccactggaagaatctgggggccccacaggcctttgcgacggtttttcggctgcttctcgcggaataacttccgcagcggaccacgagcggnctataattccctcgaacagtcttgttggaattggccctcgagtcgagtccaccacccgcgaggacccctgtcttaactatctatcctggtgacacctttctggtgccccaccctgtttgctcacgaccacgggttttctgtggcactaccacaggtgaaagagtcacatgctgtccctcgggagcacccacactcggctataagagattggcacctataagaaacgccctcgcccgagccaccctgaggcacttgtggaaaccccacaagaatgaagatatctgcccacccaccccccactcctcacgaaccacagaaagggtgggaaagccacgagagccccccgccacagccccacagacccgtcccccccagcatatacccgggtctccctggccaccgtattctggaatttggatttgtctcctttaaagaccctttattcaattttgtaccaagaccca

SEQ ID NO: 538071 - DNA, 117 bp, Homo sapiens
tgtacccggagtagtatgtacaatatgggagattatcgaagcctggtaggataagaatataaacttcaggtgaccgaaaaatcagaataggtgttggtatagaatggggtctcctcc

SEQ ID NO: 538072 - DNA, 131 bp, Homo sapiens
aatggctttttcccaccccccgcccccccccggtggttttttctgttttgtggctgtgtttagtgccccccccgcttttgggctttcctttggggcaaagaaaactgccccattaaaaacagcctctggga

SEQ ID NO: 538073 - DNA, 649 bp, Homo sapiens
  misc_feature (340)..(340): n is a, c, g, or t
atccaagaagcgtgtgaaaatcatttccagacacgcacaggatggtggttccagtagacaaaggcatcgatttccaagaatttatctttcggaggtggattatttgatgacatgtatgaatgatatggagaaaatgttttcttatatagtggtttgactctatccaatcagtatactagtagagactgaaaatagatttcatggatctagcaaggactgcaggaatgtcactcaacgaagaggaaatatggttactaatacactgagctgttgcaggactagtagttgcttattctattgcgtcagctaatagtctcaacgtggttgatctcttcctcanttatctttgaatgctaagacatatattgctgtgatactatatttgagcaagtgcatgaatttcaactttgagaggaatttgagtagtaggcctattaagaatattatttagacggcgtttcatttcacttgggaggaaaattcacctattgatacgatgtagcataaacggcaaatttattcccaatgcattcaggaccggtcctctataaacaaggcgctgtaccttctggcctagggctataactctaccgtgcctgggggctcacataattatcaccagtatcgatttaccaacgaaagtatggag

SEQ ID NO: 538074 - DNA, 296 bp, Homo sapiens
agccgcatggccggtgaagagagagaaaaagggcttttgtctgcagttaggaatttaggtgagcgaatactgtcctagacagttgggagggacaggctgatggacagaagagagaaattcctttcaatgacaaccaagctgaactattcgataccagcagaactgggttctttagggattaagccaagacaaagacttgggaatcactcactccgaggatgaagtatgggttaatggctgaggagacagtcaaaggaatagagaggcctggctttgagggcctcttcaccggccat

SEQ ID NO: 538075 - DNA, 317 bp, Homo sapiens
aggtcggtggatcacttgagctggggagttcgggaccagcctggacaacatagcaaaacctcgtctctacaaagaaataagaaattagctgagtgtgggggtgcatgcctgtagtcccagctactcggcagactgaggcaggagaactgcttgagcctaggaggtcaaggttgcagcagctgtgaccgtgcatgccactgcactccagcccgggtggggaaaaagaaaaaaagaaagagataagatgaggaaaatataacccctatctattactttttctgaattcaaggattctgaattatatctttagactaaga

SEQ ID NO: 538076 - DNA, 106 bp, Homo sapiens
gcgagtaagctcgactgaatcacagtcaatgtcgagccgtaacgtgatggcgatcacactctaccaagaccggtgcaaggtatcctggtactcttgtcagactctc

SEQ ID NO: 538077 - DNA, 129 bp, Homo sapiens
ctgatggaggagctaggggggtggaggggccggatgggaagagcaaaggagaagggagcttggttcttggccgtggcatttccgtggacatgcctgcgtcagggtggcttggggctggcacggggtgtc

SEQ ID NO: 538078 - DNA, 117 bp, Homo sapiens
ggatttgctggtgcagtacaactaggcttaatagggacatgtagaataaactcaaagacattcatacccagatgcatcataatgaaattgtcaaaagccaaagtttcaaaagcaaaa

SEQ ID NO: 538079 - DNA, 193 bp, Homo sapiens
gactgctatcaggatccccactgtctctcctatcctgtaaacctactgtgacgccttacagtggtcctccatgttagtgcgttgacgaacgtggtgactcgtaaaaaccctagcgattatcacagtttgtcccaggcttgcagatgttagaagctttttctttaaataaggcacaggatacttgcagttgtta

SEQ ID NO: 538080 - DNA, 604 bp, Homo sapiens
ggttgtactggtatcctatgagacatttccacctacctctggtgccacaggcacctcaaggtcggtatatcagattcattcttggaaccgcccttctatgccgggttaatattatacttttcccatacagccagtcagcaaaccagatgcctgagcggctccctcaatcccccaccctacccaggcatccaggggcttattttattttattttattttattttattttggagacagagtctctcttggtcacccaggcgggagtgcaagggcgtgagctcagctcacggcaacctcggcctcccaggttcaagccattctccggcctcagcctcccaagaagcggggtctacgggtgcgtgccaccaggccgggccaatttttttggtattttaagtagagacagggtttggccaggtgggccaggtgggtcttgaactcctgacctaagatgacctggctgacttagcctcccaaagggtggggattacagacatgagccactgagcctggccacgttcgtggcttttgaattgcaaccattgaaatagatcttgattccgctgtgacctctagcttctttatcttcaatggcgcccatcctt

SEQ ID NO: 538081 - DNA, 236 bp, Homo sapiens
ccccggaaagtgaatactgtgtatagggtgcatggaacgaggtctttagtctctgtcacaaacaagaatattctagtttcatgaatatcccactggccttgccctgcatctcctcttgtgctcttccaatttccaaggatgtacctacttggtggaaggagggtatgtgggaaatacaacagcccctctgtatctctttctacccgacattcacttagcaggatggatttaagaac

SEQ ID NO: 538082 - DNA, 216 bp, Homo sapiens
gtcaccaagaccgaggccaaactgggcaccttccccagggccctcaagaagctcctgcacacaataaacgcgccctcgttctttagcaagtctgctccctcgaggccacagcaagccggctacggagcccccgttctgttttgagccgaagactactttattggatgcggtgaaaggcctcagctctgacactctgatcactgtgacaaggggccc

SEQ ID NO: 538083 - DNA, 132 bp, Homo sapiens
ctcgtgccgtttttgggccacgttgggggtactcgtagtacttcttggaggccgcctcaggtctaaataggcctttttccaccccggccagggtatgccttatctaaggtcctaccccaattctcccatttt

SEQ ID NO: 538084 - DNA, 210 bp, Homo sapiens
  misc_feature (160)..(160): n is a, c, g, or t
  misc_feature (202)..(202): n is a, c, g, or t
gtcgcctctacacggactccccgacacgggtgactgcggttgacggactctgactagactgcctcgggtgtggactctccccgggtaccgggtgactgcgggacccggactctacgaccacgcgactagtggaccccggactctacgacaaccgactgtnctacgactccggttcccggactcaccccggagtacccgacgnctcgacac

SEQ ID NO: 538085 - DNA, 871 bp, Homo sapiens
agcggatcatgagttcaagaaccagcctgactaacatgctgaaaccccatgtctactaaagatagaaaaattagctggacatggtggcaggcacctgtaatcccagctactcggaaggctgaggaaggagaatcacttgaacctagtaggcagaggttgcagtgagccgagatcacgccattgcattctagcctgggcaacgagagcgaaactctgtctcaaaaaaaaaaaaaaaaaaaaaaaaaaaaaaaaaaaaaaagtattccttgtggttttttaaaacccaaaccccctttaagggtgtttgtggggccccacagggggaattggggaatagaaacgcgccattttttggtgggagaaaccctggggtgtgtcccttttttcaaacaacctttttaacaacaagaacgtgttgggaacggggcgggcgctcttcccatttagaagggagatttgcgtagaccagaccccaaggcgtcctcaagaaccgacgcgaagaaacggcgtgggtcccaccgtattaatacccgcatttagtattcattattgggcggccccctgtgtaaatctccccgggtaatgtgggccccatctttagacaattccagttaagtgactccgtggcgtgaaacactgtgccctaatgtgtgcggcctggcaaaaaaaccccgctcgtaagggggggctttactctctttctcccacacaacagaagacgaattcttttttgacaacaccgtgctgcgctgtccacggggggtttaatgtcgacgaacacaagaaccccccgacggggcgccgccaaaaataatccttctttataaggccaaaatgtcaaactgttatgcgacgggcccagaaaattggt

SEQ ID NO: 538086 - DNA, 738 bp, Homo sapiens
tttctagctgcaggcagagcagagttgagcgtgtgggagtcgaaggagatcgagatggctactgcatatgctcctccgatggcaagccaggtgatgaagagcggcttggtgtgctccaagccgaggggactgtccggcgcttcactcaccaggaggccccgcttcgtcgtcaaggccgtcaagtccgacaaggggacgtaccaggtggtccagcccatcaacggcgacccattcatcggcagcctggagacgcccgtcacgtccagccccctcgtcgcgtggtacctctccaaccttcccgcgtaccgcaccgccgtcagcccgctcctccgtggcatcgaggtcggcctcgcccacggctacctcctcgtcggccccttcgcgctcaccggcccgctccgcaacacgccaattcacggccaggcgggaaccctcggcgccatcggcctcgtctccatcctcagcgtctgcctcaccatgtacggcgtcgcctccttcaacgagggcgcgccctccaccgcgcccgccctcacgctcaccggccgcaagaaggaggccgacaagctgcagaccgccgaaggctggtcccagttcaccggaggcttcttcttcggcggcgtctccggcgccatctgggcctacttcctcctctacgtgctcgacctcccatacttcttcaagtagattatctattattggcatgcatgtacgatgggtgcacaactgcagatgatgtga

SEQ ID NO: 538087 - DNA, 253 bp, Homo sapiens
tccctagagacgtgttgcataatggttgtcctggtccatcagaagcactccatacgtgatattgtcctatactcccttacaaatttaccaagagctgtggcctatctctacaacttgttcctactattacaccttcactctcagctccagtttgctgtcccctgaacttacctcatttcagtgcctttacacctgtttcttcacctagaaagttcttccttatttctgctcaccattgcaacacggtctctca

SEQ ID NO: 538088 - DNA, 152 bp, Homo sapiens
aggatctccctctaaacatatcccgtgagatgttgcaacaaagcaaaattttgaaagttatcaggagaatttagtcaaaatatagcttagaactctttactgaactaggcggagataaagagaactacaggtattctatgagcagtctctaa

SEQ ID NO: 538089 - DNA, 236 bp, Homo sapiens
cctcccaagtcgctgggactacaggcactgccaccatgcccggctaattttgtatttttaaagatggggtttagagatggggtttcactgtgttgcccaggctggtcttgaactccgggttgcaagcaatcttcctgtcttagcctccccaaatgttgggattataggcatgagccactgcaccgggccaactctcagctttggagtttcagtatgaactttggaaactcatagca

SEQ ID NO: 538090 - DNA, 1567 bp, Homo sapiens
ggaagaaaatagggatcaacctctacagttcatactgtcttccgagacatccggatagcgtagctatctgaatgggttaggacttccaccatctgcctgcagtcgctaggtgatctctatcggtctggggaagaggtggatgataaacaatctatgtagtcagcagtgcgtaatgaccttcaacactagtaggtcttcgctggatgtcagttattatgctgatgatcctgatggacttggcaaatagggagcgaagttacaaaaaactccctatcaaagtctatggcgcataatagtgattgttcgacatataatggggactgcatatatttgtctagtggaggaagatgacagatgaccaaaagtgtgctagacagggttgttctatcatatgcaatcccgcgaatacacaacggagagttgtgaaggatctgggctccaattgaaaagttcctcgttccatgtttggacgtagtcgatgtgccataaacggggacattgtgattgcaggaggtgtcctgaagatggtctgtcagctgtcagtttgaagctttcgacttacataaataaatggggatgtaagtgggcgcattgcccccatgaaagaagtccagccagggatggtcaggctggctggatccctgtttgccctttgtgggttcggccttcatacactggggtctttagccatttgggcccctggagtcccgcactatgggcgggtgcgcaatttcaacaagaaaagggcgcgggtgggcggcgaacaaataggtgcccgagaattcggcggcacggataaactctgcagaagcgtggacggcaccaacaggaggcgggggagagagggaactatacttgtgcagcgacacaacattacggtgagtcctgtctttcgtttattcatttgtcgattagtttatgctccgcaccacgaccacgaaaccaacaccgacatcacagacgcgatctacgactccaaaacacccacccaccgacgcaacaacgaaccaatgagggagaaaggaggaccaggaagcagcgagacagcagcaccgagagaagacggagagcagcgcgagagacgaagagcaggacacagacgacaagacgacggaggaccaacgagcagaggacgcagggcacggacgaggaccgcagacagagcagaagcgagagccgaggcagcaggccgagagacgcgcaaagacggagcgcagcgcaagcgaccagagcccacgaacgaccaggagcaacaccgccgaaggagcaaacgacggaacacggagcacccggcgagaccaggggacgtagaaagacacgcaaacaacaacgcaagaggcagagggcagcacgacaaccagaagaacgcaagcaccagacgagcacagaagaagacaccataacaacgcgccagcaggcaagcacaagcacacgacaaaacaccaaggacaaaacaggacagaacaccaaggaagaaaagaggagaggaagaagacaaaggaagcgagacaaaaaaaccaagagaacaaagaacgagcagaaagacaagaaacaacccgagaccgct

SEQ ID NO: 538091 - DNA, 892 bp, Homo sapiens
tggggggcgacgtggcggcggatatacgttgcaaccctgtcgttttgcatatttcggggaatcttatatagtggggttaccccatgggtggaccacacagttgtgtgttcgtacacggtgtttcgccgctgcaatcttgtttcccgcggctccggtgttgttcccccccccgtggcattttcagttggtccctcgggtcggccggagcttcggcctttcgtcccaaccggcacgtcggcggttttggttcccactctcgccgatgtttgtgttagcccgaaaggtgttggcgtttggccccctcttcgcgttttctttcagcatagggggcttctgtgccctcccacagtgggtggttgccccaggcgtgcccccttatttgtctcggacaattaccctgttgtcggacttctacccctcggagcgcgtctgtgctagtactattgtcatccggggctgaatgttgacttgtttctagtcgccaccacagtgtttcgtcgcgtttcccgaagttacgccggaatctctatgggggcagcccgcctgctaggcaagagccaccctcataactgcttccatgcacgtttggccacttcattttttcttagcacacggcacctacgaattgtgaaataatcgaatggagagattggtagacgccactctgctaatatagctgcgtaatatctcttcgtactattgaaataacgccccctcactatcgctcggggtgcacaacaatgggaggtgtcgccccccctcttcgcaccacttctgtgcggcagccccgtataaactattgtaatcccttcaaccccatgcaagggagggaggagacccccccacgctgggggtacaccaacccacgcgctccaaacctttccacataaca

SEQ ID NO: 538092 - DNA, 164 bp, Homo sapiens
caatatatttcgcaagctcatgtccacatcatttcacatagcaacaggaaataaagttgtatgtgctttgaaaccagccaaatcctttgtacaacacctctcttctccttctatgtttatgaatagagttcgtggcatattgccatagtgcacaatcatgactt

SEQ ID NO: 538093 - DNA, 609 bp, Homo sapiens
agtaagctattaggcgcgcaaagtaaatttggtcgcatcaatatcggataagtagtagcacgcccagcccagggaaagaggggaagcaatttcgtatgaatcgaaaacgtctaaatattctcccatagaaagaagaaagacctgtggtcacaaaatagttgaaactttattaagagtgttagatagtatcgtgatcggaccagtctccatatataaaggcacagctttatgacagcagtatcaggctgatctctaaaccatatatgcatcgttccgggttcagttaaagtgtatgcactacagcagagcactctcttctccgggcagggcgtggtacatttagcacccacctcttagagcaaaatttcacacagaattgcatcaatccagactgaagaccgcagtttctgtcactgctgtagccattcagcacaacgcaggttaaaggaatcgtcactgacagggtttgtaaacaagtcataccacaggtgtacacttccatgacaaacaagcattgcaccagtgggtaacatcagtgactgcatatgattccatggccgataaacaactctgtcagtcagtcgagaataatacatcagcacacctcat

SEQ ID NO: 538094 - DNA, 134 bp, Homo sapiens
tcatgctgtacagtgacctacagtttggtaagatgtcatcaatggaccagctccatgtgattcaagtatatacaactaccaccatgacccctccaaccacatataacaccgccacccctagttcgcttcactgt

SEQ ID NO: 538095 - DNA, 1060 bp, Homo sapiens
atgacactttggtgctcatcctttcgtgggccagacacagagttctcatgctcacaatggcgagcgaggtagcacgaaaccgaactgactgggtatcgtggatgatcagcagactttcttctgtggcaacgtggctcatcagcagcttatccagatcacttcagcatcggctgcaggttggtctctcaagaacccaaagctctggtcagtgaatggaatgtgagcctcaggccaagaacatcacgtgtgtgcctcctgcaatagcagcacaggtgtgtggtgtgctgtaggcatggtgccctctactatctgcagatccatacctcaggagctccgtgcagcatcagccacacagacgatggaacatgcaagatggactctgctctggacaatcacacccatatagtgagacaagcaaatgcgacatggtccccatcattctgatgccacttgcgcactcatggacaggacaatcatcggaatcgaaaatccttgaccagtatgccctctttcttgcacacctagcgtgccaccaaggcagcatgcatgaggctgggcacgacgcactcattataccatcgacatccaactccctgaactgcacaccaccacaatatctggaagcaagattacgcacctactcataacccattcccatattgctagccacgtatggagtgcaagaacttgtgcccgctggcctctataactcgcttaaccttcctggagtgaattacaaacaaaattcgcagcaccacaggacatacctggctactgaaagcccaagaacaaccggccacaaacgccaaccacggcctgcaacaaactaggagcgaacaaacccacacaaagaaccacacaccaccccggatacagatacggacgagaaaacagaccaaacacaggcaagcaacgacacaaaagacacataaacacaaagacccacaccaccggcaccgccatctacgaacactagaggagacaacccgggacccacaggagaccacacaaacgtagggatacaagcccgaaaccttaaagaataacagaaaaaaaacag

SEQ ID NO: 538096 - DNA, 413 bp, Homo sapiens
  misc_feature (335)..(335): n is a, c, g, or t
  misc_feature (339)..(339): n is a, c, g, or t
gcgtggtcgcggccgaggtacattcttgtagaaccgggttcgtttttccagttttgtagaaaaatagatgttccagccaccatttacttaactgtctaatatttaagaccaatcaatatgttccctggaaagatgaaaaagtctcatgactaactcgtttttttaaaaattctttaaaacaaaaagtgtgtgtgtgtgtgtgtgtgtgtttactctcaaagcacagcatttccacagcagcagccaacatggggtttagtagcttcactcacccctaactaaagctttgaataaaccagtgatttactacaaaaaacactgtccttgaaagaaangacngcagtcatacatgaacgtgaaacttggaatgatcaggtcctaaacatggcacttaaaaagttacttatcaaaac

SEQ ID NO: 538097 - DNA, 239 bp, Homo sapiens
aacagaccttggtgcacaggtacggtggacgaagttgtagtgcacacgccgagaacccagacttcttcaagtcacaggtggacgaagttgttgcccactgcgactcgcaacaacttcgtccaccccgacatctgacacaggtttggagcctcggcgtgtgcatgcacacgccgaacaaccagactgcacacgccgagtcccatatacttcttgaaaggtcacaatggacgaagtggttg

SEQ ID NO: 538098 - DNA, 428 bp, Homo sapiens
  misc_feature (428)..(428): n is a, c, g, or t
cactgaccgagagctactatattgctgcgccaacaactgaatatgactagctcacacaatagcttttatagtaaagatacctgtttacggactccgcttatgactccctaaagcccatgacgaaacccccatcgctgggccaataggacttgccgcagtactcttaaaactaggcggctatgctataatacgcctcacactcattctcaacccactgacacatcacataggctacccattgcttgtactattcctatgtggcatagttatagcaagctccatctgcctacgacagacagacctaagatcgttcattgcatactcttcaatcagccacatatccctcgcagcagccattctcatccccgctgaagcttcaccgacgcagtcattctcattcgcccacggacttacatcctcattacttn

SEQ ID NO: 538099 - DNA, 1119 bp, Homo sapiens
  misc_feature (147)..(147): n is a, c, g, or t
catgtttttttcccggtgtcaaccgacttctggtaaaaatctataaaaacgggggccaaacacaatgtggagatcaaggtggtccatgcttaagggaaaagaaaggccctggaccacaaggtggattgctctgtaattggggagagnatctttgtgcttgctctgccaatgcagtcttggttctaagttcactgtgaccacgaagcagctgactgtgcatcacgcagtcacaatattgtttttagggtgagggtggaggactgtgtgtccgtggattactcctcctgctggtggattgcagatgcattattaggtcatactggctagaatgcagcttttctcccaccataacatgaaaacagtgtaagaacatagggtgctttgtgcatagcccttctctatgtaagcagccatggcagtcattaaagagaaaggagtagctttgacattaagctccccagatccctgctgctcatacttctggcaagggttcccctctctcatgcatgaacaggggcatccaaaataagaagctctccattctgtggtggggaaagcggagaggggagtgggtgaagctgggaaagtaaaggcagcacgttacagaaggaagaaaggaagccagtaactgagggcccactgcctgcccggccctgggccaggccctcaacagaagccatctcatttaagccctgcaaccaatgagatgcacgtcatcattggctcttacagacaagaaaactagactcagaggggctgagtccacatcccagacagctcactgcagacacaggtggagtggttcctacaagacatccagttttaacaacaaaagagttattgaaatgcatgggtagaaattgaaccaggaaaatcagtaaagtgattgtaaaaaagaaggactagcttgcctggagatgatgtttcttgcttttggaaaaaaaaaaaaagtctctgaaatttgattcttactacagatttaaaactttctacatattatatgtaggagctcctagtgtttttgagaaattagactgtacctgtgtacacttctaaggtctacatggacctatgtatatatatctaagacctctgatcattaaaacctataaaaggttg

SEQ ID NO: 538100 - DNA, 192 bp, Homo sapiens
tggaagatagattctttcaacaagtaattggtagtaatgactgtgttcgacttcaatttgggagcgcagtagctattgttaaaagatagaactatttgggtctcattggaacgccaacacagaacttgctggctggtgtattttctcttcagtggatcaaataaaatacttacaaaaaaaaataaaaacggg

SEQ ID NO: 538101 - DNA, 374 bp, Homo sapiens
atttacgttattttgcaacaatcaccaccatccatctccagaattgttttcatgtttccaaacggaagctgtgtctccatcaaacattagctcccattctccccaccccctagtccctgcaaccaccatgctactttctgtctctataaatctgactactctaagtacctcattgttagcatcatgtcctcaaggttcatccatgttgtaacatatgtcccaatggccttcctttttaaggctgaataatattccattgtatacatgtatatactacactttgtgtatccatttgttcgtccatggacactcaggctggatgtaccgattagctatggtgccccctgctgctataaacaagggtgccaaaaaaa

SEQ ID NO: 538102 - DNA, 341 bp, Homo sapiens
gcggaccccagagagccctgagcagggcggggctgagtaaatgccggcttaccatctctaccatcatccggtttagtcatccaccaggaggaatatgaaattccagcataggaatgacaaaggttggaagctgagactaagtgcttcttttgccgttgacagttaatagactatctgcattatctatgcagcatggggtttttattattttcactaaagacgtctcttttgggtatacaaccgtgtttttaaaaaagctggttttctcatacgctttaaggttttaattgttcaattctgcaggtgagatttgagactcattttattgtataagttcactg

SEQ ID NO: 538103 - DNA, 492 bp, Homo sapiens
ggctttcctatgttggccaggctggcctcgaactgctgaccttacatgatctggccgcctgtgcctcccaaagtgctcagaattcaggcttgagcctctgggcctggacgaagatcgatcttttagacatcaggactagaccggcatgattgataatattgatctcctatccgttttaacataagcagcaaggagttctaagttaaacaaccaccatagactgtcaataactttaagacataactttccgataccagaaaatgaaatgcctcatggcagttcatagattctgaaataagtgccatgacaattgagtgtgacaaacaggtgtaaaacttgtactaagcacctaacagcataattggtttaggattcacgcctgcaactcgtaaaaggggcagcatctatgaaactactcttgttagacattacacagaatgcaaggatggactgagatccctcaactatagctgttggctagatatcctatag

SEQ ID NO: 538104 - DNA, 116 bp, Homo sapiens
ttgtgagcttggaggggaggcagccaactcccacacctgcggactgccgctgagagaccagccctcgtccagcccgctgctccagaccgccccagaggtcaaaggtcaccagcggg

SEQ ID NO: 538105 - DNA, 832 bp, Homo sapiens
cttctctcgcgcctcgcctcttcctccgcctcctccttcgcctcttcctgcctcctcccggcttccgccgccgcactccagcctaatcccaaccccaggcgaaggcgttcttatttatttccgttttctcgccactacagccccctgacaaggtgatccgggcgggccccgagaaatttttatcccctcaccggcctcacactagtatcgcatgtccattatccagaacctccaatctttcgaccccttgtgctgatgcaactaagggtgacgacttactcccggcagggcctgaggattcacatccatataagaatccagcaacgggaacggcagaaaagacactgactatgtccaggccatgtgcagattgattatgaccaaaaagaactctgtgtgaaagctttccaaaacagaaattgtgcctgtaagtgtactgtgacttgacctcctgaatacggagaggtaatacagcttcaggggtgcccaaaggaaaaccttctgcagttcctcctgaggtggctttgtaaggggaacagctaaggtccatggattctaaaatgaacctcaatacggtggagaattcccttgcattcgttgtgtctctaaacccggtgtggtgccttgtgaagtgattccttgcagtaaccggacttccctttatttatcatcaacctccatcactctgcttggtacgaaactgcgttgtgactgtacccttaaattgggtcgtgtcaaactctttgtgtctgttccacgaagtgggtatgcgaacccccaggaattggtgtacgggggtaaaaattttgtgttccccgaaaaaaatgccgat

SEQ ID NO: 538106 - DNA, 491 bp, Homo sapiens
agttattaattaagtgaaggctacgagtcatttgaatttaattttatttttagagactgagtttcgctctgtcggccaggtgggagtacattggtgcgatctcggctcactgcatcccctgcctcttgcgttcaagcgatcctcctacctcagcctcccgagtaggtgggactaaaggcacccgctaccatgcctggtctcatttgactttgaaagaaaaaactgtgtgtaatgccagcattttgaaaggccgaggtgggtggatcacttgaggtcaggagttcaagaccagcctgggcaacatggtgaaaccccatctctactaaaaatataaaaattagccagcacggtggtgcacgcctgtaatcccagccactcggggggctgaggcaggagaatcactttaacctgggaggcagaggttgcagtgagcagagaaggcaccactgcactgcaggctggttgacagagccagactcagcctcaaaaac

SEQ ID NO: 538107 - DNA, 100 bp, Homo sapiens
  misc_feature (86)..(86): n is a, c, g, or t
  misc_feature (89)..(89): n is a, c, g, or t
gtttccttcatcatcatgcacatgctgcatcatttcaacaggtcagcatctcatagtggtcacggcattcacacgcggggcatccntcntcagcagtcgc

SEQ ID NO: 538108 - DNA, 374 bp, Homo sapiens
gctcgacctttgacaaaattcattcactggtgcaatgcaaatctctatcaaaatatacaaccatcaaaatatagaacaatctagtagggtgtggtgactcatgcctgtaatctcagccctttgggaggtcgaggcaggcgtatcacggggtcaggagatcgagaccatcctggccaacacggtgaaaccccatctctactagaaatacaaagagttagccgggtgtggtggtgggcgcctgtggtcccagctactcggggggctgagaaaggagaattgcatgaaccctgggggcagagcttgcagtgagccgagattgcgccactgcactccagcctgggtgacagaccgagactctgtctcaaaaaaaaaaa

SEQ ID NO: 538109 - DNA, 231 bp, Homo sapiens
tggggacatgaaaaggggatgaatgacaccagctaaaatcctaaatattgaatacactcaagccttattagccaggagtgatcacatgcccaaaactcccctccatcccagcactatgcacagtacacggctcatatgcaacgtggaaagcacgtgggacaagagcaaagcacaagtgacacatggtccctctcataacacctcagaacaccacccctggctagacccagg

SEQ ID NO: 538110 - DNA, 108 bp, Homo sapiens
tgactcgtaccctcacaagacctgcagaagcaggaagcagcagaagcagaagggcagaagcaggaagcaagggtctggtggcagacaggaagcggcagaagcaggaag

SEQ ID NO: 538111 - DNA, 538 bp, Homo sapiens
  misc_feature (314)..(314): n is a, c, g, or t
  misc_feature (344)..(344): n is a, c, g, or t
cgaaatggcaccctcgcaaaggggaaggaaaagaaggagagaaccacggtcactcacgcctcggagcctccacggtggctgtaaaggagagaaatgtatttggtgtctgcccacaaatcttgtgcatcccttccaatgacactttgtgtcccaagtcacgtgatctttttggccaaggaaccctctgcccgtgtgactggtgggattaaggttaaggccagaccgagatgaatcctccacccatatgctgctatgttggctgccccggatgtgcccagaggtgaaggagctgggtatcaccgccctacacatcnaactccgggccacaggaggaaataggaccnagacccctggacctggggccccatcggccctcagagcccttgcccgctcgggtattaaggatcgggcggattgaggatagtcacccccctcccctctgacagacactccccgagaaggggggtccccgctggtccccctctgtgaaccagattcctccaaatattttttgttaaattaattgcccttcatgtta

SEQ ID NO: 538112 - DNA, 574 bp, Homo sapiens
  misc_feature (574)..(574): n is a, c, g, or t
accttgcttggcactacggcaggtggctgggagagagtgatggagagaaaggctaagctaaggtcacagaaagtggaggaaggctggcttgtcccgctggacttgacggcggagctgctgcaatctcgcgggctgtggcccttgccccgtggtgtgaccctgagtgcctgctggggagtgcgtggtgtggctccacccgtggaggtgacagcatggctgtggggccccgtaagggagctggtcttgctccgggctcccctctcgtagccggcgccctgggaccagcgcgtgagcacgtctcggaggagtccgatgcgctgggcagggccggggtggtcacccccgcccagcttccagtgggtgactgtgcctctgacgtcagacggctttgtgggtcattcccttggcacaggggcacttaattttcataacaggcaatgaaaggatgcctgtggggaaaactggggacactagggcagtggtcagctcttcccccttcggaacacaatcacacacatcacatatgtttgcccaatcgtgacatcaaccccactcgggatcggtacacccatcn

SEQ ID NO: 538113 - DNA, 213 bp, Homo sapiens
ggcacatcctgaaacttctgctcccgggctaaagtgatcctcccacctcagcctcccaagtatctgggactacaggtgcgcaccaggacacccagctgattttttcaattttatagtagagatggggtttcaccagtgctggccaggctagttcttgaacttcctgacctcaatgtgatccaccgtgccttaagcctccacaaaatgcctggg

SEQ ID NO: 538114 - DNA, 535 bp, Homo sapiens
  misc_feature (79)..(79): n is a, c, g, or t
  misc_feature (86)..(86): n is a, c, g, or t
  misc_feature (97)..(97): n is a, c, g, or t
  misc_feature (100)..(100): n is a, c, g, or t
  misc_feature (105)..(105): n is a, c, g, or t
  misc_feature (107)..(107): n is a, c, g, or t
  misc_feature (110)..(111): n is a, c, g, or t
  misc_feature (121)..(121): n is a, c, g, or t
  misc_feature (142)..(143): n is a, c, g, or t
  misc_feature (160)..(160): n is a, c, g, or t
  misc_feature (166)..(166): n is a, c, g, or t
  misc_feature (223)..(225): n is a, c, g, or t
  misc_feature (320)..(320): n is a, c, g, or t
  misc_feature (323)..(323): n is a, c, g, or t
  misc_feature (333)..(333): n is a, c, g, or t
  misc_feature (348)..(348): n is a, c, g, or t
  misc_feature (367)..(367): n is a, c, g, or t
  misc_feature (377)..(377): n is a, c, g, or t
  misc_feature (387)..(387): n is a, c, g, or t
  misc_feature (429)..(429): n is a, c, g, or t
  misc_feature (451)..(451): n is a, c, g, or t
  misc_feature (506)..(506): n is a, c, g, or t
ttaagtaaaggaggtaaaaaccttggcttaaaaatctttcttttccaaccaattagtggttggtaagttcccaacatcnaatgtgnacacttaagtnggnccttnanacnnaggctttcantatttcctttaaaatgaggannattattttcaaggcccncagcanatttgtatagttgcttgcctgatataaatgcaatattaatgcctttaaagtatgaannnatgccaaagatcacttgttgttttactaaagaaagattacttagaggaaataagaaaaatcatgtttgctctcccggttcttccagtggtttganacnctggtttacnctttatgccggatgngcttttttccaaaatcagngctcgagacncagtgaagcnaattaaaaaaaaaaaaaaaaaaaatccctgaatgatgattanagacatccccgctaaaaaactncatttataagctaggatttgttatatgcaaaaattttctgcctcttcttttgttntgtttaaaacaataaaatgcatttgtata

SEQ ID NO: 538115 - DNA, 258 bp, Homo sapiens
tagtggggactacagatgggcaccactatgcctggttcattttttttttttccaggtttttagagacagagccttgctatattgcctaggctggttttgaactccaggcctcaagagatcctcctgccttggcctttggaggagctgggagagccactgcatctggctaatttttggggtttttttaagagacagggctgtgttgcctagcctggccttgaacactggacctcaagtgatcatcctgcctcagcaggc

SEQ ID NO: 538116 - DNA, 771 bp, Homo sapiens
  misc_feature (315)..(315): n is a, c, g, or t
  misc_feature (322)..(322): n is a, c, g, or t
  misc_feature (333)..(333): n is a, c, g, or t
  misc_feature (336)..(336): n is a, c, g, or t
  misc_feature (341)..(341): n is a, c, g, or t
  misc_feature (343)..(343): n is a, c, g, or t
  misc_feature (346)..(347): n is a, c, g, or t
  misc_feature (357)..(357): n is a, c, g, or t
  misc_feature (378)..(379): n is a, c, g, or t
  misc_feature (396)..(396): n is a, c, g, or t
  misc_feature (402)..(402): n is a, c, g, or t
  misc_feature (459)..(461): n is a, c, g, or t
  misc_feature (556)..(556): n is a, c, g, or t
  misc_feature (559)..(559): n is a, c, g, or t
  misc_feature (569)..(569): n is a, c, g, or t
  misc_feature (584)..(584): n is a, c, g, or t
  misc_feature (603)..(603): n is a, c, g, or t
  misc_feature (613)..(613): n is a, c, g, or t
  misc_feature (623)..(623): n is a, c, g, or t
  misc_feature (665)..(665): n is a, c, g, or t
  misc_feature (687)..(687): n is a, c, g, or t
  misc_feature (742)..(742): n is a, c, g, or t
atgaaccaatgggaactactactccgataattcctacctccaagcaacaaactacacacacgcactcagcatctactcccacgtatggggttcaagagagtaatgggtttcatatctcttatcaccacagtaagttcctactaggcaaaatgagagggcagtgtttcctttttggtacttattactgctaagtatttcccagcacatgaaaccctattccatcccaaaaaaaaaaccacacgcctcacaaaatcccacccttgcctgaacatccttccttcatccccatcacaaaaacgccagttcccaacatcnaatgtgnacacttaagtnggnccttnanacnnaggctttcantatttcctttaaaatgaggannattattttcaaggcccncagcanatttgtatagttgcttgcctgatataaatgcaatattaatgcctttaaagtatgaannnatgccaaagatcacttgttgttttactaaagaaagattacttagaggaaataagaaaaatcatgtttgctctcccggttcttccagtggtttganacnctggtttacnctttatgccggatgngcttttttccaaaatcagngctcgagacncagtgaagcnaattaaaaaaaaaaaaaaaaaaaatccctgaatgatgattanagacatccccgctaaaaaactncatttataagctaggatttgttatatgcaaaaattttctgcctcttcttttgttntgtttaaaacaataaaatgcatttgtata

SEQ ID NO: 538117 - DNA, 464 bp, Homo sapiens
tgtgatgtgtagtaatgtggaagtcagtgcttgggatcagtagtgtttctaattctttcaaatggtatagagcaaaaataacttgcagcacacttttgtgcaccataatgattttatatgtatatttgaaacaatatgttttgttttagaaacaaatttttcattataatttgcctccagtttttgcttttagaaaagtatcctgggttcatgcctgtaatcccagtactttgagaggctgaggagggaggattgcttgagcccaggagttctagatcatcgtgggcaacatagtgaaccctcatctctacaaaaaataaaaaaattatccaggcatagtgttgtgcgcccatacctcccaggttgaggtgggaggattgcttgagcccaggaggtcaaggctgcagttagctataattgcaccactgtacaccagcctgggcagcagagcaagatgctgtatc

SEQ ID NO: 538118 - DNA, 350 bp, Homo sapiens
tcataggcatgctcctggggctgagctctttccttttcattattctgagtttggctctggacagcacctgccattgagagttgtgggctctcaccctctggtagctgagctaagcactgtcattcttggtgccatcttcccttccgtcaccggcattctcagcccagcccccacctttgtgttgtaggttgtgctctcaagcaacacagatcactcttccctttgccccttccccagagggacttgactttctttctggactgtttttattgaaacaaagtggtgtcaaaataaatcgcttgcagggccttgtttcctgttggtctgagtgaagcattgaataaaaaaaa

SEQ ID NO: 538119 - DNA, 1129 bp, Homo sapiens
gaaacactgtatactgcctatatatattagttatgcaacggatgtacttagtacatgtgtattccatgcacatcagcaatatcccaatagcagcatcaagcttgcacttgaatccattttgcagccaattttgccctgtgttatatgtgtttcacgccaccatcatttgcagcttggcatttatctccaacagaaagtggattcactactcggcacattaacaagcaccaataggtttttattccaactccgagcactgtggttgagtaacatcacctcaattttttattatccttaaagcatattgcattttcatattcgtttattgtataaaggcatcaatgctgctgtcaaatacaggatatgttttaatctttaaaatttcattccaccaccgatcagatgccagttcccctcattctcgctttcacatgcaaggggcatcatatacagctattctaatggctgtcttcagcaacatttcatcaaaatgtcacacatactgcattcgactggtctttaaagcatgtgttatcaactagtgaggctatcttaaacgcaatcagtgtggcatgctgcatcggtcatcccaggtcatccaagtacttcatccattgcatccttcgctgtccaaacacacccaatcaggcacaagaaggagacacactgcacgctattcatttaccagaattcctttgatcgcgacagccatctaccaacactggatgacgtactaaataaaacctcctgcaatatctggcctccaggaattacatcagaatctcgacgccgtcaactctcaggggccctctacatcagggctaaaaagcgctggaggccccaataaatgggtcacgcagcccacaacaacacacaacggaaccctcactacagggaggcccacagcaacacggcgccacaacaatcatcggcgcagtggtaccgccacccagacgcaagaaaaacgaccgcttaaaagcgtcaaaacaacagacatacaatgggaggcacaaacagagtgagaaactccacaccagaagaaacagacacacacaacaccgaaacccacacggcaaccgaacccggagaaccagcgggacctataacccaccgcattcaaaacacaaga

SEQ ID NO: 538120 - DNA, 898 bp, Homo sapiens
ggtggctcatgcctgtgatcccggtactttggggggccggggtgggcggatctgcgggctcaggagatcgagaccgtcccgagcggcatggtgaagccccgtctctactaaaacacaaaaaattagccgggcgtggtgtgtgcacacctgtagtcccagctacttgggaggctgaggctggggagtcgcttgaaccctggaggtggaggttgcacgagagccaagatcacgccactgcacttcagcctggtgacagagcgagactctgtctcaaaaaaaacagaccgaaccttgaacagaggctattgtcaagctgggctcaagtgaatatagcactgatagtaaacagcactgatagacacctctgtgaatgttcagctatgaaagcagagttgtacgagcataggaaccaacacattcatttagcacttagcaaatatatatcgagcacatactatgtgccaggccctgtgctgaacaaatgcatgatcacaagcactgaacaaggcacgtcttttaccctcaaaaggtcacacaccggcaccctcaaggcaaaattaagcaacaacaacaacacaactggactggtcactgtcgggcactctacctgtactgtctactgcacatgtccgggctcatcttctaaggcatgtcgatgcttattcattacagttacattgcacgagacttcatctactaaacgagccatcggcgactaatcacaaattcattcccccttgacactgctttactttcaccacacctccaacactacctctcgtcctccacaacctgtcgacctctgccacaacaacccaagaccatactctccactattacacacacgcccctcctacttacacccccttattgtaattccagcaatctgcctccattg

SEQ ID NO: 538121 - DNA, 430 bp, Homo sapiens
cacgaggaaacggaacgaatatgtactggcactcgcgcgtgtagcggctgcccgcggtgcggctctcggcgcggtcgtggcgcaggcctgcattgacgctgacgccctgccccagcctgaacacaccttcggcccagcccgcgtggccgttcagttcgccgctgcgccgcgtcgagttgccgaccacgaaatcaccgttctcgcggcgcaggtagtcggacgactggctgacgtagccgaatgccaggtcgtgccgctgcccgaaggcgtcgacgcccaactcatgcgtcacgcgcaggtcgcgccgggtggagtcgatcacgttgcgctggtcggccagcgtcgtagcggcctgcacgccgatgaagtacgggttttcgcggtcgcggtgatcgaactgcacggtgagcagtcccgcgccgccgaaatc

SEQ ID NO: 538122 - DNA, 700 bp, Homo sapiens
  misc_feature (269)..(269): n is a, c, g, or t
  misc_feature (526)..(526): n is a, c, g, or t
  misc_feature (537)..(537): n is a, c, g, or t
  misc_feature (546)..(546): n is a, c, g, or t
  misc_feature (548)..(548): n is a, c, g, or t
  misc_feature (553)..(553): n is a, c, g, or t
  misc_feature (618)..(619): n is a, c, g, or t
tatcgggggttttcacttttgcttccttctcattttctcttgctgctgccatgtaagaagtgccttttgcctcccaccgtgattctgaggcctccccagccatgtggaactgtaagtccaattaaacctctttttcttcccaagtctcgggtatagtctttatcacgcaggcgtgaataccggagcgtagcgtatactaagattgggtaccatgtaggagtgtggggcactagcttgattaacgatcgaccccgagaatattgttggcnatagccgaagctgtgtgtgaaaagctcgtgggctgagagccatgcgcccacgtatgtgggtgtgggacacgagattataggtatggcggcatcaggacaggagaggtacagcgcagagacactttggtggggggaaaaggtcgttgggagaaactttcccctaagaaaacccctttcattttcggacaatttgggccttttttggcgcccaaaaaaatggccgtggaattaaacccaaagtaattggaaacccagcntcaagcgtgcnccaagcgcntngacgngtagaggtcctcccacgcacttgggcacgcacttgaacggcaaaccttggcgctcggcgcacacnntggggagcccacaaagggcttggaacctcctttgttttaaatagcgtttttaaggccaaacacgcaagaacctggggattg

SEQ ID NO: 538123 - DNA, 1038 bp, Homo sapiens
  misc_feature (283)..(283): n is a, c, g, or t
cgcagtgtcgctaggccggagggaagatggcggcgccctggtggcgagccgcgctgtgcgagtgtcggagatggcggggcttcagcacctcggccgtcctgggccgccggacacccccgctggggccgatgcccaacagtgacatcgacttgagcaacctggagctggctggagaagtaccggagcttctgaccgctaccggcgccggagcagagcaggaggcgcagtgcccctgcactggtgtgctgtgacctaccgagagtatttcgggggagaaggacangatcccaaagagaagattgatattgggctgcctccacccaaagtctcccggacccaacagctactggaacggaaacaggccatccaggagcttcgggccaatgtggaagaggagcgggcttgcccgcctccgcacagccagtgtcccgctggatgcctgtgcgggccgagtgggagaggacctgtggcccctaccacaagcagcgtctggctgagtattacggcctctaccgagacctgttccacggtgccacctttgtgccccgagtccccctgcacgtggcctacgctgtgggtgaggatgacctgatgcctgtgtactgtggcaatgaggtgactccaaccgaggctgcccaagcgccagaggtgacctatgaggcagaagagggctccttgtggacgttgctactcactagcttggatgggcacctgctggagccagatgctgagtacctccactggctgctaaccaacatcccgggtaaccgggtggctgaaggacaggtgacgtgtcctaccttccaccttcctgccgaggtcggcatcaccgttgcttctgcttcagagacagcgattgattttgagacgaagcctacctgtaagtggcaaggacctcggttgattacagaaacagaactgacaggcgttgtttcatcgggagccgccactcactgaaggacgtgggggcgccaaccaaccaagcggagggagaaccaagaagagaaggaacagcgcgcttctttgtaaaatgtcgaa

SEQ ID NO: 538124 - DNA, 438 bp, Homo sapiens
  misc_feature (275)..(275): n is a, c, g, or t
  misc_feature (416)..(416): n is a, c, g, or t
  misc_feature (434)..(434): n is a, c, g, or t
gagatgatggagtttcactcttgttgcccaggctggaggacaatggcgtgatctcggctcaccacaacctccccctcctgggttcaagcaattctcctgcctcagcctcctgagtatctgggattacaggcatgtaccaccaggccgggctaattttgtatttttagtagagacagggtttctccatgttggtcagtctggttgcgaactcccaacctcagttgatctgcccgcctcggcctcccaaaatgctgggattacaggcgtgacaaccngctcctggctgaagttttcccttctggatgtccctcacccctcaccccaagctcgtgagccgtgccactcatctcatatttgggccacagggtggggccaaggcttgcaataagcacaaaagtcccgatttttcctcaatnagcttgggccggccaagnccaa

SEQ ID NO: 538125 - DNA, 340 bp, Homo sapiens
gtcgacccccaacccgtattactgtctgaggtagacggatcgctcgtccggccattcagctaacggttgaaatgtatgcctccatgggcatacagccacatcacttgtatacctctgccgatgagaacctaattatggattcccccttgctgtcatttcgtgtcgacgaggtgttggtcgaacaactcgatcagttgtcagcagcaacggaccatgatcgccaggaccatcttaaccgcgccttaatccgttatcttgagcccgagtcacggcacctcaatgcaattgccgagggtatcgccgacgctgaggccggtaacctgacagatctgcagtcgac

SEQ ID NO: 538126 - DNA, 1238 bp, Homo sapiens
  misc_feature (1)..(1): n is a, c, g, or t
nacgattttggatgaataacccctctcggtcctttgaattgttccaagagtggtgttaatgatttcgctcctcccacggggataattaatcttcggccccccccgaaaaggcgagccctgtttgtcttgagaaactgattttttgctctgtgcctttgtccccacctctttgggggcgccccaaccttgcctccagcagttttggcgttggcgccccccggtgtgtccaaagcagttctcctgttggggagaacccgccgttttccgaatcttgattaccccctcaggtaggttccccccaggcgcaatgaccaccttttcctcccggggggaatacctcccccacgggccttttctttgtggttggggtgttatctttgaaccccccccacagagggggcatgttgtacaccacacccaatgccgctttgttgtcctctccgggaggcgcgcatctgtataaaatggtgtagacaccgttatcctttaacaccctctgtgtggcgccctctgtgggtgaacacacccacagatttgttctcgctctctctgtgccgcctgatattgtggggacacacttcggcacactttctcgcacttgccacactcacacacacacaggggagagtctctcacactccacagtgtgggtgtctagataatgtgtggtgtgagatatccttggtctccgcggaaatatttttctggcgcacaatggcgcgtgagacacaccacatgtgttccccgcgtgagacacacaccctcacatgtgagagaggtacacatgcctcgtgatattctgtatactgttctacacacagaagagatctctcgaaagaagagattgaaaataagaaagagccacggctcgctcgcctgaaagaaggccacgtggaccccaaggagggaaatttccacgggtgaaatggaactgcttcccgcctccctgaggttcacctggctatactcacccctcgagggttccacgaactggttctgaaaggtgtacacacaggtggcccttctgtgcctatattcacgcacaattccctatctgaaagaactggaggcgctcacagcctgctcccggaaagaactggttctgcacagctcccacctgctacacaggccacctgaatgggtaggacgccacccctgactggtcttaagctgttcttgcataggctcttaagccgccctggagaaaatggttgatggaaaataaacatccgtttcta

SEQ ID NO: 538127 - DNA, 662 bp, Homo sapiens
gggttggggaccttctgctggaaccaagaaaacaacgttcccaattggaaaggcccccaaaaaaggtccccttttccccccacagaaaaaggaacgggggcctgcctccctgttggccaggtgggtcccccaaaagaagaatataaaggccctccctttccaacccagggggggttttgttttgggccccaaaaaaaaagagaaatttttttccctttccccagttaccagtggaagaaattttattgaaattctaagggtggtcatttttctccaattgcaaacaaaaaaaagggttcccccccccttttattgaaaaaaggggaaaattttagtggcccctccccccccccccgaaaaaaaaaccaaaaaatttttcccaaaaaaagttttccccaaaaagtccccctttggcaaaaaaacaccccggttaacccccccccctttatttttttgaaaaaactggtgttgttaaccaaaaaatatcaccccccaattgtgttttcccgcaccaattccataaacccaaccgggggtcctcccacccaaggtttttggggtgcaaacccaagggcctattaaatgaaaagggccccaaaaaacaataacaaacatgaaaaaaagataaaacaaaccaaaaaaaagaataaatgaataaattc

SEQ ID NO: 538128 - DNA, 409 bp, Homo sapiens
  misc_feature (4)..(4): n is a, c, g, or t
  misc_feature (131)..(131): n is a, c, g, or t
  misc_feature (138)..(138): n is a, c, g, or t
  misc_feature (152)..(154): n is a, c, g, or t
  misc_feature (163)..(163): n is a, c, g, or t
ttanatttttgtacatattgttaggggtcagccatttttaatgataacgggtgacccaaaccagccttcagagcgttttctgtcctacttcagactttacttgtggtgtgaccatgttcattataatcccnaaggggnaaaaaaaaaccctnnnaaaaaaagncaaaacaacaacaaaaaaacaatcttattccgagcattccagtaacttttgtgtatgtacctagctgtactataagtagttggtttgtatgagatggttaaaaaggccaaagataaaaagattttttttttccttttctttctgtctatgaagttgctgtttatttttttttggcctgtttgatgtatgtgtgaaacaatgtccaacaataaaccggaattttattttgctgagttgttctaaaaa

SEQ ID NO: 538129 - DNA, 899 bp, Homo sapiens
  misc_feature (2)..(2): n is a, c, g, or t
  misc_feature (27)..(27): n is a, c, g, or t
  misc_feature (33)..(34): n is a, c, g, or t
  misc_feature (75)..(75): n is a, c, g, or t
  misc_feature (78)..(78): n is a, c, g, or t
  misc_feature (87)..(87): n is a, c, g, or t
  misc_feature (95)..(95): n is a, c, g, or t
  misc_feature (161)..(161): n is a, c, g, or t
  misc_feature (223)..(223): n is a, c, g, or t
  misc_feature (298)..(298): n is a, c, g, or t
  misc_feature (303)..(304): n is a, c, g, or t
  misc_feature (316)..(316): n is a, c, g, or t
  misc_feature (320)..(320): n is a, c, g, or t
  misc_feature (323)..(323): n is a, c, g, or t
  misc_feature (332)..(332): n is a, c, g, or t
  misc_feature (342)..(342): n is a, c, g, or t
  misc_feature (348)..(348): n is a, c, g, or t
  misc_feature (356)..(356): n is a, c, g, or t
  misc_feature (359)..(359): n is a, c, g, or t
  misc_feature (363)..(363): n is a, c, g, or t
  misc_feature (378)..(378): n is a, c, g, or t
  misc_feature (386)..(386): n is a, c, g, or t
  misc_feature (408)..(410): n is a, c, g, or t
  misc_feature (413)..(413): n is a, c, g, or t
  misc_feature (416)..(416): n is a, c, g, or t
  misc_feature (432)..(433): n is a, c, g, or t
  misc_feature (440)..(440): n is a, c, g, or t
  misc_feature (442)..(442): n is a, c, g, or t
  misc_feature (446)..(446): n is a, c, g, or t
  misc_feature (453)..(453): n is a, c, g, or t
  misc_feature (464)..(464): n is a, c, g, or t
  misc_feature (496)..(497): n is a, c, g, or t
  misc_feature (507)..(507): n is a, c, g, or t
  misc_feature (516)..(516): n is a, c, g, or t
  misc_feature (528)..(528): n is a, c, g, or t
  misc_feature (532)..(532): n is a, c, g, or t
  misc_feature (544)..(544): n is a, c, g, or t
  misc_feature (598)..(599): n is a, c, g, or t
  misc_feature (625)..(625): n is a, c, g, or t
  misc_feature (658)..(659): n is a, c, g, or t
  misc_feature (662)..(662): n is a, c, g, or t
  misc_feature (664)..(664): n is a, c, g, or t
  misc_feature (677)..(677): n is a, c, g, or t
  misc_feature (679)..(679): n is a, c, g, or t
  misc_feature (681)..(681): n is a, c, g, or t
  misc_feature (704)..(704): n is a, c, g, or t
  misc_feature (708)..(710): n is a, c, g, or t
  misc_feature (718)..(719): n is a, c, g, or t
  misc_feature (734)..(735): n is a, c, g, or t
  misc_feature (738)..(738): n is a, c, g, or t
  misc_feature (745)..(745): n is a, c, g, or t
  misc_feature (747)..(747): n is a, c, g, or t
  misc_feature (751)..(751): n is a, c, g, or t
  misc_feature (753)..(755): n is a, c, g, or t
  misc_feature (763)..(764): n is a, c, g, or t
  misc_feature (766)..(766): n is a, c, g, or t
  misc_feature (770)..(770): n is a, c, g, or t
  misc_feature (780)..(780): n is a, c, g, or t
  misc_feature (784)..(784): n is a, c, g, or t
  misc_feature (786)..(786): n is a, c, g, or t
  misc_feature (798)..(798): n is a, c, g, or t
  misc_feature (801)..(801): n is a, c, g, or t
  misc_feature (807)..(807): n is a, c, g, or t
  misc_feature (812)..(812): n is a, c, g, or t
  misc_feature (816)..(816): n is a, c, g, or t
  misc_feature (819)..(819): n is a, c, g, or t
  misc_feature (826)..(826): n is a, c, g, or t
  misc_feature (829)..(829): n is a, c, g, or t
  misc_feature (837)..(837): n is a, c, g, or t
  misc_feature (895)..(895): n is a, c, g, or t
gncgggagaggccaactctttaaagtnaaatgnnataaataaataagttaagcatagagaactgtctgagactgngtncccggtgtncccttacnacccccacccccaccccattttcttttccctaaaacctcttcctaaagaaaatgatcaggtaatangccccttgacccctccccacacccctcctcccaatacccaattaccccccaaagcaaagggngaaattaagagagagaaaaaaatccaagggcaacattgtctaaactcccagaaagagagatggcagcgtccgggncaggnnggggggggtggntaangcncgggtggtngtggtatttncacagnggggaccngcngggnctgtgaacatttttnggggttcnggggggggtcttttcctcgtgnnnggnggngggtctctgtggctgnntggcagngnggcngccctcngggctcccccncaccctccttagggggggcccttggggggggnngtgggttttngggctgggngcccagggatcngggntatcctcctctngctgggggtgggggggggtgggggccagcttccaagaaacccctaatgtggggnngaggctggggtgagggtgagctgggngtgtgtggcaggcccctgcggctctcctggggnntgnangggtagaaaaggncnantgttgggggaggcaagtacaaancatnnnacaagaanncctgtcaaaggagcnnagnagaaggnanatancnnngagcattnnanaatnttaatagatnaatnanaaaggccaaaanggnatctangaggnaatnggncattggngcnagggaagnatagacatggccattcagagaggaaggggggtgggaggggaaggtgtattgtgaaaangggg

SEQ ID NO: 538130 - DNA, 416 bp, Homo sapiens
  misc_feature (14)..(14): n is a, c, g, or t
  misc_feature (52)..(52): n is a, c, g, or t
  misc_feature (61)..(61): n is a, c, g, or t
  misc_feature (100)..(100): n is a, c, g, or t
ggtaaacagatccntcacacctgggcagtttatgtgcaaatattccagagcnaagtccccnggttacagaagtatcctgagtatcctgcattaggagggnccttgttttaaaatttccttaaagaagccaaataggcccagtccgtgggtgtcacgcctgtgatcactttgggagtccccaggcaggctgattgcttgagctcaggagtttgagaccagcctgggcaacatggcaaaaccctgtccctacaagaaattttaaacaaaattagctgggcatgtgtgtcacgcctgtcatctcaactactcaggaggctgagaggtgaaaggatagtttgagccagtgatgttgacactgcagttagccaagatcgtgccactgcattccagcctaggaaacagctagaccctgtctc

SEQ ID NO: 538131 - DNA, 164 bp, Homo sapiens
gcagcatatcatcaccagcctcagcagtaccatcacctccatcaccacttccatcagaatcaccataaccaccatcacctctaccaccactatcaccatcatcactacaaccatcctcttcactatcaccaccaactaagaacggccatgcaccaccacccacg

SEQ ID NO: 538132 - DNA, 194 bp, Homo sapiens
ggattcagttccggagacccagaggtcatctgcgacaggcggccggcagacccttaggacaccggggggtacgcaaccctggcgagaggcgcggcaaccaccggccaccgagggcgcaggaccagcgcagccactcagctcagacagggcacacagcgaagctaagagaccaggggggctaacacgccgacaca

SEQ ID NO: 538133 - DNA, 727 bp, Homo sapiens
acaaaacaaaaaaacaaatactgctagtagagcggttatcgtacgaggatgcctgaggtagagtgagcatggtgcagccccgaccaatgaccactgataagtgctgacgaggtggagaaatacagcagtggcatgcctgattcgcatcgaaaacccaaaccaatattagtgcctctctatacttgacccccagtgaagtactggagatgaggaacaagattcgacgaacaaaacctgacaagatgtgaagtacatgacgtgtggcctcagtacccagctacctgtgcgagcgtcaattgccgagaagagcctgaagcccagtctacagatgagccatgctgatgtccaatggtgagaccgatgtgataccaaaagacgatatacatgatgagatgacagtgtgcccaatcaccctatcagccaaactcactgaccaatgagtttggaggagtacaaataaagagtgttggacgtatgtgaatgaacactagaacttgactggcgacggacacatgaaactgccccaagaagagcctggctacacactgcaaagatctagcaaacctgacatatactacacagctgtcacgacgaccccaaagatattgaagcgcacgcagacacaaagaggccccattttagagactcatcctatccaaaagtcttatagaacaggacaggatactagagaagatctgaaaactacgcaaagtccgtcacacatgaa

SEQ ID NO: 538134 - DNA, 578 bp, Homo sapiens
  misc_feature (52)..(52): n is a, c, g, or t
cgcagccaaggcggatggcgcacaggaaccggaggagaagagatgagccacnccgtgggcgcggacctgacacaggccgtgctggcccgactggacagctgcagcgacccgcgcttcaaggcagtgatgagcgcgctggtggcgcacctgcacgccttcatgcgcgagatcgacctgacgcccgatgaatggatggccggcatcgatttcctgaccgagaccggacggacgtgcgacgcgcagcggcaggagttcattctgctgtcggacaccctcggcgcgtccatgctcgtggtggcactgcagcaggcacgcgccctcggcagtggccagggcgcgacggaggcgaccgaagcgacggtgcagggcccctactatctggacggcgcacccgatcgccccctgggcgccgacatcggcgagggtgttccgggcgagccgaccttctacgccggccgcgtcacagataccgagggcaatccggtcgccggtgcactgctcgacgcctggtccggtgacggcgaaggggtgtgcgacatggcggctggaggacggcgcggcatgccggcgcgcggccg

SEQ ID NO: 538135 - DNA, 368 bp, Homo sapiens
gtcacgcccacaggactccaatgactgaggcaggcagccttgtgatccccacagcgtcacaggtagagagtgcatgctcatacctctcctagcactgtaagagccttgtccttgggaccggacactatggctttggccctgtgtagggagaatcggtgccacaggagttgtcttaataggacaaggcatgcacggtctgagatcagaggttgttgacgtggccacccatgagccagtccgtttgggacacatcacactgcacagctttttaaaaaaataattagctgccaatcttttaaaatggtaagatttcatatacaaatctggatttttggcttctctaggagtaaacattgaaactttttttt

SEQ ID NO: 538136 - DNA, 196 bp, Homo sapiens
ggggaggaatgttacaagtacattcacaaggacaggagtatcactaagtacattatcacacgggtgggggaatgtcaccgtggcttgaccatagtgcagccatgctcacgagtgaccttacaaacagtttcctacttgcacgtgttgtcttgtggcgaaaatataaaacatttaatttctgggattcttttttttt

SEQ ID NO: 538137 - DNA, 789 bp, Homo sapiens
ggcaagatggcagaagtagagcagaagaagaagcggaccttccgcaagttcacctaccgcggcgtggacctcgaccagctgctggacatgtcctacgagcagctgatgcagctgtacagtgcgcgccagcggcggcggctgaaccggggcctgcggcggaagcagcactccctgctgaagcgcctgcaaaggccaagaaggaggcgccgcccatggagaagccggaagtggtgaagacgcacctgcgggacatgatcatcctacccgagatggtgggcagcatggttgggcgtctacaacggcaagaccttcaaccaggttggagatcaagcccgagatgatcggccactacctggggcgagttctccatcacctacaagcccgtaaagcattggccggcccggcatcggggccacccactcctcccgcgttcatccctctcaagtaatggctcagctaataaaggcgcacattgaacgtccgaagacgaaaggcaacagattaaggggaacgaagacagatgtatccttccactcatgagtacctttcattgttaatcccagaccccagaaagactgcgggtgtggcgccgtcccaaaaagtgatactagaagagaggtcattgcatccctaagggcaccacaacagcttgttccaggccagtggagcgtgtctaaaagagcgcgagaggtcaattcccattaattcctagtgccgcattgcatgaatgacagtcgttttgagaaacactgcgagttggctcgtttgcatattgggaggccctctttg

SEQ ID NO: 538138 - DNA, 399 bp, Homo sapiens
aggcagtgtgtcactcatcattctgctcaccgatggcgatccaactgtggtggagactaaccgcaggagcattcagaataacgagcgcgaagctggtggccgatacagactatgctgcctgggattcggcttcgacgtcagatatgccttcctgcagaagctgtcactgaacaatggcggtctggcccggcgcatacatgaggactcagactctgacctgcagctgcaggacttctaccaggaagtggccaacccactgctgacagcactgaccttggagtacccaagcaatgccagggaggaagtcactcagaacaacttacgaatcctcttcaaggcctcagagatgatgaaggctgcggctccaggaccgttggtctgatgtgctgacagccacgt

SEQ ID NO: 538139 - DNA, 785 bp, Homo sapiens
ggcaagatggcggcgagcggcgtccgccatagctacttctaccgcaacagtcaccttcgatgaagcccattttcagtcgcgtgcatcatgaacgaggccaagcggcgggtgcgcgagctctaccgcgcctggctatctgggaggtgccggacatcactgtgcaccaatttccagctggcacatcactgtgtaaaatgggacgggataaagtccgagaaatgtttatgaagacatgcccatgtctacagaccctaagggtggtttgatcttctggtcattcaagggcaatagcatcgaactggcaagtagaacaattaaagtatggaagcagctggacacatgttatgcggttcttcgcattgaaacagaacgcgccaatggccaaacggatttcctatccaagttctatgttggccacgatccatgaagtcattcaggggaaagatgcacgttgatactatctttagagcgacaaataaccttcacttatgcaagtgggtcaaatccgatgaagaagataaggaaagaacacaaaagagcaagaacataaactcagaaaggcagaatagccaaaaataacacaagcacaaaaagaatagagcaacaaaaacaacagaacaatagatcaacgaagatcaagcgacatcccaaccatgagaccaaagccaaaacccccacagggaacacggaccaaaataccaccaacgggaatcccatccaaacgggggaagaaaacaaatgagagcaagcaagacagaggaacacgacagaagaaaaagcaacaa

SEQ ID NO: 538140 - DNA, 714 bp, Homo sapiens
  misc_feature (588)..(588): n is a, c, g, or t
  misc_feature (658)..(658): n is a, c, g, or t
  misc_feature (689)..(689): n is a, c, g, or t
  misc_feature (691)..(691): n is a, c, g, or t
ttaactccttacttgaaacatttagactatctagatgtttagaagtgcccgatgtatattaaatgtagaggtagtaaaataccaatttgtaaatatctttttgctaaaattcataggaaatacttttggaagttgaattgtgaagccacctttgtgagcagtatattactgtctatacttgctcaatggtttagaggaggtgggagggaagaaattgcaaaagataatatgctagtgtgttcatacttggacattttcagacaccatttttctgtatgttttgtgcattttgttttgctctgtatatagtgtatataatggacaaatagtcttaattttttaacatctagaggttgccagtgtatgacaaagtagtaaaattaacatattttgtatgctttgtgttgaaattcataggaaaacttgtcttctgtaattgacttttgcataggaatttgttcagccatctctaagcattacacatgcgtgtacttgtccactgaattgaaggcagagaaggaagagaagagggaatgattcaaggccaaaatggtcacatttagaagatccttagatgataaccattgntatgtgtgtgcagtttatttaacagtgcccgtgtacatggtggacaagctatgaaatatctagtctttanatgtttggaagtgcttgatgtattttaaagnantagtagtagaataacactttttg

SEQ ID NO: 538141 - DNA, 538 bp, Homo sapiens
  misc_feature (16)..(16): n is a, c, g, or t
  misc_feature (22)..(22): n is a, c, g, or t
tttagggaagaatttnggtaantttcagggttacagtgtataacatgtgttggaagtttgagcattgaaatttcaacagacgccacaacctcgattgagggaaaatgagctaaccgactactgctgcaagaaggacctgtgtaactttaacgaacagtttgacaatggggggatactcttatcagacaaaacagtgtttctgctggcgaatgcatttatagcagtatactgtagcctacatgcctaatcccatagcacgagatcttggtcgaaactcatcgtttctgctaaatatgataccactaacataactatccgcccggcccgaattccgatatccgcttccaccctggcaaagacgcaaccagagtcgccctccccccatctattatgtcccctctccgcctccatcaccacctcccccaccttcgttctctcctcccgtctcccctttatctgtccttccctcacactcgccactctacgttaatgtttagttttttttcagaatattcaattatatatagatgatacaatt

SEQ ID NO: 538142 - DNA, 217 bp, Homo sapiens
gtcgttgattcgctgtgtacggtttcttcgagcaatagcagcagactcattggcgctacatttagtagaggaaccacgtgtgtaatgttatacaacacagtctactactacaatcatccctcttagagtaaaacctacctctctattgtggtaagcttttactgtcccataaagacaggagccacagtaggcgttatgaatgcgtccgtcgaacgtg

SEQ ID NO: 538143 - DNA, 152 bp, Homo sapiens
gcatcctttgggctgatatccatatgagatcatggctttgctgtttgtgcatattagagatgagactgcctctcccaccacaccagttgactactacacactgctcatttgagacctgtcagctgaggggggcaggcctagggtttccattc

SEQ ID NO: 538144 - DNA, 178 bp, Homo sapiens
cggctgtacggacgcggatacaggcatatggctcgcgggaatgggggtggacatgttcgactctcccgttgagaagtgatgctcggcaagcacaatgagggcgtgttgccacagtgatcaaagataacggcgcgggggtgggcgcggttagtcaattcctgcagggcgtccgtagcgg

SEQ ID NO: 538145 - DNA, 860 bp, Homo sapiens
gtgtgcgctcaaaaaatgcaatccccgcccgggtgtaatattatagccgtgcgcagtggctggcccctaacaattagggtccggtgtggaagtgtccgacacgaaagagcacaggggagcgattaatcgcccggttgcccactaaattgtgtggccgttggtcagccgtcgtccgccctatattcgcccgatggcttgttaccattcgcagccttgttgcaagcgtctgaagaaatttattgcaagcatggtcttcagtacatggtcgaatgttatgtgcctgcgcgcccccttcgggggctgctttaatcgaactcgtgtgggcccccagttcaattcctcggatacaaccacgtttggcagcccctcaactgtttagtggcgttacatcgcccttgtgtgcagtgtagtgttaaaacaacgggcgttgggtatgaaatggatctgcccccccgagcccgattttctgccgcactgtggccaggaaacccacctcgcagctctttgttcgggggccacccccggagtgcgttccgcggcgccacgcacgacatctccttcattgctgtctccttgtgagggcgtaccacgctgtgccgaacaaccaaacagatctatagtacgtacactggggcgtgagaccccgtgccttcccacggtgcaagtgcgctcaagtacaacatgggccactaaaaccgcggggagaaaaaatatggggtgcgcgcccacagcctacccacgctgcggggactcacccgtatcaccccggtgttagcaggcagcctacagggaagtgccacgcacaccccccctacaaccccggtttcccacccccgtcccaacccctttccacaaaaaca

SEQ ID NO: 538146 - DNA, 667 bp, Homo sapiens
tcctgaggctgggtcatgggtgcacaccctcaaccttgtgcaaaataaactttctaaattaactgagacttgtctcagatgtgctgggttcacatttgggtaaccacagggggatgctgagtggagatacccctgatctttgacaaatatcctgatggtgctgtggtaccagcatgagctaactttatggttcaaaccagtaggacaatttgccgggcatcccctccagagaatccctgagctccaaaaatttggttgagatcagaagtttattttgctgtacaactcctcttttgagggagtattactgtgcttccaagaggaaggcaggtttacggcgtccatgatgatggacagggagacaactcctttatggagtatgagcttgcttccgaacagggaagcatgaggtttgagatatccttcttgcataggatggtagaagagcggtctacagactggggaccatatcgaccagctatggaacaggaggcgaccctggggtttcaggaaagagtgtggttgcgcggggaggctcatgccgggatccaaaacagttggggacacggagggggggaggacacaggaggcgggagtacagaaccagatgggacacctgggtggaaacctatgtctactaagatacaaaattagtggactggggacc

SEQ ID NO: 538147 - DNA, 139 bp, Homo sapiens
ataataatttctgcaaaccccccccccaacaccaattcctagtctaatgttaccctaccacttgtggctgtaatacttgaccatgtacttaacttggaaaccctatattccaaaagactgaaacctgaatcttcacccc

SEQ ID NO: 538148 - DNA, 128 bp, Homo sapiens
cgagatgcgacgacgctcgaaatcgacgaatcacgtcaacttgttgtaagtcctgggacagccgcagcgaactctgcagctccactgtgttccatgtacctgcacggtccagcatgcttgatcagtgt

SEQ ID NO: 538149 - DNA, 560 bp, Homo sapiens
  misc_feature (28)..(28): n is a, c, g, or t
  misc_feature (86)..(86): n is a, c, g, or t
  misc_feature (88)..(88): n is a, c, g, or t
  misc_feature (120)..(120): n is a, c, g, or t
  misc_feature (124)..(124): n is a, c, g, or t
  misc_feature (219)..(219): n is a, c, g, or t
  misc_feature (232)..(232): n is a, c, g, or t
  misc_feature (275)..(275): n is a, c, g, or t
  misc_feature (321)..(321): n is a, c, g, or t
  misc_feature (331)..(331): n is a, c, g, or t
  misc_feature (363)..(363): n is a, c, g, or t
  misc_feature (365)..(365): n is a, c, g, or t
  misc_feature (409)..(409): n is a, c, g, or t
  misc_feature (416)..(416): n is a, c, g, or t
  misc_feature (436)..(436): n is a, c, g, or t
  misc_feature (447)..(448): n is a, c, g, or t
  misc_feature (454)..(454): n is a, c, g, or t
  misc_feature (541)..(541): n is a, c, g, or t
ggaggagcgaatctcgggctcagccagngctgggcatggggctctctctccgtggagtatgggcctcagggaggctggggtgggangncccagggtccggtaggagggcagggggtggtnagcnagcaccagggcgcagtgtagagctggggcagcagcatttgcgggttcagcagctcaccaggtacatccctgtggcaaacctcctcttcacagcgnaatgcggtaccgngtgcccaccagttcaagtccacgcccgacagagtggtcccctngctggtgaacgtgtgtgtagccgacggggcgtggggtgtgctgggntctgagagcngctcccaagctggatagagggctggccaaaancngccttgcctgttggacacaatatgtgaagccttccaagtgagcngcttctnctccaggttccatggtggangctgggtgaanncggtcngtgtggtacaggcttcccccacaggcagcaggagtctggacgttcgtgagtggtgtgggcacagccgtggcaccgggccggtagccntactccactgagacctggg

SEQ ID NO: 538150 - DNA, 1252 bp, Homo sapiens
gcttaacaggacgcagttcgctcgcgcggtaggttggcgcgggtttggtgaggtgttccagtcacctttaagagatgttagcggctgtgtgtgagctggcacatcaatgggtattcggtagatcgccctgactaatggttggtggacaaacatcgatggaacccaacgctgactgttgcctgccggtggccggtgtggagcgacatttccggtacgcagatggcactgctagcaatatctgctctgtcctccaggcagaacctatacgtgaccgaaggatgccacatgtcatgcatcgcccctgagatatcgttggaggggttcatagactccctcattgtcacgcttcagaacgtgataccgatcaggcggtctactatcctggctgtacgcacaaccgtatctgatccagggaatcgagatggcttacctccatggtgcgccttcgctgatacgaaggcttctgagatggtcatgatgtaggccgattctccagcaaatggtggagtggtcggtgtgtgccctaatggaagaacgagtgggtgagtgaaggtatccaacgccaaggaggaaagctcacggcctgtccaggaataaagtagagagagacaagggaacacgctccacatcaatcaccaacgtcactggggaactcacaggcaaacaactggggtacagtgatagagcgtaagcgaaggaaaacacatgtggaccggcccgttaagtaccaacgcgtgttggctgaactgtaccccactctggtggcgaggaatcacccctgcgggaaagggtcccttccagccgagcctttaggttcatttttacacgtgatgtgttcttgcatttcctcactaccgtatgtagacttgtggctaaatttcctcgctgcccagaaaagcccaccttcccattgtgcaggaccagatgacaagggcgccatgggttggaataccatattttcctcggggggggatagaagcccttggaacaattacacgggcgccacacacggcaccccccgagtttggaaccccagaccttgcgtggaagttgggcgagtttctcacagcccttggcgcgaatagtggtcttttttgggagaacaggaacgaggacggccgcaatgtgaggcacgcaaaagggtcggcgacttcgcgcacctaggcgcgtttggggcgtacaagagttaaaccttttgtggaggtagaacaagagttcttaggcccttctccactggagtacggggcccatc

SEQ ID NO: 538151 - DNA, 265 bp, Homo sapiens
tgtttcctcagcctttcaacctcgagctcgacatacaacaagggccaatctctggcgattgtggctacataactcagggctcgcactttcaacacccagcgtacagagaaagtcttcttgaatgcaacaccagctaccagctgagaatcctcgagggctccaccctgctaccttcttgattccaatcatttcaagctgcagcaaatcatcgagcatcatcacagcatccaccaccatcttagcaaagaaagctttctgctgggag

SEQ ID NO: 538152 - DNA, 250 bp, Homo sapiens
  misc_feature (200)..(200): n is a, c, g, or t
atcccctcagtatcgcggaacatactatctaccctaacatcacacaccgcacaatcccctatctagcgccttcttactagccataacctgcccctactcctcctagacctaacctgactataaaagctattacctaaacacaatttcacagcaccaaatctccatctccatcatcacctccacccaaaaaggccttattngagcgtttacttcctctctgtcttcttcccactcatcccgcgatactcca

SEQ ID NO: 538153 - DNA, 122 bp, Homo sapiens
  misc_feature (47)..(47): n is a, c, g, or t
  misc_feature (116)..(116): n is a, c, g, or t
  misc_feature (118)..(118): n is a, c, g, or t
tgccggtcctggcgacggtggtgacactgcgcaccatctggatgttntacatgttcgcggatgtttatttgctgacgaccaaggtcgatattttcggtgtatatctctacaaaacngncttt

SEQ ID NO: 538154 - DNA, 147 bp, Homo sapiens
caggaggatcacttgaggccagggagaccaccctgggtactatagtgagacctcatctctacaaaaactaaaaaagattaactgggcgtgttgacatgtgcttgtattcctgactacatgagaggccaagcagtcgtcgcaaccggg

SEQ ID NO: 538155 - DNA, 404 bp, Homo sapiens
  misc_feature (7)..(7): n is a, c, g, or t
  misc_feature (14)..(14): n is a, c, g, or t
  misc_feature (44)..(44): n is a, c, g, or t
  misc_feature (107)..(107): n is a, c, g, or t
  misc_feature (149)..(149): n is a, c, g, or t
  misc_feature (265)..(265): n is a, c, g, or t
  misc_feature (372)..(372): n is a, c, g, or t
aaagaanatatatncccttactgcccgttaaaagccaatgaggnaagacacctttcctaaaacctgccccttgagttgaaatattttttatgaacctatttttgaantggactcccatttaaaagcaaacattggtggagcatggtagnctcacaccctataattcccagcactttgagaggcctaagatgggaggatcacttgaggcccaggagttcaagaatagcctgggcaacatagcaagaccctgtttctacaaaaaatnaaaaattacttagacatagtggtgtgtgcctgtaatcttaactactcgggaggttgaggtggaaggactgcttgagtccagaagttggagactgcagtcagctatgntcacaccagtgtactccagcttgggcagcaga

SEQ ID NO: 538156 - DNA, 628 bp, Homo sapiens
tcgtctgtaccacttctcaattaataccgggggagaaaacaggcactgtgtgctatgtaaccttgatttcatgaaggactatctgttgtactaactataaactttgatcacctatgttacaaccttatgtcacattgccagcatcgattaacgaattgagtgcgcaagtgggaatagtctcgatgtatcattcgacatgggtatggggactgccgccatctttctgttagagaaagtgtgacgagtattcaatctgtgagtagaagaacgctgattatgtacgacagtagtgtggagagaaacaggagaagactcgttagtatggagtctcttaaatgaaggtgtatgtaaagagctgtacaaatacgtattgtctaaaatgcgattttaaaactctcgtatttaatatcccgaggacacaacgcgtacaaggctacaagaaatcactgggatattgacccatgcaaggacgtgtcaaggtggccaaccaaaagagcaacactaatactagcacatcgtacacggggattgcgaggtgcttcccagtattattgaacaactgttcagacaacttgcctgatgttgacactgagcgctaaagggcctctaacctatgcaggttccccca

SEQ ID NO: 538157 - DNA, 346 bp, Homo sapiens
cgggcaatagagtgagattccatctcaaaaagaataaaactaaatacaactctaccggctacggatatatatataaagcctttatgtgtttctcataaggaaagccagggggggactggcctttaaagcctaatatccaacttaattaccagcacctcccccaagcagagggtcttaggggaaagactgctgtccttacaccttgaatagagacacgttacactactctctatagactgctaattagaaggcatgagagagctggcagtggggatggacagacagtgggactcgccaatcaaatcatgcacttgggagacttactgcggctggagggggccgcgcg

SEQ ID NO: 538158 - DNA, 756 bp, Homo sapiens
  misc_feature (2)..(2): n is a, c, g, or t
  misc_feature (70)..(70): n is a, c, g, or t
  misc_feature (95)..(95): n is a, c, g, or t
  misc_feature (104)..(104): n is a, c, g, or t
  misc_feature (197)..(197): n is a, c, g, or t
  misc_feature (202)..(202): n is a, c, g, or t
  misc_feature (253)..(253): n is a, c, g, or t
  misc_feature (266)..(266): n is a, c, g, or t
  misc_feature (337)..(337): n is a, c, g, or t
  misc_feature (348)..(348): n is a, c, g, or t
  misc_feature (386)..(386): n is a, c, g, or t
  misc_feature (398)..(398): n is a, c, g, or t
  misc_feature (401)..(401): n is a, c, g, or t
  misc_feature (413)..(413): n is a, c, g, or t
  misc_feature (436)..(436): n is a, c, g, or t
  misc_feature (439)..(439): n is a, c, g, or t
  misc_feature (487)..(487): n is a, c, g, or t
  misc_feature (533)..(533): n is a, c, g, or t
  misc_feature (610)..(610): n is a, c, g, or t
  misc_feature (626)..(626): n is a, c, g, or t
  misc_feature (632)..(632): n is a, c, g, or t
  misc_feature (634)..(634): n is a, c, g, or t
  misc_feature (706)..(706): n is a, c, g, or t
  misc_feature (735)..(735): n is a, c, g, or t
  misc_feature (737)..(737): n is a, c, g, or t
  misc_feature (749)..(749): n is a, c, g, or t
gnttttcactttgaatttcaaagtaaattagagatatgtaaataacagcaattatcaacattaaaatctnattcacacactcgcgcctcaacaanaacaggatnacagtcaacgctcagtcgctttttaataaaatgagcagaatcccatcgtaacaatactttgttacatgaatccaaatacacagcagaccaatnatgtnccctgaaatttaacaatcaatcatacttaataaaggcctgtcagtgctgtncctcaagactctnattctaaagggcttcctttgaattccctttataaagctttgtgcaaagaagagcttaagcaccagtcaganagactgtggcnagcatttttatttcatcatcaacaacaaacatgcagtntctttctctgangtncatgggactgtnaaatgggtgccacactctctctngtngtacaaagtttataaatacagtatactgatacaaagttgaagccattnaaaagagcttaataacaactatgaggagataattaaatctggagtnttgatggaatctatgaagagattcagaaacaagacataaacactacggtaaaagtcttacttgggaaggggccagangggaactttttatgtnccactnanagattttttaagttgctccagatttactttctttctgctattatctttaaatactgcaaagcattgtgagcngcatcactttgtgcattgccacaggaganancggagccatganagaatgt

SEQ ID NO: 538159 - DNA, 1238 bp, Homo sapiens
gaatgatcccatgggatgtaggaattgcgggcatcacgaggaggttggacaaacgaatctgtatccacctttgccgagaggaagctgcccggtgctcagatgttacctggtttgcatcttgcggtgagccattcccacacaaactcacggatgcagatagcatctcacggagactgggccccggagacgatcggagaagggctagctcgaggctggcaggagcatccaagcacgtcagtcgatgacgcggacctcgtctccaatgcatgcccagatgacgagaacggtgacaaggtctgagtcaacacagtgttgaagagaacgagtctagtgagccccctccctcggcaccatacccccctaagcactgaatgagtgtgcattgaatcactacacttgagagcttaccaggggtctccaactccaggagcggatcgcaccagtggagatccgactaggacagtattgcatcgtgtggagtcattgggagattcgcgtacccttgagaggagatagcaaagaggctgcgttgacgtagggccctaggatggcgataaataagtaggcaatatgggtacccgggaaactcgagtgtcgaccttcgacgcggtgattccgtacatgtgggggcaccgaaacgcaagccccaactcgtgagcccaccgaacacggggaagtcgccatacactaggtccacaagcaagcgcgcgcaacccgctttgcgccatggggaaacacgaccgtttacgcaccattgcaagacgaattttcactacctaaaggaagggcgcaaccctgtggttgggcgaggccgcagaatggggaaaggccaccgcttttttaataggaccatggtggcatatggcccctgtttatccaagcattatactggacagcggcgccacaaattcggtggttcggccaaaagacgacgggattgggggcgcggcaacggacgcgaccaacgggcaaattccacccgatagcgtgagccccaaacgacaagcatccagcggagtcaccataacacccgtgtccatgccgcacccacccaaaggctgtgcgcaagaacgcgggggccgccccgtaagacaacgccacccgcgtgtagaacaaggttcacaccccaaagacgcagtattggcaccgaccccgccgcgcctctcacacggactaaaggcacccaccaacacagacgtgagagatgatacccgacccactggcacgtatcagactgg

SEQ ID NO: 538160 - DNA, 583 bp, Homo sapiens
taacattagctttcgtagcagtttataccataagatgttctgactggtttgtacactaggtgggtcagctagtagaatttaggcatttatacttttcctgagttatactcccagaacctcctcagagttgcatgtagatagcatttatttctgcatatttaaaaaaaaaaaaacccatttaggaaatatctacaaagaagaaatgaaaaatagtaattattttttcatgaagattttggtccacacctcattgagttgtaatggattctccagtttcttgagttggcaataatcaacatttggtttggagagcgagcatgagagagcgtttgttagtgaaactcacagacttctaaaagttcattgctacagttatcaaagtgggggaaactaaaattaccttatcaaggaaaaaatattaagtcacaagccatatacatttagctcccaagccataatgccgaacagctttggagtatcgtacagaaagctcattacaaaatgcttgcgttttcttttctctggaacatcaacaccagtgtattgctggcagctattgtattaaaaaaataaatatattttc

SEQ ID NO: 538161 - DNA, 1179 bp, Homo sapiens
gcagaaagccaggatcatagagacgctcggcctccgccgaatgcgctggcggactaagagtggcgggcgaagcgagcggccggacgcgggcccctggacgggcgtggcggtacagcgcccaagcctgaggacccggacctgagcatcgcagggcccaggacgaggtggccaggcggcacccactatggcagtctcctggtcgtaggcggagaaccggctgggcgatgagtgagaacctcgacaacgagggcccgaagcccatggatgagctgtggccaggagatgcagcagtgccctgagctgccctatccgtctacaggtgccccctgcagaccccgggcagccctggacggaggtggagaaagcagggcgctgtggtgcgcgctacacgcggccggcggcctcagccccgcggctctaccagctaccatcagcggatgacttgtttacctctgagatctttaaactgtagctgccgaacgtagcgtcgaccacgcccacggttcagcggatcgtccgagcgcttacctgggccggttgggtctggcagacccacaaaaccaaacatctctcggggccatcaaccttggcgccgtattgtagacatttcccgaggcgcatagcagcagagggacaacgggccctgcgacgtattgcatggtgcacctcttggaaagggccgaccactccagtgtgagcctggcctggtccaaaaggcgaaacccatggcaccaggaaggacggcgcaccacacggaaggcgtgcagaagtgaagccaacaaggtaatcccgaatgggccgaacgtgtgtgcaccccttctacttgacagtggccctatgcctgacccactttaccgacaatcacatcgacgtgccaaccaggtgctggcacaactcgcgccacgcacaccggcaggacaaccggccgctgcaggcccggcaggccgaaccaggaggcagacagacaacaccggccggatcgccctgaaaaggcctaagcgaacacccgagagccactgacccagagccaccgaactatagatgtacaccgccagctgggagcaccacaagacgacaatacgcaaaccgcgcacaaagagcccaccgacacagcactgaaagacagcacagcgcatgcaaccaaacgaacaaccacccacacaaacaccagaaataaca

SEQ ID NO: 538162 - DNA, 1151 bp, Homo sapiens
ggttgtgccaaggcgctgcactagtggttgcggttggtgtagtggtggggtggctgtggtgggtgctcccgctttttgggtcgtgctgggcggtttgttgtcctctgttgagaggtgtgtgtgctctggtaagtcgccccctttgtttgccacagttgtgggggccccccggcagccggctccgggtgttaccggggtcccagcttgctttcgggttttgttgagtgcctcccgtctcctggttgattcccctggttgtttgttgcctgtgtgttgtggccgcccccctgtgaaggagtattggcggacattcttgcacgccctggggaggagtaggcgctaattttcttgctctggagggggtggaccgtagccctgggtcccagtgacctgggacgaagttgcctcctggaaaagaagaaggtggtccaaggagtgggttttgtcatataaaattttgggtaaaggattgaaaagaggttcgtgtatcggcacttgacacaactaaccctttaagggggaaagataaagagttgtcctcgtgctacctaaagtgaatgccgtgagacaccttaggccacctcaatcccacgaagctaagtaatgcttttgtgaggtgttcacaagttgggtttatattcttcacccgagttcgggggtaaaccgggcacctgtgaagaccggtaatggaaaacactgaggggttaaactcttgtggtggtttaaaaaggtgttttatacccggtccaagccgcgagtgcccttgaagtatgagcccaagttcttggttatttgaagtgtttctgaggctgtatcttgatgtttaagaaaagtattcggtaaactcttgtaagagtttactttttggaaactttgtgcacttccccgtagttgaccacaattctgcactgtgaactagtgccttctagaaataggttaaactgaagccacttgatggaaggatctctcccccgggcttgttttcccaagaataagtattgtttggaggagcccaagtttaaagcctacctaagcatattcgtaaagctgttccaaaatattactctcagaccccgttttgtggctgccaatgtagtgctcgagtccaccttttgcttaaagttgtaaccaaaaccagatgagtttaaaga

SEQ ID NO: 538163 - DNA, 241 bp, Homo sapiens
  misc_feature (11)..(11): n is a, c, g, or t
  misc_feature (53)..(53): n is a, c, g, or t
  misc_feature (78)..(78): n is a, c, g, or t
  misc_feature (124)..(124): n is a, c, g, or t
aattggtctcngtcatttggaacagatgttctctgaaataattgaatgatccntgggtctggatcagtattgttattncaacccacgtatgtgtgaccatggttttctactcgcgtaatgtctnaagcacatcggagacataaatctccctgtatgcttagtttgtgtcattgccactgtatcaatgagaaatgtcttcaggcagggtactgagcataatacggtcggcgatctagaattc

SEQ ID NO: 538164 - DNA, 187 bp, Homo sapiens
  misc_feature (58)..(58): n is a, c, g, or t
ggcgctggagcacgacttgcactgcgttgtcgacgctcccggtctgtctccttcatgngtgaaaaagctggtggaatcctcacactgttcatgctaggggtgttctctgtgcacctctacggctacgccgccgccgccgcgccgcggtgcagatcttggtggtggtagcaaatattcaaacgagaag

SEQ ID NO: 538165 - DNA, 331 bp, Homo sapiens
gagctcgaattccgaaaaccttccgcctgcgtcattctatgactcaaactgagctacatgtaacagttacctccctgagctaggtgttgcatctgactcagacaccggagtagcccgtattacagacacttgccaccacgcctggatagctttgtattctcagcagagactagcaatcaccattgatgaccatggtgggctcaaacttatgacctcaggggatccgcccacctcgcactcctaaagggctgtaattacaggcgttagccaccatgcctgccctgtcacggcgatgatcttaaggtctctgatgctatgccttctctgaaag

SEQ ID NO: 538166 - DNA, 575 bp, Homo sapiens
  misc_feature (6)..(6): n is a, c, g, or t
  misc_feature (423)..(423): n is a, c, g, or t
  misc_feature (432)..(432): n is a, c, g, or t
  misc_feature (527)..(527): n is a, c, g, or t
ggcatntttcacgatattgattcttcctacctacgagcatggaatgttcttccgtttgtttgtatcctcttttatttcattgagcagtggtttgtagttctccttgaggaggtccttcacatcccttgtaagttggattcctaggtattttattctctttgaagcaataacagaatgggagttcactcatgatttggctctctgtttgtctgttattggtgtataagaatgcttgtgatttttgtacattgattttgtatcctgagagtttgctgaagttgcttatcagcttgagggagatatgggggctgagacgaaggggttttctacatatacaatcatgtcatctgcaaagaggggacaatttgaggaaaattcttggggcccaccccagaccccactgaatcagaagctgagggggtngggccccgncaaactatgtttttgtttttgtttttgtttttgtgttttgaggacaaggattcccctgttcacacaggcgggagtgcagtgacagggaacccggncccactgtaacctccacctcccgggggtccaagtgattctcctgcctc

SEQ ID NO: 538167 - DNA, 748 bp, Homo sapiens
  misc_feature (40)..(40): n is a, c, g, or t
taatttgtatttttagtagagacggggggtttctccatgntggtcaggctggtctggaactccagacctcaggtgatacccctgcctcagcctcccaatgtgctgggattacagctgtgaagccaccgcgcccgggctgctgtgatagttgagatgtaaaccaaaaataaaattctaagccacccaatccgactgaatggacccttcctgttgagcaaggacattccaaagtaaactgaaaagaccagcttaggccatgatgggaaggggaggtgtcaacatgcctcattctaccttcctccctctggaatccagacacaactgaccagcattaacattaaaacagagatcttaagctgggcacagtggctcatgcctgtggtcccagcactttgggaggccaaggtgggatcacctgaggtcggaagttcgggaccaggcctggccggtatggtgaggccatgtctctactaaaaatacaaaattgggccggacgttgtggtgcacgtctgtcatcccgggttcaagcgattctcctgcctcagcctcccgagtagctgggattacaggcatgtaccaccacgccgggtaatttgtattttagtagagacgggggggtttctccatgttggtcaggctggtctggaactcagaacttctgggataacctggcttagctccaatgggctgggattcaggtgtgaacaacgggccggtggtgggtttttggatgttcccaaaaaaatga

SEQ ID NO: 538168 - DNA, 305 bp, Homo sapiens
ctggttttccctcaacaacatatattatacttgctactggacaagtgtttaagacttagctaggtttccattcagatcttcatatctgtcgcatggcagaaagctgggttcttggcatagacttgcatgatatgtaagattttggggcattcaaactggttaaaatttggtgctccaaaagttgacattagcatgtacaggcaggtttccggccggggcaccaaaagtttaaaaaagttgtctaatatttgctgttgtatacccaaatacgcaccgaataaactctttatattcattcaaaaaaa

SEQ ID NO: 538169 - DNA, 634 bp, Homo sapiens
  misc_feature (254)..(254): n is a, c, g, or t
acgtatctgaaaactggagggccttcaaggctctcatcgctgctcagtacagcggggctcaggtccgcgtgctctccgacaccagcccacttccatttgggaccaaaccaaccgtcacccctgaatttctccgcaaatttcctgtcggcaaggtcccagcatttgagggtgatgatggcttctgtgtgtcttgagagacaagcgccgattgcctactatgttgagcaatgtaggagctgccggggaagctactnccagatggcagccagcccagcgtggctgcagctgcggtgaagcttctgctggattcccgatgatagctgccccccagccagataccgtgggtgttccctcaccttggtccatcactgcaccacaacgaaactaggccactgcagaatgcacaaggaggaagtgaggcgaattctggcggctgctggatgcttacttgaagacgaggacttttctggtgggcgaacgagtgacattggtgacatcacagttgtctgcaccctgttgtggctctataagcaggttctagagccttctttccgccaggcctttcccaataccaacgctggttcctcacctgcattaatcagcccccagttccgggctgtcttgggcgaagtga

SEQ ID NO: 538170 - DNA, 197 bp, Homo sapiens
gcaaagctgagaacatggacggttaatatcgccccactccgcgccttgggacgatttctttcccggggttccgatcgcttttcccggccggactttcagggacatttccaaatgggaacaaccgcgtagtggggcaacctgtctctttttaccagacaactacctggggggggggctgccatgaaggatttccattg

SEQ ID NO: 538171 - DNA, 191 bp, Homo sapiens
gtttgcacgcagattgtaatgggtatggcagacatgtcatactaagtaatgctaaggttgagtggtatcgaagttttttcataggaggctgtatgagattggtcgtaacggaatcgggggtatgctgttcgaattcataagaacagggcaggttagaagcagggtcttggttaggaaaggccttggtgagg

SEQ ID NO: 538172 - DNA, 222 bp, Homo sapiens
accgacatacatctcgacgaaggatgagccggtagtgatgaacattgaggcgtcggcctcacctgctagagcgcgcgccaggagggtcttgccggtgcccggagggccgacgaggagaatgccgtgaggcagcttggcgtcgtgccggttgaagacgtcgggttcgcgcagccattcgcagatctcgcgcaggcggtttatggccgtcggctgaccggcaac

SEQ ID NO: 538173 - DNA, 1068 bp, Homo sapiens
  misc_feature (319)..(319): n is a, c, g, or t
  misc_feature (323)..(323): n is a, c, g, or t
  misc_feature (337)..(337): n is a, c, g, or t
  misc_feature (340)..(340): n is a, c, g, or t
  misc_feature (357)..(357): n is a, c, g, or t
  misc_feature (368)..(368): n is a, c, g, or t
  misc_feature (370)..(370): n is a, c, g, or t
  misc_feature (372)..(372): n is a, c, g, or t
  misc_feature (402)..(402): n is a, c, g, or t
  misc_feature (416)..(416): n is a, c, g, or t
  misc_feature (470)..(470): n is a, c, g, or t
  misc_feature (480)..(480): n is a, c, g, or t
  misc_feature (488)..(488): n is a, c, g, or t
  misc_feature (496)..(496): n is a, c, g, or t
  misc_feature (509)..(509): n is a, c, g, or t
  misc_feature (515)..(515): n is a, c, g, or t
  misc_feature (521)..(521): n is a, c, g, or t
  misc_feature (524)..(526): n is a, c, g, or t
  misc_feature (537)..(537): n is a, c, g, or t
  misc_feature (546)..(547): n is a, c, g, or t
  misc_feature (549)..(549): n is a, c, g, or t
  misc_feature (553)..(553): n is a, c, g, or t
  misc_feature (561)..(561): n is a, c, g, or t
  misc_feature (564)..(564): n is a, c, g, or t
  misc_feature (566)..(566): n is a, c, g, or t
  misc_feature (577)..(577): n is a, c, g, or t
  misc_feature (581)..(581): n is a, c, g, or t
  misc_feature (595)..(595): n is a, c, g, or t
  misc_feature (603)..(603): n is a, c, g, or t
  misc_feature (609)..(609): n is a, c, g, or t
  misc_feature (614)..(615): n is a, c, g, or t
  misc_feature (633)..(633): n is a, c, g, or t
  misc_feature (636)..(636): n is a, c, g, or t
  misc_feature (648)..(648): n is a, c, g, or t
  misc_feature (652)..(652): n is a, c, g, or t
  misc_feature (656)..(656): n is a, c, g, or t
  misc_feature (659)..(659): n is a, c, g, or t
  misc_feature (662)..(662): n is a, c, g, or t
  misc_feature (680)..(680): n is a, c, g, or t
  misc_feature (682)..(682): n is a, c, g, or t
  misc_feature (688)..(689): n is a, c, g, or t
  misc_feature (697)..(699): n is a, c, g, or t
  misc_feature (712)..(712): n is a, c, g, or t
  misc_feature (722)..(722): n is a, c, g, or t
  misc_feature (730)..(730): n is a, c, g, or t
  misc_feature (734)..(734): n is a, c, g, or t
  misc_feature (742)..(742): n is a, c, g, or t
  misc_feature (744)..(744): n is a, c, g, or t
  misc_feature (750)..(750): n is a, c, g, or t
  misc_feature (753)..(753): n is a, c, g, or t
  misc_feature (759)..(760): n is a, c, g, or t
  misc_feature (769)..(769): n is a, c, g, or t
  misc_feature (771)..(771): n is a, c, g, or t
  misc_feature (778)..(778): n is a, c, g, or t
  misc_feature (801)..(801): n is a, c, g, or t
  misc_feature (820)..(820): n is a, c, g, or t
  misc_feature (827)..(827): n is a, c, g, or t
  misc_feature (830)..(830): n is a, c, g, or t
  misc_feature (832)..(832): n is a, c, g, or t
  misc_feature (841)..(841): n is a, c, g, or t
  misc_feature (844)..(845): n is a, c, g, or t
  misc_feature (847)..(847): n is a, c, g, or t
  misc_feature (850)..(851): n is a, c, g, or t
  misc_feature (865)..(865): n is a, c, g, or t
  misc_feature (869)..(869): n is a, c, g, or t
  misc_feature (884)..(884): n is a, c, g, or t
  misc_feature (886)..(886): n is a, c, g, or t
  misc_feature (891)..(892): n is a, c, g, or t
  misc_feature (901)..(901): n is a, c, g, or t
  misc_feature (920)..(920): n is a, c, g, or t
  misc_feature (922)..(922): n is a, c, g, or t
  misc_feature (926)..(926): n is a, c, g, or t
  misc_feature (946)..(946): n is a, c, g, or t
  misc_feature (959)..(959): n is a, c, g, or t
  misc_feature (979)..(979): n is a, c, g, or t
  misc_feature (984)..(984): n is a, c, g, or t
  misc_feature (996)..(996): n is a, c, g, or t
  misc_feature (1000)..(1000): n is a, c, g, or t
  misc_feature (1008)..(1008): n is a, c, g, or t
  misc_feature (1068)..(1068): n is a, c, g, or t
ttacattcagtaacactgaatgtcagtgcagtccaatttacaggctggagcagcagctgcatcctgcatttccccgaagtattacatgattttcactccttgcaaactttgccatctttgttgcagagaatcggaaatcaatatgcatagcaaagtcacaatcatatgcatcagatttctcttttggtttcttttgctctgcatgcttattgggaagtcacatactgaagatgacatcaaaattgcaacaaagaatggaaaagtcagagggaggaacttgacagtttttgggggcacgggaacagcctttcctggaatncccnaagcacagccaccnccnggaagacaacgaaccanaaagccacagncncngaccaagaggcccgaaaaccggaatgccanaaaaaatgcaaaancatgcggtcagaacatagatcaaaggtgtccaggattaaatggataagagttgngggaaaaaanaaatgtantaagtgtngaatgtttatatntaaatntatggnttnnngaaaataaaanaaaaaatgnnantgtnttgttatngantnatggtgggggntttnaaaatggaaaatantatttaantgtttntgatnnaatgttaatggaaagggntgnaagagttattgnagtntaantgnaanaaagggtgggtgaaaaangnttattnnatttgaannnttataatgggganaaaggggaantgggtttntttnttaaaaantnggaaanaangggggnnaaaaaaatntngaagaantgggggggtttaatttatgtgtnatatatttggtgtttgtgnggggganganantgtgtgaanganntngannaaaaaggggggaanttangtggaaaaagggaantnaaganngggggaaantaatgaaaatggggggggnanaaanttttgtgagagggacgtagnggaaaagagtaangaaggggaaaagggggtggnagganaaaagggaaagnaaangaaaaagnaaaaaagttgggattgggaaaaagggaaaaggaggaaagggagaggggggggggaaaagn

SEQ ID NO: 538174 - DNA, 417 bp, Homo sapiens
  misc_feature (348)..(348): n is a, c, g, or t
  misc_feature (353)..(353): n is a, c, g, or t
  misc_feature (410)..(410): n is a, c, g, or t
aaccaacaacccaattgaaaaataaacaaaagatctgaataaatactaagatacacagatgggaaataagcataagaaaggatgcaaaacactttaagtcatgaaggaaatgtaaattaaaataagataccagtacatacatattagagtggtcaaaatccagaacactaacaccaccaaatgctggtggggtgtggagcaaaagggactctcattcattgctgatgggaatgcaaaatggtgcagtgactttagaattccgcttgaccgtttcttaagaaaatgaaacatacccttactacatgatccagcagtcatactacttgggtatttacccaaaggaagttngaaancgtatttttcacacattaatctggtacatgggtgttccttggcagctttattccttntttgccc

SEQ ID NO: 538175 - DNA, 81 bp, Homo sapiens
gggtagaggccagttatgttgttgaacatcccttaatttgggcttctctggagctccctcatacatatttggtggaaacag

SEQ ID NO: 538176 - DNA, 127 bp, Homo sapiens
cggagtcgataagtgctcctcttcgaatccgtgaaacctgcgaacttccggcatgcgtgtgtagcacaagcctttcttacttcggcattatgagccatagatggtatggtatttctgcagtacgatt

SEQ ID NO: 538177 - DNA, 1813 bp, Homo sapiens
agcacgaggaaagagcccccgagtgttatgcacagcttgggtcaggttcttgcctttcttaattttagggacagctacctggaaggaggggaacaaggatgttctcttccgcagcccgctttccccacgcccacacccacagtcatccagggacccatatgcctgccatccataggctggaagccactggtcccgaagatgtaggagcaagggatgccatcagtgaccatttatggatcttcagaccatccacatcagacccccaggactctggagttaggatggccgacatccatcaccatgatccatcagtggagaagactgctctcaagagccatacacacagacactcccccatccacacagccccaaatgccaagatgggacatagagaagacatagcacaaagatcagacaggagaccacataaagtcatcacaaagaccatggaagatgcaggagtgcaatggaagccaatggtagtgatactggcaagagattgatacatggaacaacctgccacaagatagatattagaaagatgatagaggatggctagacggacggaattgagagagacagagaggaagataagattgtaccatgtaaagcaggatgatcatcatgggagacacatagttagatgttagaggtggagcgcaggttctcatggattgacgcggggttatttgtagcaggcaggccgtggcatcgttagtcgccgcagcagagacactgacaggagtatagaccacatacaacagaagcagcacaccaacagaacggagggcaacggacaggtggggggacagaggagccatcacccgtgacgcgaggccaaagcaagagcaacaagatagacccaccatatcacaagcggaacacgacgacaatccatcaggacgacaagtggaaacaacatagcaaccagtcaccagtagtacacaccacgccacccaaaatacagtacctatgacagcactggggcagcggaaaagtgagacccaacgcacaagaaagtcgtaggcccccagtaaagagaccaagagcggataggccgagtgggcatgggcaacagagggacaaccacaaagagcaacagtgaggcaggaatgggaagagctagagcgcagacatagaacccaatacggcgaaggtaccagcagaagaccaccggaacgacgcaggaggacataaaaggccagaaacgacaccatgacacgagcacaccaggaccaacatatccacgcaccacagagccaatacacaccccaaacacagcatggacagcgggaggaaataacagcaaaacaaacacgagggaaggcaccgaaaagatagaagaaacccagggagagcacagcaacaactacgaactagaggagaaaataccaccaaagaaacacgacgcacaaacacaacacataaaaacacccggaaacaacagcaaaagaaacgtgaccaggccaacgaagacatgaagcaacacagagcaagaacaacgggaagacgaaaagaagcgaactgacaccagaaatgaacacaacccacagagagtcgagcgaacgcacagacgactataaatgtcttcgacgtaccatcaacgaccatgaagcagaaccgatagcacagtgcacaagcgcgcaacacaccaagtcagaatatactaacacgcgacgacaagcatggattgccgacgactgagtcaaaacataaagaatcacgcgcagatcatgatcgtctgctactcagtctggccgcgtcgatcgatcaaacacgacccagccacagcaaacaacagcgcaaccaaaat

SEQ ID NO: 538178 - DNA, 121 bp, Homo sapiens
tcgtgcactttcggacgtatgctacgattcatcatcaagactcctcacgatcatcatcgtcgtcccaagtctagcattggcatggccaaaggggtcaatgatgctgggacacctgggagcc

SEQ ID NO: 538179 - DNA, 735 bp, Homo sapiens
cgtggtggctcacgcctgtcatcccagcacttgggaggctgaggcgggtggatcacaaggtcaggagatcgagaccatcctggctaacatgatgaaaccccgtctctactaaaagtacaaaaaaaattagctgggtgtggtggcgggcgcctgtagtcccagctactcaggaggctgaggcaggagaatggcgtgaacgcgggaggcggagcttgcagtgagccaagatcgtgccactgcactccagcctgggcgacagagcaagaccccatatcaaaacaaacaaaacgtgtgatgataaaaagcgccataaacataatatcaaaccatgctactctgtcttaaattttcaaatagcttgggcacctgaaatacaaaattaagtgtggaaaacacagtttttaactgtgtgtgctcacaagctaattaatgtataagttctgccatgtgacacggttaccacatacagttcattttcgaaaaaagaaaaaacgccagacaaagcgacacaaccttggggccgcggctggggcccaaagaaggctctgaaccccatcgtgtggggcgcggagggcccaaggcggcagtggactgtggcacaacgggggccccaggagacgggccaacaccgcggggggtcccacacgataaaaaccggggaggacccgggggcgagaacccagggcgcgggcccaccggcctcacacggcgccaggccgatatcccccctgtggg

SEQ ID NO: 538180 - DNA, 314 bp, Homo sapiens
tgaagtctgggcttactactctaacacactatctaatctatctccccctccctaccctctctttacccccacggatccacccatattaagcacacatttgaaacatcagccaggccgggcgcggcggctcacgcctgtaatctcaacattttgggaggccagggcaggtggatcacctgagatcaggagtttgagaccagcctggccaacacggtgaaaccccatctctactaaaaatacaaaaattagccagccatggtggtgtgtgcctgtaatccctggaccaaaggcggaaagggcgacaagacgccgaa

SEQ ID NO: 538181 - DNA, 225 bp, Homo sapiens
  misc_feature (51)..(51): n is a, c, g, or t
gtaggatcccctttctttcgcccggctggatcagagtggagagctcagtangccgtctgagcactgcttgctggctggtagccatcgcggctgcatgttgccctctgttttgcggtattcgtccttctggtctcccttagtggcccccgtaggtgccctgcttgtggtcaaacacccgttcgttgttctccaccaggctgcccagcttctcggccagctgcgagc

SEQ ID NO: 538182 - DNA, 850 bp, Homo sapiens
cttagaacaggtactaagtgaactggagcgcctatgtctggcaggaacaggactacagtaagctaaatgtttcaaactacagtcaacatcaaaggtatgcctggaactgatggctgaatgcagaggacctggactggaggaagcattatcatggcaagcataattgtggcgacaccacgtgcctgtttgcatctgaaaaagatatgagtccgccaagagtgatggatctaaagatatttcgctgcagtgagccagagctgaacaatctaattgcattaggagacgaaacatgatagctttaagctctctttgatatgttagtcaatatgagttcagtcatggtgtggactggagcaaaatgtggaccctgcttcgttgtcctaagatactacattggggaaactgtctagggtgactggtcagaaggaagcttggagcacacagtggcatttaggtaacgcatacagtaacgggcaacattggtacagaacggtaacatgagtctcatacacacacacggagttaaaacgtgggatagtatctttccaagttggattgcctgagacttggtgagaggaagtatgcctggagctttgccagcaaagtcagatcgttcaagaatagatggcattggacgcgggttcggttggcgatgaaccatggcgcactagcaacggccataacaacacgaacatcgttaattccgggatgggaagttatactatgtagttacaaagtggtgggaccaaaaatgttaggcaaacggcatggaaaagggccgaaaagaagaaaccccccgaagggtgcactggtagggtttacttgatggggaaaatagggatccaaccag

SEQ ID NO: 538183 - DNA, 237 bp, Homo sapiens
ggccgccctggccgcccgcctgttaatgaaaaccgcccctgccctgggccggggtggggtcacctgcctccccaaccaaccggtgaccttttgggttttacttgggcaaagggagccatttgggggggccggttgttttttttggttttgggaggggggagggaagggggtcctggacccaacccccccctagtttttttttccagccaaaaggaaaaaagttttggttcccttcca

SEQ ID NO: 538184 - DNA, 318 bp, Homo sapiens
tgactctgcaggatctcggggcagcaatatgcaagtaaaccacattttctgaagtaacggtaaacaaaggagaaggtcaaatactacataccaaatgatcaaaatgtctcttggacctaaaattcttgaaactagtaaaaatggtaataaaagaaatttcatgccattaatctgtatagatcattaaatataaaaacaatttataaaacacatcagattttattgcttgaagaatacagcatatgaaatcacaaggatgtcaaaatgaaaagtcactagaattcaaacatataatacattatcagatgcagtaaaata

SEQ ID NO: 538185 - DNA, 346 bp, Homo sapiens
cggtgtgctgggcctcgctgaatcacttggattcccacattctgctatgcctcatgggactcgcagagactccaggctgtgcaccctgctcccagcatcactgttcgtcaatagtcacccagtggctcatgcctgtaatctcaacactttgggaggccaaggcaggataatcgtttgagcccaggagttcaagaccagcctgagcaacatagcaagactccaatctctacaaaaaataaataattagccatgtgtggtggctcacacctgtgatcccagctacttgggaggctgagatgggaggattccttgagcctgggaggttgaggatgcattgagccatgat

SEQ ID NO: 538186 - DNA, 107 bp, Homo sapiens
ctagaggaccctacgtaatatgtaaccatcatatccctgacaaatgatttgattctgggaaattattctaaggataaaaactaagaaaaaaattaaataacaaaaac

SEQ ID NO: 538187 - DNA, 232 bp, Homo sapiens
aaaagtttaatgagtgaagaagtgcccaaaatcccctgtatttttagtatatctaggctccgccaatgtcttatggtatgtaacccgtttctccccacccccaaccacaaaaaaaggctactcagggggttgaggcaggaggattgcttgagccccggggttcccggctgcagtgagctatgatcatccccctcccgtttagggtgggagccagagccagcccctgttttta

SEQ ID NO: 538188 - DNA, 318 bp, Homo sapiens
  misc_feature (92)..(92): n is a, c, g, or t
tatgttctgctatacgtcctaggcctggtcagaatgggcggagaagcttccatgcctaagctgtgctcttacccaggccccctcctgctcangcccatcaccctcagagagctctgtttgtgtgtgtgcgtgcgtgtgcgcgctgcaggtgcaggcatgttggggtgtgtctcagagcctgaacttcccttccagtcagtgctggaaggaggtgggcaggcgaatgatagaaaggaaggagtggattggctccacccactgtgcattctcctgttagtcttttcctcctgacccaggagtgggtggggataccagggg

SEQ ID NO: 538189 - DNA, 752 bp, Homo sapiens
gtagggatccctgaagctgacagcatgcgcgtccgagatgtctcgctccgctggcttagctgtgttcgcgctactctctctttctggcctggaggctatccagcgtactccaaagattcaggttactcacgtcatccagcagagaatggaaagtcaaatttcctgaattgctatgtgtctgggtttcatccatccgacattgaagttgagcttactgagagacatgtgggagagaatagagaaagtggggcagtactgcacgagttgtttcagcagggaggggtggtcctaccatctgtgtacatatgacttgacattcaccccccattggaaacagatgagtatgcctgccgtgtgaacccattgtgactttgtccaacagccccaaggatagttaaagttgggatcgagacatgtaatgcagcatcatggaggttttgacagattgccgcattgggatctggatgaattccaaattctgcttgcttgcttttttactatcgatatgctttatacacttaacaactttatgcacaacatgtagggttcataataattgttgaccatgggacatgcatcttactttataatcctacttttgagtgctgtcctccatgttgggatgtattctgtagcgggttgctcccacaggtagctctagcagggttggcaacctaaaaggtgggagcgagaatctcttatccaacatcaacaatctggtcaagaatttgacctcttcaaccttgaaccag

SEQ ID NO: 538190 - DNA, 272 bp, Homo sapiens
ccggcgtcgtgtggcatagttctaagggcttacgttatcaggcatactgaaagatgaaaaagtggacatacctttttttttaaatagcttttaaaagacaaaataggccaggcacggtggctcacacctgtaatcccagcaatttgggaggccgagacgggaagatcacctgaagtcaggagttcgagaccagcctggctaacatggtgaaaccccgtttctactaaaaatacaaaaaactagccaggcgtggtggcatgtgcctgtaatcc

SEQ ID NO: 538191 - DNA, 231 bp, Homo sapiens
tcctgcccttctgtcactgggtctccagcctcccggccttttcctcctcccccaggagatgagacgtatcttgacatcttcgcgacttctccctcatggctcagacgacccggagaagctgagccgtcgcagtcatgaccttccaacgctgttgaccgagccacggcccgcgcctgcctcccatgtgccccatccggccctctgccattaaagcctacctgtcgctcttca

SEQ ID NO: 538192 - DNA, 159 bp, Homo sapiens
  misc_feature (1)..(1): n is a, c, g, or t
  misc_feature (126)..(126): n is a, c, g, or t
natcggcaacgaggaaaggaaagaaactaaccaacaaaagagaaaaccaaaaataatcacaacagaaaccagctgccccaaaggaggccagtggtggggacgcagagggtcctcagagcaggagtnacaagggaggaaagaccaaaaaaacaaccaacc

SEQ ID NO: 538193 - DNA, 661 bp, Homo sapiens
tgcgactgtggtgcatgcgccatattttcacaagtgtggtctcccttgtccgggactatggacaccgactcgtgggccctggcggtggacgagcaggaatgcggctgtcaagtcgatgaccaatttgcagatcactggaagagaaagtcaaatgcagataccaatggtattatcaaaaccagtaccacatgccgatgaaaacatgatgaagagtgagaaagatgtgacagatgctgaccagctccttactcaacaagctgatcagaagcaaccttgttgataaccacgaaaccaagtgtgaagtcctgcaactgggatccaaagctcccctcatgtactcggtgaagtcgtttgacacgagctatcggctgaaaccacatgcttctccagggaagtctatgccatgggacttcaatcgaacctccaagatacgagagaacgcattacccatgattgcttgctgaacccccacagaatctgatagcccagtactcagtcttggcactggctaaaacagctgccttgatcttagccatgctcatgccgcgtggcgccatcagacagataaccccagtgtctgtgcatactcaccaaatatgagctggcgcattcaacaaggagagtgctcgcccaactgggcgacttaacccagaactgatct

SEQ ID NO: 538194 - DNA, 320 bp, Homo sapiens
atgccaaagtcaccgaagaaaaacgcagggacgcaaggaacatcacgtaagaagcgtcaagcatacagggaagaccagaccactgtggaaaacaccctatgtccacaatctgggcaacgtgtgacaagtttacccacttggtactcatcaacctgccctagtacaaattgaattacatcatcttactgaacactactgactttactgagtctattcgctgatttgatgtcacctttcatacgaatcacagtagaaaagcgtatgaagtttattcaatacagccaagatgctggctgctcaccggcgcaatatagttttca

SEQ ID NO: 538195 - DNA, 814 bp, Homo sapiens
gcaggagagcaagatcggaattcttgcagcctccataattcatgtgcttaagctgtaaagatactcctctttgtgttatccttagaggactcactggtttcttttcataagcaacaagtacctcttcttaaagtgcacttggcaagacgtcttcactcctatgtatccaatatagtttgatgttcatggacgctgttctcaccttgttaggcagatgctagtagttaaacacctaggttggttcaccatgggtaaaagcatgagtaggctgacctgtggggtcgtcaccactgctggatgctgggtcacgacgtgaagtgctgtgagagatgtttatgtaatatgctgaggtaggcgtacgtcgatgtggcagtagaatggtaaagacgtgaattggaattgtaatgctacatgtgaaatcagagaatagtggtaataagtagaatgtcttcatgagtaattccataaatatgacttacacagcaattatcctcatgagtactcatgaactgtaatcaaatgagagacgaggagtacgggctgttgtgaccaatgtggagtcctggggaaggggagaaggggtcgcatcatcccatgggtaacctcgttcgtggagagcccttgcatggatccaaagaagaggttcttgtaacaacgggggtagcctcctggaaatcctcttacactatgagcctacggaccttcttgggtcctaaggaaagtgaaacgaattgaaacaagggtaatctctggttaaaccgtataatctgggtcgtcattttgagccaagttgtcattcgacatcccttgaaaa

SEQ ID NO: 538196 - DNA, 210 bp, Homo sapiens
cagagtatccccgtcagccacctggtgatgcgagtcggtggcgcgaggacacttttctgactccctggcccctgactcggctgtccactttccattcccgtcgcgttggtcggccgctactccggtcccaggatgctagaactgtgacttcgtactgctgaggggaacacggcactgggaaggtgggtgatgtacctgtacccgcggatc

SEQ ID NO: 538197 - DNA, 951 bp, Homo sapiens
gataaatgacactcacattgtttccgtgtggttcagctagagctcttccgagagctgtttggggacccccttggtgtgacacatgagtgcttacaacagttttgtatgggcagcgcgtgtttgaccacttgtggccgcgtgtgtggcggccccccgcccgatttggttcgcccccgcctctgtgttgggggtgccctgcaggtgagacagtgccttgtgtcgcaccgaaaacccgccgtgtgtctggcacaataagagagcgggcaactttcttgaaaactcgacaaggggaattaatgttcggtgacactcgtcgcccaggtttgtgcttagtaaagtgtgggccacgcccaaatggcccaaaatgggaaggggcccccactgttggttaacggggcctgtttatacagaaacgcgacccacctttcagggctggcccaagcagttacactcgggtgtgtcccccaacaagcccccgtgcctaaaaacattagccccttggggaccagccgcgagtggacaataatgaaaataaaggtcccactttattagagacccctacagcaggggtgcgcaccagggaggaaccacaacttttctacgggggccacaagggaatgttacctccttttcttagaaagctaggtgaggaagatgccctcgttatacgacgaaagagtttcgattactacaacagccaatggaatgtccccacgagtaggttacgggtgagagccacaccacgtaatttatggggatgcgcacgagggaataggtataatgaatattcggtggaagcaccatttgtctatatgaggaccatcttcatgctatggaagactaggtctcacgaggcgcccatattcttctccgccaccatcagacgattaaataacaaattcgggttatgattaacagggaaaaaaggggccattttcaaaccccatgaca

SEQ ID NO: 538198 - DNA, 185 bp, Homo sapiens
gattgagctggtaccaacttggctgtgctttggaagctgaggcaggagacatctgagcccaggagctgagacagcctgggcaaatagagaatcgtctcaacaaaaaaaaattttatgccaggtgtgctgtgagctgtagtcccagctacaacggtgggacggattggcttaggcctggtgtgatt

SEQ ID NO: 538199 - DNA, 622 bp, Homo sapiens
cgaaaaagtttcttaaaccttcggttggggcgcgccgggcccggtattagggttaagtgtgaccatgtggtctcattagctgtgttccctatagagagatctcctgtggttctcatgttagatatagtgtgcttggagattcctctaccacacattataataaaacaggccgcggggcggccaaaccgagaacggcgtgctgtgaacgcaactctcacgagatgtgagagttccggtagagggctcatctacacttgggagtctctattctcaaaccagggagattgtccaaagcgcgagacgtctcgagatattctcaaaatttatcaggcgccccggcccccttggaagtaaaaagaaaaaaaaaaaaaaaaaaaaaaaaaaaaaaaagaagaaaaaaaagagagagaagaggacagaggagcagcaacaggaaaaacacgggcaacagaaagagacaagacccgaagagacaaaagagaggagagacgaaccgaggaaaaagaccagaaagcaagaacccaagagagacaaaaaaaaaagacgcacagaagagaagaaaaaagagaaaacaaaaaagaaagagagaaaggaaaaaaaaacacaagagaaaaaccaacgg

SEQ ID NO: 538200 - DNA, 216 bp, Homo sapiens
gacactggataatgccaatctggtatggggataaggggtgtaggtgtgcctcgtcggtaagaagtgggctaggtgcattgttaagtcttagcagcgaaagcctataatcactgcgcccgttcataatgtgatcggtcatggcataggtttatatgataggttgagtgtggttggtagtaaatagagtacggtaggcaatccgaggcaggttagttg

SEQ ID NO: 538201 - DNA, 260 bp, Homo sapiens
ttttttttttggttcccaagaccctgaaaaggtaaagcatgggaaaattttaagccaccataggtaaactttttgggttgaccccggattttttccccatgatttactgggtgaagaaaaattttataacccaacgggtttcattcgggggggaattgtaaaagcaaggacttgtgtggtttggggaattatttaagggccattatgtataaaaaaatgggttcccctggtttttaaaataaaacctttataaaagggga

SEQ ID NO: 538202 - DNA, 374 bp, Homo sapiens
  misc_feature (334)..(334): n is a, c, g, or t
tgtggtgctttcctctttctctcaggttgtctattcagggatgttaagcaaagggggtcatacaacaaaattattttaaaacaaacatacttcagaaaagtttatggaaaaattaaacttgaatatattaactttacaggatccatttacttcaccctaacactgagttaaaattataacaagagaaagtagggctgggcgcggtggctcacgcctgtaattaatcccagcactttgggaggccaaggtgggcagatcacccgaggtcaggaatttgagaccagcctggccaacatggcgaaaccctgtctctactaaaaattaaaaaattagncgggcatgtaatcccagctactggaaagggcaccgcaaaa

SEQ ID NO: 538203 - DNA, 356 bp, Homo sapiens
ccatgggatgtattataactaactattacagaaacacagctaagaatatcaagtattgctctggctctagacagaaaaaaatcagttgacttatccctttgctgtcaaaagagttggcgtgtccggttcggggtgctactgccaaacgttatggtacttagagtcgggatcacaacttcaagcaccgacttatcaatgcagccggctgtgtattggcgaatgggccgttaccttaagcacggagccagccgggtttagtccagccattacaagaatgtatatgtaagcggtcggtagttctggctttattaaacatgcagcatgaggtactcttctgtcctcatgtacagtgccag

SEQ ID NO: 538204 - DNA, 519 bp, Homo sapiens
ccttggcccactagctttcttcaacctcccaccagaagataactatagaaaggcacggtgcaattaaatctacgtctctacactgtcaggagagggagaatgtggtgaggtgctgtagttctgagattggattatattttccctgaaaaaagtctgctggtatcaactcactgcaatgtgtcactccaatggtacagacaagcattcactatcctgcagggacaagccacttttcgagctaatcgggcacatacagctcttacttcaactctcccacatctaaacactaacactgctgacgtggcagcaaattcacaaacaacaacttcctatgctaaaactaaatgccaataaagaactgaaaaggccgggcacctgtggcttacccctgtaatcccagcactatgggaggctgcggccaggcggatcatgaggtcaggcgctcgagaccatcctggctgacacggtgacagcccgtctccattaaaaataaacactaaaactactattccaatggtc

SEQ ID NO: 538205 - DNA, 235 bp, Homo sapiens
aaattttttccgggctttttttatttttttaaagggatccccccgttggggtttggttttttttttggggctcccccccttggcaaagggttttttaaataaaagtttttttacccttaaagccaaaccaattggcccaaatttggggtggaatttttttttttcccggcccggggtccttggggaaaaattttcggaacccacttttttaaaccctgggttggaatttctccca

SEQ ID NO: 538206 - DNA, 675 bp, Homo sapiens
  misc_feature (671)..(671): n is a, c, g, or t
cggggagccaacaactaagtatgactagtttacacaatagctgctataggaaagataccgtagttacggactacacttatgactggataaaggccaagttgaaagccgcattgctgggtcaatagaccttgccgcagccctcttaaaactaggcgagtgtggattaagacgcctgagactcatggttaaccccttgaccacatagcctacccgttccttgagctatccctatggggcattactatgacatgctggatctgcctacgacagacagacctaagaacgatcattgcatactctcgaatgagccacatagccctcgaagtaacagccattctgatccaaaccccctgaaggttcaccgaggccaacattgtcataatcgagcacggacttacatgctgagtactatgctgcctagcagactgaaactacgaacgcactcacagtcgcatcataagcctctctcaaggacttgaaactctactcccactaagagctatgtgatgacttctagcaagcctcgcatacctggacttaccccccactattaacctactgcgagaactctctgagctagtaaccacgttttcctggtctatgactcgtctgactacaggactcaacatactagtcactagccctatactccgtgtacatatttacgacancctg

SEQ ID NO: 538207 - DNA, 108 bp, Homo sapiens
ccctggggccgagtcagatacaccatttaatagatctgaattgaattttaaattaaactaaaaaaaaatttcttcttatttcccccctcctctcccgacagggtctct

SEQ ID NO: 538208 - DNA, 328 bp, Homo sapiens
tatgcccttgtaagtattcaggagggacatgttaggcttatatatttggggacgttgggaaatgtgcgtctgctggagagatgaggttctgtgtttctacaggggcgtgggcgacgtgcatatctatggtgtgagaaatatgtgctgtggttatgtgttacgagtattgtgatggatgagctgggttctaggatcataggatatgtggaagtcctttcctctgtggtttgctggcgctagagtccacgtgtcctacctgtgtatacctcgtccgtgtgtctatacaccaggtggcctgaatgaccaggtagtgttcctaatggtatgc

SEQ ID NO: 538209 - DNA, 122 bp, Homo sapiens
gtgtgatctgcctcgaggctatgatctgagcacgcaggagataacattttcttctagcatcacgtgaggcaaatgtacttttggcatgtctcacaacaggaccacttcagttcccaaagagc

SEQ ID NO: 538210 - DNA, 752 bp, Homo sapiens
catgctcaaggcagcactgacatgccagccttccaccttcttggcccactctgaactttgggcactgatgagcataagagggaagctgatggggggctgagggcagcttgcactgacctgcaggtgttccttgatatatacatcctgggtgccatgaaaggcagcaggaggcagacatgttcctgagtgcaagggggtgggccccatggtgaggccccaccttcaggccagggaggacctgaagggtgggaactggcctgccagtcctgcaaaccccaatctgaacttgtggtgccttttccaggcctccccatggccacccatggaccagtcggcattcacttcctcccttctgcggcccataaaagccctgggttcaggcagagctgagcagacatcaggtgaccagctgcagaaaggagctacccactccagggcctcatctctgctgagagctgcagagatgaccagaagacctgcatccagagaggagcttccgtgatccagggctattctgtcactcaagtaaagcttctctttgtcttgttctcaaaaaaaaaaaaaaaaaaagaaaagaacaagcaggggggcaccgctgaatgaagttaccccacgggggggccacaagatttccgggtaaccagggttgatgtgggtaccaagggggcgtccctattacggagggcgccgatatgaaaaggacgagcgacacgggaccgtggtgaagacaaggaggacaaccgcggaaaacg

SEQ ID NO: 538211 - DNA, 86 bp, Homo sapiens
cactatgaatatgaaaaaatattctaatccctaatcatcggagaaatgcaaataaaatccacagtgagactccatcttaaacaaac

SEQ ID NO: 538212 - DNA, 142 bp, Homo sapiens
tataaacactgaactgcacattaacagcccaatatctacaatcaaccaacaaaccatttacccaaataaagtataggcgatagaaatgaaacctggcgcaagtagatatagtaccgcaaggggagaagatgaaataattata

SEQ ID NO: 538213 - DNA, 291 bp, Homo sapiens
  misc_feature (34)..(34): n is a, c, g, or t
  misc_feature (37)..(37): n is a, c, g, or t
ttagcccctgtagcacctccggcaagtaaaccangcntgactaaacgtctgaagacttctcaccaggaggtagcggacaggtctggcacccagggatgcccaccacttttactgtgtcctacttcctacaggacacgtaaggtttaatgtaaccaccatatctggcactgagatagactcaacagccccatctttcttggaggcatctacacttccagagccccactcctcctcttcctccagctccctgcaaggggtctcctccatctcctgctctggtgtctcctcatc

SEQ ID NO: 538214 - DNA, 496 bp, Homo sapiens
atatacccctttaaagatgggccgcgcttttggatttattaccccaccctgggggggttcacagggggtttaagaggccccttttgtccccccccgggagttttttttcttcccccccaggtttttggaggaaagggggggacaacccttttttaacaaaacccccgggggggggcccttttttccacattttagggggggttggccccttaaattaatgggccacccaggccctttccccccccccagggttttttaggggcaaggccccccccccccttttggggggggaaattgggggttaagggggggggttccaacccccctttaaaggcccccccaatttttggggcctttttcagggttgggagaaccattgggggcccccaagggttcttccctgggaaagtttttgggggggggcccccggggggtgggcccaaaaaccccttaaaaaagggggttttttaatggggttaaaaaaaagggggtttcc

SEQ ID NO: 538215 - DNA, 2118 bp, Homo sapiens
ggtgagggcctgcggcgctccagcaggagcatgagcgagtggagggagggcctgtcactctccagcactgcacaccgagtgagtggagggagagcctgtcagctctccagcagaagcaccaaggattggagggagggcctgtcgcatctccagcaggagcacgaggagtggactgccaggaccgtacacatctccagcacgtgcaccacggagtggagagagagcctgtcactccagaaggagcaccaggagtggactgcggacccgtcactatccagcacgtgcaccaaggagtggagggagggccccttgctctccagcaaaagcaccaaggatcggaagtagggcctgtcgctctccagcacgtccccccccggcagtggagggagggcccgtcgctctccagcatgagcacccagagatggaggaagggtcagccatttgtcaggctctgcgtgtgaaaagctgtgatttcatttcttatcagttattactgtcactatcactcaggatgaaattggcctcacccgctcaggagcaatgctgccttctccctgtcctcctcctggattgttgaggaaaaagccagactaacctgttccacaccttggcatcagttgcataaatgctatctcagcatgttctagaacacagtactgtttaaacaacgttctgggggtaaccaagtttataacttgcagacccgatggccgtaaagcatggggtgggggggtgcctgcctgcattgcagctgtcagagctgcacagagcctgcgacacccagccatggcttctgcccaccaggccacgtccctccgctcctctgaatccttccagttcttcttaggccacttaaacgccaccgtctccacgaagtcctgtcggatcaccctcataggaagtgacaaaccacgttttgaacccctctccccacccagcaagcccctagcccgcgagcataggatttcctttctagaacacgtgttctgtgaagggccagaggcaatatttgaggcctcgtgggccacatgctgtccctgttgcatatccttttttttgtttggtttggtaaactgcttaagctggcagaacaacagaacccgcacattctccacgcagcccagcgcccttggccatgcagggctgtgccttctgccagctctggaggcccaggggctggcatgggcctcccgtcctgagccccccatgtacattgcacccatactgggaacgcccccaggatctgctgcgagacccccaaggaccagcttctgcagtcctggaagggctctcctgacccccaagtccgccatcttctgatggtggcaggtgggcacagtcactggctgagcgaccaagggtcagtgagattactaggccggcgctgcacccaactgaaatgaactcacgtgtcctcacaactcctagcagcagatgctgtcagcctcgcatcctacaggaaaggaaccatcgccaaaagacgctgaggaacatcccgagggtcacagggacagtgcagagccaggaccagcccggcccatggtcccccagcgtgcaccacctggcccggcactgtgtgctcagccatgaggactgggaagagtcctgcccacagctcaagtgtctacaccgcactgccatccaggctgtgagccgctgctgagcatggggaatgtggctgctgcagagacgttatgaaacacttctaaaagaatgtaaaagatctcattaataattttgagtacctgttaaaatgatagtaattttggatctagtagattaaataaaacatattattaaaattaaaaaaaaaaaacaagaggaagacgcagcgacagacagcgagacgaaggaagaaagacaacaacaaaacgggggcggcccgcacaaagagaattccccaagggagggcccaccacgtataggggacacccaccgacgttgttggagaccacgagcggccccccacaaggcgggcggcgtgcagacaacaagacgagcccggcccgcgcggagataaaagcagcggtgaggcgggaaacagcgtgccaacggcggaaccgtgtggaacaaccgcctcacgtgcggcgcggaacacaggggcgccacaccacacga

SEQ ID NO: 538216 - DNA, 186 bp, Homo sapiens
tgcagtacgtgatgtgccatggcagccaaatacaccttgaactgacaacctgcctgctcagagaggatgtggagtacctgtccccgtgaccttgaatgcactattggctgtgggtgcctggggcagtgagaggcccagggctgtgccctgtgaatgtgtcctatgacttgtgacacctatctccca

SEQ ID NO: 538217 - DNA, 446 bp, Homo sapiens
gggctaggatcatatcagagtatgtactctacatcgaacacaatatatagcaggtaggtaacgtatgggcccataaagatgtatgagaaaactgagactcagaactgtcccagctcatccaaagcaatagacatcagagctggggtttccatgcgggtctgtgtgtctaaagattggagtacctgctaccattcttgtctctcctcatctttaagatggaacaatgacccttactctcctagctaccatgtacggctgttgtgagagttggataagatgctggatgcaaaagcactttgcagactgcaaagtcctgtacagatgcaaggcttgtaggccgtccctggcatccagccagatactgtacccagctgccacataagtgagcaatatggtataaaattgggtctcattgagacatggagcctgagaaggtctttgcagag

SEQ ID NO: 538218 - DNA, 857 bp, Homo sapiens
ctcctgtcaacagcgggcaggctcccaattacgaaatgctcaaggaggagcgaggaagtggctatgctgggggcgccccagaaacctgctccctcgacgtccaccgagatccacagccgcatgcgagacctccgtggcctgaccatgtcagtcctggggtcactgtacagaccaccctcttcatgaacacctgctgcctgggctgcatagcggtacgcctactccggtgaagtctagggacaggaaagatggttaggctgacgtgaccggggaccgagcgctatgcctccaggcgacaagtgcgctgaacactctgggccctgataggggcatctacatgaccatgctgatcatcatcatcaccagtgttggtcagtccgggccaagggatagatcaggaggcatccattgaggcacacggagctctgccgtgaatttgttaccaggtgactctatctacccattcctcggccatgccccagaggaaaggagctctgcccttgactggaatcccattacacgagcttccattcctcgaccatggtcccaaaggccgaggtactggacatgcaggcacctttatcatgcacacgcagcttctaacaagtgggccttgcaactcaaagtgttatgtgctgggggctgcgtgtgaaactcaatgacaagaacaaacaccacaataaagacaaccatcacaccaccacaacccaaacgggaacgcgcggcacacaacaaaacaacacaacaagaacgacggcaccagaacgcacacgaacctaccccacaggccaataccgggcgcacaacaaaacacacgggaccgcaccaaaaagaaaagccagcacaaggcgaagaca

SEQ ID NO: 538219 - DNA, 308 bp, Homo sapiens
ccgcgtggtagtctacttccttagccgcgaatatggtaagatcgagcaatgggttcaggagatgggttctcttctccggtgatcattcaagtgctcagtgcatgaagattggcttgtctcagtgtttcaacctcaccagggctgtctcttggtccacacctcgctccctgttagagccgtatgacagcccccatcaaatgaccttggccaagtcacggtttctctgtggtcaaggttggttggctgattggtggaaagtagggtggaccaaaggaggccacgtgagcagtcagcaccagttctgcaac

SEQ ID NO: 538220 - DNA, 241 bp, Homo sapiens
cacccgggtcaaacaataaccaaaaaaagaacaaaaaaaacaagaaacataaacatacaagacaataccaaacaagaacagcgaagagtatatatgcagcacggcgaaaacaaagagaaaagacaacaagcaacgaaaccagaagtgaggagaacaagagttgaagcaaaagtaggaaagtacgaggcacaacaaaggagcggaggaaaaagaaaaaaggaaaagcaataagaagagcaca

SEQ ID NO: 538221 - DNA, 951 bp, Homo sapiens
cgtgggttctcgtgaatgccacatctgtccgtccagaagggcgaatccctgtgctgactcctgtgcatgaccatgatgcttgctatgcctgactgtctgtctgttgcatcctgtgcagcccctagccgtggatgcatgttgtgatgcttgtgcctgccaatgcacttgcctgtgatggccagtgatcaattgcttggggattggggtcggacgagcaccccacccaggccctgcttggacatcttcaccatcctgtgatggatgcttggtgcaacttgtacaaattgtgcattgactgatcacgatggtgggtgaccatgaaagcactggactgcacagtacattccctggagcatgcctgctcacccatgtatctgttgtcatgccttgcgactacgggtggcaaccatcccatgaccatgcgcattgccagcccaacattgtgcaggtgccttcgttgtgccttaccctgtcgggcacccaatggcctgtgacgtgacacttcgacagaagccatttgactggacggctgcttgacttgaccactcgattgttgctctacattgaactctgaactcgcagaacaggcacactgatttagtggcctcattaccacagatacgataccggacaggcttttgctattgtgggatcaaggattcgatcccttcacattccccacagacactcaaatggagccgcgtgtgcctcagtgaccggacaggactgtgatgggcggcatgccaccgctgagttggccccccgggtggtttcgaaacagatggaattacacgctgttgggagacgtagcgacctctcggggacatcccacctgtggcagcacttaacttttcattgaccaccgtgctggaagaaaccgtgcagttggtacactacctgcaatggggcaccctggtaacgcacaccggtgactgtgtagcggtatacctc

SEQ ID NO: 538222 - DNA, 83 bp, Homo sapiens
gacagcagcttctacatctgcagtgctagaggaggggggggggacaccatatattttggagagggaagttggctcactgttgt

SEQ ID NO: 538223 - DNA, 298 bp, Homo sapiens
ccgggtcgatctccaggatcccagatgtgtgggaatgcagttccagacctgtagttaatctaggagagatgatcgcactgtatatacaacaaggcttcccatgctcatgacatcataagaactcttacaggattaatgagttttaacttaaatgcagaatttttaaagctatgtgtaattgctgggaccatttcaaagtgtttgtccatgaacaaatgggctgatgaaaggaaccatcccaagatctctgggtccattgaagatttgcggtggtttggcgtaccgaagcctcgaattc

SEQ ID NO: 538224 - DNA, 782 bp, Homo sapiens
ttgtttgtccgttctttctctgtgttcctattgcctttgttttgtgggtcctccagttcttcctgttcgtctgttcttgacccgttggggttcatcccacccctgttgtgctgtctcataggcatcgggggcccacacccctcttcatgctatcgggcttcttctggtcatctggtgtctgtatgccttattccagtagcagtcctgtggcctgtaatagcatatatttcctaatgatcgtgttagactggttgggtatcataggagccttctgaatgaccaggactgctctctttggagctgatgtcaatgtactctcttcagcgtgttagaaatcacttgttttattctgtttctcttggccaagctgggtctacgtgtttcttttgtccgggtaatatgatctttcaaaagttgtacttctatcagagattacatatactgcccttgcagaatatttcaggtcttttgttaatgcctgtaattggtccttaaggtgcagtatttttgaaattattatttatagaaagtatctatataattcttggggaaagtgtgttataagctttaataattacattgagatgcacatcagtggtgtgtcattaacaatgacagtggggttaatatctgaggcctatagatgaaattgtgccttatggaataaagggtaaaataaaatatccctagagtaagagactgtaatcagatgaaattgtaagtaataattattgagggggacattatgtgcattttattgatatggttaacgttcaggtttt

SEQ ID NO: 538225 - DNA, 200 bp, Homo sapiens
cagtcagccgcatcttcttttgcgtcgccagccgagccacatcgctcagacaccatggccaaggtgaaggtcggaatcaaccgattttgtcctatttggcgccttgtcaccaagctttcttttaactcttgtaaaattgatattttttccatcaattaccccttcatttacctcaactacaaagtttacaattccatata

SEQ ID NO: 538226 - DNA, 104 bp, Homo sapiens
atctcttgctggtcttgaactcccacctgcactgacattttgttcctgtgcgtttccgtagggcaccagcgtgaccattgaggatctccatgtagcaacagcca

SEQ ID NO: 538227 - DNA, 887 bp, Homo sapiens
  misc_feature (562)..(562): n is a, c, g, or t
  misc_feature (731)..(731): n is a, c, g, or t
agcgggagaaggaaaaggatgttgtacatgggcagaaaggtgaaaattgtggccagaggcagattgtgctatcaggtaaataagcccaggctattgtgctggatgatgagaggtcactggaacactgatgagccataacagctgaggccattctagaataggcagctttagccaaccaggcagctgactgcagatacaggcctgcatccagatgagtccagaaaagcaacctagacactactggcaaagacattgaaaagaatcacactgctaaaccagtagcagcttttatcttcttctcagattgtatacatgcaggataaaagtgtttctaacacatagacttctatattccagcataaagatgtattaggcgcatttatacttttacatcgaagcctgtttcaacatgaacggagcccagatatttatgtaggccagtaattggagtgtatttccctgttcaatttcacattgtctataaaagggtttctcatgatcgatgactttctagttaaattcagaagaaaacatcttgcagctactgccctattgccatggncacacatcactgccttctagacatgggaagttggtgacttaatcctcgttataccctgattttggacaaattttacaagaagaataggacttctattctctatgtctacatgcacctggaacagtgctaggtctatgcttacaaattgattggttccaggtcacccggncatgaaggcctcaggacagcaaaattggcggatattgagagagagagagaaaattgactgggtaagaaagaactgaaccgaatttacgatgcacatgggaccttgggccttgaaacttccatgtccaaaaagggaaggtccctgtaacagaggccc

SEQ ID NO: 538228 - DNA, 312 bp, Homo sapiens
  misc_feature (87)..(87): n is a, c, g, or t
  misc_feature (120)..(120): n is a, c, g, or t
  misc_feature (142)..(142): n is a, c, g, or t
  misc_feature (156)..(156): n is a, c, g, or t
  misc_feature (300)..(301): n is a, c, g, or t
agttttaaatgtagtgaaattgtccccacagcaagctggccccaagtgcctcacattttataccccgctctgtcttagtgcgttgcnagagaggagtatatacagtagttcccccttatnccacaggggtacattctaagancccccagtgggtgnctgaaaccacagatagtaccgaatcttatacatactatgttttttttctaaacataaatccctacaataaagtttaatttttaaattaggcaccataattaataataaaacagaacagttataacaatatactataataaaatnntgttatttgtg

SEQ ID NO: 538229 - DNA, 141 bp, Homo sapiens
tcaaaaaccagattgctgagccactgcccccgtgatcccagctgtgtcctctgatggtggagctgcaagacctgagtgaagtgagctggagagagtggcagtgagagctccagtgctcagtgtggaaaacaatcctgtgca

SEQ ID NO: 538230 - DNA, 342 bp, Homo sapiens
acctcagacaaccaaaattgtgtcttactcattcttttagtttaacagagaacaaggagcaaatccaaatgattgctgttagaatgggttttgtttttgggaggccaaggtgggaggatctcttgagcccaggagtttgagaccagcctaggcaacatggagagactcctgtttctaccagaaaattaaaaacaattagccaggcatggtggcatgcacctgtggtgctagttgcttggaaggctaaggcaagaggattgtttgagcccaagaagttgaggctgcagtgagctatgttcatgccactgggagactgacagagtgacattcaacctgcctccg

SEQ ID NO: 538231 - DNA, 108 bp, Homo sapiens
tcctatgaagcgtttgtgaggcatatcctgtcgggtgacgggcccatggggcaggagcatcgtccgcatggtgctgaatggctggaggaccttcccagtctccccagc

SEQ ID NO: 538232 - DNA, 542 bp, Homo sapiens
  misc_feature (274)..(274): n is a, c, g, or t
  misc_feature (300)..(300): n is a, c, g, or t
  misc_feature (330)..(330): n is a, c, g, or t
  misc_feature (346)..(346): n is a, c, g, or t
  misc_feature (348)..(348): n is a, c, g, or t
  misc_feature (387)..(387): n is a, c, g, or t
  misc_feature (424)..(424): n is a, c, g, or t
  misc_feature (494)..(494): n is a, c, g, or t
  misc_feature (539)..(539): n is a, c, g, or t
ggggctcaatctaatcagctgccagcgaatataaagcaggaagaaaaacgtgaaaaggagagacgggcctagcctcccagcctacatctttctcctgtgctggatgctccttgccctcgaacatcgaactccaagttcttcagttctgggactctgactggctctccctgtcagcttgcagacagcctattgtgggaccttgtgatcataacacatcgtgcttgcagagagagcaaaccatgcctgtccctgtggagcccacagtgctatgtgntagtgtggcattgggccaggaatganaacaactacaccatagtaacaatccgtcantctgtccatctgctancncagaggatctaaaatagtttcattcaccttaaaatccangctctatgaagggctgtttggcggcttggaagctgcngagaaacaggatgctaatcggatatggtgtccactgtaacctccttgggggaacagcatccatcattggngtgtgaatttccttcccaacagcctccagccaaggagccggaggnggc

SEQ ID NO: 538233 - DNA, 959 bp, Homo sapiens
  misc_feature (184)..(185): n is a, c, g, or t
  misc_feature (276)..(276): n is a, c, g, or t
  misc_feature (304)..(304): n is a, c, g, or t
  misc_feature (484)..(484): n is a, c, g, or t
  misc_feature (491)..(491): n is a, c, g, or t
  misc_feature (596)..(596): n is a, c, g, or t
  misc_feature (724)..(724): n is a, c, g, or t
  misc_feature (730)..(730): n is a, c, g, or t
  misc_feature (779)..(779): n is a, c, g, or t
  misc_feature (935)..(935): n is a, c, g, or t
atcagtttggctatgaaagacccagctaagccacttaggcaaaagtctatctttgatgtcatagtttccaagaagtatcataagagtcaaacagttaaacatttctctgtgcttttttttctattttctagaaatgttgtagagagaagctcatcaacttacttatacaaatcagatatactgnngaggggagataaactgacatttccatattttataatataatgtggaaagattcagaaatgactgagaagatacagtgatatgatatttaangcaaatattggcatatcttatacaaganaggcatcttacaataatatttctgttggtacattacaattttccagctagtaattctaaaatgccagaggtcctatgatgcaatatcaaaaaaaccagggaactgacatacaaagtcaaatataaagatagtaacattcagtcatccacagataaaaggctatctggacataagcctganacaagcnagacgccatccacggcgatttcgccggttttgcccttgccacgttctgcttcaaaaatgatgcttttggtagcatcagttccttgatacaactgaatttccctgncttcacttttcacctcactcgtggtcttctcccatgccagggcattgttactgttttcaaaacactcgagtttcccgactttgtctcggccagccggtaataaagagcaacagaagttgctttggggntgcagncaggtaggagaagtttcaatcggccaatgtctttcttgtgaccgccaangccggaactgccatatagagccaatagcattatctcgatcagcaggattcagtcaaatcatctctctatctgtttccagtcacagatcccatgattgaagctgcagtcaaccgagatatttaaatctttatgttccagtgtggaagttagcgcttncttttggacagtatcaggcggatt

SEQ ID NO: 538234 - DNA, 310 bp, Homo sapiens
cggcggcccccacaggataagcgaggggatttcgttggtctccaggagcgagcgcagcagggtatccgtgccacggccttctctgcccgaagtaatcctgcagcgtgtcaggacgcatcgtgtagtccagcggcttgccctgtagcatctgtcggatctcatcggcagccagcgcccgggggtgcggctccaccaccactggcacagaaggcggtggcggcttcggcaggtccgcgtccaagtgccccgggtagtcctcgccgtgcgtccgcgtccccgtcgcgatcgcgtccccaaggcctcctcctcc

SEQ ID NO: 538235 - DNA, 177 bp, Homo sapiens
gtcatagagtgcaccggttatactgccgaagctgataagacattaaggtttcttttaaaaagtgataacttttgaggtactgatttcacagtatcattaaaatcttaccgttgtacaaaacatttgtttaaagtcattcaacaacacactaatttactaatgataacaggcattgat

SEQ ID NO: 538236 - DNA, 857 bp, Homo sapiens
gaatatgatagtgaaatggattttgggtaggtcggttagggtgtacgtgagaataggggaatagtgaatgaagcctcctatgatggaataagctatgatatggacatagcggaatggatgagctacaatggtagtaccgtgtcgtgtagtacgatgtctacgtgatcgagtttggcgtagttacaatgacagtcattggccacactactggtgaaccaacgaatcgatagaactccgtagggctgcaagacgcgacgtgcaggcaagactccaattgctcatatttggatatgcggagggggatgaacaggtcgtttctggacaggcccgagattaatacaccacgccaacgaacttacaaggacaccaccccgaatcgtcggccctacacaacaagcgctgtccagcaattcaatcagccagcgtcccacaacgcgtgagcgcagcacacaggaaacggaccagggctcgactcagaggcacggaactctggatgaaaaacccaagccgagccctgacagccaacgacagcgagggaacctggctgcacaataagccaccagccctccgcggaccgaccacacaccacgcaccactcgccatcgcgacgagatcctgccacaagacccacgccacgccgaaaaagaaacaacaccagcaggtcggcgacgcagtagaaagcacacgcaaacgccacacgcccaccaagtgcctgcaaccagtgcccaacacgaggtcgcgacacaccccacggcaggcccaaccgccgcacacaccgaccggaggccgccaggcaatgccccccacaacatgcccgccagaccaaaaccgcgaacccccagcgacacaaatcgagg

SEQ ID NO: 538237 - DNA, 312 bp, Homo sapiens
  misc_feature (6)..(6): n is a, c, g, or t
cccttncccccattgggggggtggggggtcggggggggggttttttttacccggctctttttttttaccccccggtttccctgggggcccccccccccttttttttcccccctttaaaggcccgggggccgttcccccccccggtttttttcttgggcccggggggggtttccttttttccccgggggcccctttttccctttgggccttttttggggcccctttttacccgtttttttccaaaaaccgggggggggcggggccgggttttccgggttttttttgccccccgggcccccccccgggccccca

SEQ ID NO: 538238 - DNA, 451 bp, Homo sapiens
  misc_feature (97)..(97): n is a, c, g, or t
  misc_feature (151)..(152): n is a, c, g, or t
  misc_feature (176)..(176): n is a, c, g, or t
  misc_feature (356)..(356): n is a, c, g, or t
  misc_feature (364)..(364): n is a, c, g, or t
cgacacgcgttctgttggtctgtctggaacatcgtgagatgagatctggtcttctgagttgtagtgacacgccagcgaccccactgcggaagtctgnggtggagcctggcgtctactccttcaccacagttggtgaggatccaggagccgnnggttctggaacttgcacctcctgngagaaaatgtgtgagcatgcaggttcctgcactctgcccatttcagctcacatccgaggaaagaactactgcgcctgataaacgctgatgcctctacaccccgagggctggggatcccgcttacaaggctaccagagaagcagggttagagaaagctggtcctggtgcctcctcctcgtncctaccgngccctcggtcttttcctacgggacttctgaaaagctgttctacagtcattggttttctggccgatttccagtctgccacactaggag

SEQ ID NO: 538239 - DNA, 92 bp, Homo sapiens
aagaacggaggcttagggaagaaaaaataagagggtgattcagtagctgggaggagaattgaaaaatcacaccgttcaagtcttcacattat

SEQ ID NO: 538240 - DNA, 196 bp, Homo sapiens
caatgtgttgctgtaccagtgaataaggccgttacggcgcttccctggaccagcgcttcggtatggcgccgaaccaggaaaccaacaccaagctggtcagcgacgtgttgagcgatgccctgacgcgcctgttcaaggacccgagcatcggttcgctactcagctcgcagtaaccgtcaggcgggcgcggagcgcc

SEQ ID NO: 538241 - DNA, 683 bp, Homo sapiens
ctagaggatcccctgatccgggaaggtgctggacaatgttaattttcaaactcctccaggagactatcttcggtgatggcaccatgccatcatccctatatggcatttcaggggattaagtgaacttgtaatgctctgggatagtttattttaaagaaaccaggctgctgggttttaaaaaaaaacaacagggaaaaaatttgatagtaaaagaattctgtgtagtatattttttgttaggtgggcttaaatagaatgtgcttcagaggaagctcaagtggatttctgaaaatctggtgttattaatatggggcaagaagaatgtattaactgagcacactgtttcactagtagatattgagtaactcaattcagttatattttaagataactataatcttattcaatgtgtagcagaggatagagattttggtaatggtgacttcctgttttgtcattagttatcattagctgtatttccatatccttggcagcataaggacaacctataccatatatttaaactttttcatgtcagagacattgaatctctccaacttaaaaaagtcaatatgcaaagtcatctagtatttgaaggcattgtgatgcaaaactgaatctcccgggatacagggtacgagctcaatcgtatcatggctactgttctgtaagattccccaaaa

SEQ ID NO: 538242 - DNA, 113 bp, Homo sapiens
tgctttgcctattctgggtcttttttggctccatggtcattttagaattattttttctattttctgtaaagaatgttacgggtattttgacagggattgaacagcggaccggg

SEQ ID NO: 538243 - DNA, 131 bp, Homo sapiens
cccctcgccctcccgcccctgaaagtttgttatttaaattccccggggggggttttttttttttaaaaaaaatttaaaggggaaccaaaccccaaaaaccccgaacccccgattaagaaggggaatgccca

SEQ ID NO: 538244 - DNA, 1062 bp, Homo sapiens
ctgtgctcgaccagggcggctgttactgacctgggccattagcattggggttccaatcgggtagcacgacttggagctgtcgcagcgtgactactgggcataaactgcccgtgaagaagatcaagtgtgattgtgacagtccaggccttcgtggacacgatcgcccgtcatgacggaagatgctacacgagtacctggtgcgtctcatgggcgtgatcctgcaccagggctgtacattgtcatggagcacgtgagcaagggcaacctggtgaactttcctgcggacccgggctcgagccctcgtgaacactgctcagctcctgcagttttctctgcacgtggccgagggcatggagtacttggagagcaagaagcttgtgcaccgcagacctggccgcccgcaacatcctggtctcagaggacctggtggccataggtcagctgactttggcctggccaaagccgagacggtaaggcgcgtctagactcaagccggctgcccgtcaagtggacggcgcctcgaggctctcaaacacgggaagttcaccagcaacgtcggactgtctggagattcttggggtgactgctctgggaggtcttcatcatatggacgggctccgtaccctaaaatgtcactgaaacgacggtgtcggaggcccgtgcgagaaggcggtaccgcagtggaaccccccgagggctgtaccaggcccacgtgcacgtcctcagtgagcagctgcatgggaggcagagcccgcccgcacggccaacccttcacagcaaactggccgagaagcatggcccgggagcgtacgcaagtgcaaggtgtcacccagcctccgtctcaagggcaggacgccgacaggcgtccaccttcgcccacgaagccaggagcccgtgaccccacccgcgtggggcccttggcccaagaggaccgagagagtggagagtacggcgtggagggcactgaccaggcccaaggagggtccaggagggcaagtatcctccatggtgccaacagcaggggctggcccacgtagggggataacgcccgagccgtgacac

SEQ ID NO: 538245 - DNA, 577 bp, Homo sapiens
atactatttcgatgatactttttcctttgtaccgcgtggcatcaagcatagtcatgataagaaggatttttattaaaaggcagtctgaaaatgggagatggtgtagagaaattcatttgcttcttctcctcaggatgtggaatggaagctttgagggaaggaaaagtaggaaaagagcgggatgggatgggatgggatgggatgggatgggataggaagagaggctggggaatgggcagagaagggggtgctgagtgtgctgtgagatagagcaagatcacaagaaggcctatctgtaagtgcttctaagatacggtgcagaatccgactgcaatgtcgctagtgctgcctatgtagatattcactagaataaaaaattccagctagttcacattatctcgtgcgttctgagggatccactccatgcttgtctgggcttgaccgggggcaaatgtagcacctccacatgtgcttgtatggtccttgaacattagagtgagtagccctgggagatccatggagggctctagaaacacacgtctaccagtgtggctggaggtcctgagctaaaggagaa

SEQ ID NO: 538246 - DNA, 125 bp, Homo sapiens
cccctgccagcagcctgagctcagatgcaggaaggacatcccagaagccatggctcatggggcgctatccaggcattctagccctgcccagacagcagaaccctggtgctggtgggccactagcg

SEQ ID NO: 538247 - DNA, 449 bp, Homo sapiens
  misc_feature (7)..(7): n is a, c, g, or t
  misc_feature (106)..(106): n is a, c, g, or t
  misc_feature (401)..(401): n is a, c, g, or t
  misc_feature (443)..(443): n is a, c, g, or t
aattaanggggaccgtttccaatatggccttggtaaacaacaggcctaattcaaagtctattcaaaaaaggtaaacaaattcattttaactgcccactgatatttnatagacttccctcccaaaatattaaaagctccttaaactgggcagattaagaaatacataaatggcccaggtgtggtgcctgtaatcccggcactttgggaggccaaggtgggaggttcacctgagatcaggagttcaagaccagcctgaccaagattgcaaaaccttgtctccactaaaaatacaaaaattagccggtagtggtgcacatgcctgtacttccagctactcaggaggctaaggctggagaattacttgaatccaggaggcagaggttgcagtgaaccaagaattngccactgcactccagcctaagcaacacagcgagactccatcntaactc

SEQ ID NO: 538248 - DNA, 418 bp, Homo sapiens
tgtgggagtgctcgatgttacccaggacagctccttcaacgagaataaagccttattcgaggatgtgcattgacacgtgtggacactgatcagcgcggcgtgaccaagccctgcagggctctgagcaggcaggcgagtcccaaggagagtcagtgacagcacatggggcaagggagcttggacagaagaccccagagggtgcggcacctgggatgagagccctggactgcacaccacggcagaggggtgcccctgaaggactctgggcatgtgcacatgacaggatctgagggtgtccagactcagatctccactgcctgagggagagtgatcagccagggggagaggccagggactgctacctgcccagaaggcggcagggaggggaagagcagatattgaggtattgggtgtgccc

SEQ ID NO: 538249 - DNA, 1132 bp, Homo sapiens
gcggcagtgcagcccgaagccccgcagtccccgagcacgctgttgccatgcgtcccctgcgcccccgcgcaggctgctgtcgctcctggctgttgctcgtggtgctgcgcggcccggtggaccgccggccgaggccccgaccctggctgcgggtggatggcggtcgcgcgcgcgtgtggcccctcgtgcgtcttctggaggaggcacacggtcgttctgccccctgcttgtcacaccataccaggacttgacctggtctgttgcgttccaggttggggacgctagcacagcctggaccgttcacgcgtattgttgggtccgacccgttcccatcgacctgctgggcgttccagggccagtgttcccgggaagcctgactttgcgcttgtgttggtcaccctatcgttcgagcctacgcaaagggccgttttcccactatgtgagcgtcggcgcacatgaaggcttacaaattcgttcgggacacacgctgtgtgcaccggggggctccccgtgggagaccctcttgttcgcggtgggaggagggcgccacgcctcccattcccccagtgtggctataggcccgccttgaagttgcggtgcttgcgtggccgtccgcggcgccgcgtgtttctgtgcttggaccttttaggggtggcaccgagtgccgaggcggcgtgcttgttttggcatctctgcaatgggaccctctggtgtcgtgccggcgtccctgagttccaggcgaagcgattacaggtacgaggacaaggctttacggagcaacttggtccagcccaattgctcccccgaaggtttggagaaccgttttcgaagagaccgctttacaaaagttgaaagcgccgctgacacggaatcgatcgtgaacattattggagcgagaagcggtcgaatcccagcttgtactgcgaatagccaacagcggtgtattccgcctgggagccttaacttgacggaaatgtccttttccttcaggagagaggggctgttggtgtgccgccccgaaccacagtgcccccctgctcccccgtgcggcgccttccggcaacggaccgccccggtggattcacatatccacttaccatacagtcgccccgaacccgacggtatctgcgcc

SEQ ID NO: 538250 - DNA, 310 bp, Homo sapiens
tctcaaagtgttaggattataggcatgagcactgcgctcggcctggccctgtctttctttcccaaaagtgactgagatctgggatgacagtggaaggaagtttggggttggtcttctgacttccagaggaaaccctcagggtgtaaactcaaaggaaataggagagaatggcttagacccttcaggaggagggagaaaagagaaacaagaagagacagaaggttctaaagctctgataaggaaggaagagggtttccagaataggggccagggtgctactgagaccccatgtcttggtgtccatacatcc

SEQ ID NO: 538251 - DNA, 685 bp, Homo sapiens
agacttgtttacgtgtggcagtgttgtaaaaagaaactaaagatcacattttacctgtatggatggaatatcccttttcttcaagtgcagttgtgatgtgtttgttttttttttttttttggtaattaacatgttctgaaggttaacaatggatatttgaaatggactgtagagcattagttgaagagtaaagcatccagtcccatgtaggtttctcacgattgtgttaagtctccattgtacagcattgaatggcggcagtaacatttccctttctggtgaaggttctaaattcagtatatgacctatttagcaatgccttgtgaaaagggatatggtctccagtggtacacttacattgtctacctaaaacagagatagcctcatcttgtgccatataaggctgtggtaatggacatctagtagactactgcactatgtaaaactggaatctcaaataaaatcatacacactttctaagttctaaatattggtcttctctgaaataatagttgacgcgcaatatttgtacagttttctggcactatcacaatggcttttaagttattactcaagaagcatgttcgtattagagacaaactctgtgtaaccggagggaaaatagcgccagctctgagcaatttatatgaggcaaatgtgctgtctgaagccaatgcttcgtgtg

SEQ ID NO: 538252 - DNA, 397 bp, Homo sapiens
tgggtgctggccttagatgtaggttctgggtagttgatgttgcatagtccagatgaatagaatatataaccttttaacgattggattgtccgcaaacaaaaggggttttcccattgcccacaaacttgtaccatttctctgtgtaattctattcagctacacacagccctccgtcagcgtaattccattcagctacacacagccttccgtcagctacacacagccttccctcagcgtaattccattcagctacacacagccttccctcaggttaattccattcagctacacacagccttccctcaagttaattccattcagctacacccagccttccctcaggttaattccaatcagctacacacagccttccggcaggttaattccatgtagacgc

SEQ ID NO: 538253 - DNA, 854 bp, Homo sapiens
gcccggcgccccgccccagatgctccgatgcccgcccggggagtttcctgcggcggcttcgcgctggaatccagaaggaagctcgcgaaggcctgggcccggcgtgggcgggagcaggcgcctcccctggtgtgcccctgcctgcccacgggctgccacctgtgctgctgctacctgatggctgcctgccccctgtggcccgctgctggcccttccctgccaacctgcctgcctcccgccacctgtgagcctgctgctggtgcctgctgcctgtgagtgatggcctggttttgccccatgtgaagacctgcttgatgtcctgtgggctttcccctgcctgccacggcccctgacggggttgtctgctccttgatgtgtgtgcccgctgacacgcgggcgcgtacctttctcgctggcacggcccccgccggggccacaacctggtgacgagcttgatttgtgcgctccgatttgggtgataattgccctcctgctcgacgccccgagcttgagagtgtgcgacgcgtaacaaggatcccaggacaggtagggggccagccatgaggctggccgtgccatagtgcgcacactacgggacgcggccacacaatgcgcggaagcgatacacatggaggaaaactcgtccagaccgcagatgagataaaaccaacacggaggaggacgaacagaaaggtgaacagttcatcgagaatagctacagatgaatgacgccagtaggcagtggacatgaacaaaaaccgagataaaaaaacgaagaactatacgagcccagggaaaaacatacacctagaacacgcactgcacgaaagactgctaccaccacaaaaccatcg

SEQ ID NO: 538254 - DNA, 390 bp, Homo sapiens
  misc_feature (281)..(281): n is a, c, g, or t
  misc_feature (343)..(343): n is a, c, g, or t
  misc_feature (374)..(374): n is a, c, g, or t
  misc_feature (382)..(382): n is a, c, g, or t
caacctccacctcctgggctcaacctccacttcctgggctcaagtgatcctcctacctcagcctcacgagaagctggtattacaggcacgcaacatcatgcccagttaatttttgtgttttttgtggagatgaggtttcgccatgttgcccaggctggtctcaaactcctgagctcaagcgattcacccgcctcggccttccaaagtgctgggattacagacatgagtcactgcatctggccataatatatacattttttaaggtaccttaaataaaagantaaagggcatcattataaaactttaattttttttaaaccaaaccaaagggggttttaaaggnacatatttttaaatgtgtattttaataggancgttagtnggcaccgt

SEQ ID NO: 538255 - DNA, 876 bp, Homo sapiens
ttataaaagctaggtggtctcttgaatttggaggccctagagatagtcatttggcaagtaaagaccaagggaaccctttctaaaaacgtgggttgaaggacctaaatacctggccataccatagattggggatgatgtagtctgtgctaaatatttgctgaagaagcagtttctcagacacaacatctcagaattttaatttttagaaattcatgggaaatggatttggtaataatcttttgatgttttaaacattgttccctagtcaccatagttaccactgtgtatttctaagtcatttaaacaagccacggtggggcttttttctcctcagtttgaggagacaccatcttgatgtcattactcctgaattattacatttggcgaataacgagggcatttttatttaatcagtttacctaacttcaagctgtgacctatggtatatcttcccaagagtggaaatgctggttcagaatcataccagatggtcagtgaaagctgattgcctaggaaacttttaaaagggatcctttcaaaaggatcacttagcaccacattgttgctttaacttgatgtttgaatttaatactctaaaaatagacagaccgtaatatttacgtcacttaccggcacttcacctaaaggtgctggatttacggatttggctgcagccgtactcccgagatagaggagccgtgcacgctgcttttcaatgcacaaaaggctggccgggcccgtggtgtagtacacaacggtactgggaccgtttacgcacaatgatatagggtgggcccacacaaatcggcgctcgtcagaagaagagagcatctattggcccacgccggggggacctcaaaacaaccgcggcgccgg

SEQ ID NO: 538256 - DNA, 111 bp, Homo sapiens
  misc_feature (56)..(56): n is a, c, g, or t
gaggatcccccgagttatcgccacacacagaaacattccaagcctgtgataaactncttcaccctaaaaccaataaaaactctgagtccataggagcaagcactcctaacc

SEQ ID NO: 538257 - DNA, 1045 bp, Homo sapiens
  misc_feature (108)..(108): n is a, c, g, or t
  misc_feature (131)..(131): n is a, c, g, or t
ttcctgtacatatttagatataagctgctatacgttgaatggacccttttgcttttctgatttgtagttctgacaagtaaatattgcttcagtagagccaccatatgnatctttgctgtaaagtgcaaggnaattttaaattctgggacactgagttagatggtaaatactgacttacgaaagttgaattgggtgaggcgggcaaatcacctgaggtcagcagtttgagactagcctggcaaacatgatgaaaccctgtctctactaaaaatacaaaaaaaaaaaaaaattagccaggcgtgggggtgcacacctgtagtcctagctactggggaggctgaggcaggagaatggcttgaacccaggaggtgggaggtggcagtaagccaagatcacaccacggcactccaaccgggacaacagagcgagactccatctcaaaaaaaaaaaaaattggtgtggcctcatacgaaaggtattgggtttggtgggagagtgtcagactgttccgggaaggtgaaaacacagtttatggtacggggaaagggatttgataatccttagggaatgtcatccaggaggtagagttggatggtgagggttttttaaaaacaacaacaaagagggagagcggatatacttagaaaaggtgtcttttttttttatatccccctttaaaaggtgtgggggctaaatttaaaaaggcggttcatagttcacccctggtgtataaagttaaaacgtggggggaacttgggaagacccggcagcggtttatgcaacaagtgggcgtctcccaggggaccttttttgcacagcgggttccaaaagtaatccggggcagacaaaaaccccgagggccacagaactaccgaattggggaggcggcccatggggcaggtgaacacagcgccccgtttacagcgcagacaagggatgcatgggggcaccgctgggggaaagaccccagaagaccagctgattggtaggacaacgagtacattgtgagtcagacgatacagacaaagtcgacaacgtcatatca

SEQ ID NO: 538258 - DNA, 801 bp, Homo sapiens
  misc_feature (483)..(484): n is a, c, g, or t
  misc_feature (496)..(497): n is a, c, g, or t
  misc_feature (504)..(504): n is a, c, g, or t
  misc_feature (513)..(513): n is a, c, g, or t
  misc_feature (515)..(516): n is a, c, g, or t
  misc_feature (522)..(522): n is a, c, g, or t
  misc_feature (525)..(525): n is a, c, g, or t
  misc_feature (546)..(546): n is a, c, g, or t
  misc_feature (552)..(552): n is a, c, g, or t
  misc_feature (556)..(556): n is a, c, g, or t
  misc_feature (558)..(558): n is a, c, g, or t
  misc_feature (562)..(562): n is a, c, g, or t
  misc_feature (569)..(569): n is a, c, g, or t
  misc_feature (577)..(577): n is a, c, g, or t
  misc_feature (579)..(579): n is a, c, g, or t
  misc_feature (587)..(587): n is a, c, g, or t
  misc_feature (593)..(593): n is a, c, g, or t
  misc_feature (597)..(597): n is a, c, g, or t
  misc_feature (602)..(602): n is a, c, g, or t
  misc_feature (606)..(606): n is a, c, g, or t
  misc_feature (608)..(608): n is a, c, g, or t
  misc_feature (613)..(614): n is a, c, g, or t
  misc_feature (617)..(617): n is a, c, g, or t
  misc_feature (619)..(621): n is a, c, g, or t
  misc_feature (629)..(629): n is a, c, g, or t
ggagacagattcggggtggtcgcttcttctccttggatttgttaaggattccaagtaactcttatttggagagaagacgatctgcacttcgcattttggcattgacatttaattttagggtcctttatatagaagggagagtaggtaaactgatttttttttttaacagggagggtttgacaatctttggcagacttggagcaaaagattgaggtgcatttcatgcctccttttgagagtcttgctctgtcgcccaggctgtagtgcagtggcgcaatcttggctgcaacctcagcctccccaagtagctgggattacaaacataagccaccacgcccagccctcatacctcttttaaaagtcgacctgttttgcagaaagtctgctgtttttgtactaaaggctttggaattgggcatttagctaggaatgcacattctttcacctcattcatactttaagaaccacagaagtgactctgcnnggccagaaggcnnactgggnggtgggtanannaaaagnccntgagattttgcttttcatgancttgcncacngnaacntccgccncccaggtncnggcgattntcctgnctcngcctnccangnagctnngantnnnggcgtgtngcaccacacctggcttaattttggtttttaggaaagaagaagggttaccatattgggcaggctggtttcaactcctgcccccgggatccggccacctaacctcctaggcggggattcaagcttagacccccctgcccgcattcttgaggagttttaggagtttgttaccccc

SEQ ID NO: 538259 - DNA, 458 bp, Homo sapiens
cgagtcaacgtgaactggtgaaagggattgaatcaggactgacaccattattccttttcttactgattggcgctttaattgcgctgtggctggcgactggcgtgattcccacgatgatttgggcgggctttaaaattttaaccccagcatttttcttaccaacagcgtttgtcaccacctcgctggtggtgctttgattggtagtgcctttacaaccttatcgacgattggcgtctcgttgatgggtgttggcacgttgatggggatgaatccagcgattgtggcgggaattgtcttatcaggcgctatttttggtgataagagttcacctttgtcagaatcaacgaatttggccagtgcatttcagggacggatctttttgccacattaaaaatttgatgtggcactgtgccgcttgggcgtgacgtttatcgtagtgtgatttgagtgtgggtacc
